United States Patent Application Publication US 2009/0018031 A1 - sequence listing, part 3

SEQ ID NO: 1347 - DNA, 6000 bp, Homo sapiens
atgtatagaaaactacatatagtggctaattttaatatatcatttcataagaataattcaagcattataagaatcttgttgaacagagaagccagggaggtttgggggacataataattggactccaggaatactgcagaagttgtcttgagtccctggaagcccttgtgaaaagaggagagcagctgtaagcacagaggccacagagcagggaaggcactgacttgctttctctggctccagatttcaaactaacaacctattcaaagctgaactcacttactagtagagtacttgcaattggtaaaatattcagtcattacatactgaatattttaaacttttgttacaagtactttgttatgctttgtattactattgtatttccttacagtttaatgtactgctttttaagataatcttaatctttttattgtcacagaagaataatgcaaacctgaaatcattaaagccagacaagcctgactctgaggtaagaccaattcctacatctaatcttcctttaacatgaatagtgataaagtcgttgtgattaaaacgtctgtttcataggagcaagccaagatagcaaagcttggacttaagctgggtttgctcacctctgacgctgactgcgaaattgagaagtgggaagatcaggagaatgagattgttcaatatggacggaacatgtccagtatggcctattctctgtatttatttactaggtaaatgtagttgtatttttattttttaaatcagtataatgatatctggtgtaaagaaaaaagttccatgttaaatcattgacaggttaaagtcggtatcaaatatatggtaaaaagactaaaagtagttactatgacaatttacgtaagtgaatgcaacaacaagacacatgtatttaattaggatttagatttagaagggatcttctgctaggtttctgcccactctttccatcattgaaataattttacatcctgcttttttgttatcctgcattgttaatgcctctcccagccagcatcagtacgttaagaaaacatgtcttttatgcctttatacagtgattgactagatacagatgaagattgattagacacagatcaaagaatagagctatgaggactatgtcaatagcgtgccaaatctctgtgagtcaccattcattatgtagagaattcccctaactttaatgttatctgacctatattctctgtcttgatcatattacaagactcttgatcaaatgccttgttgatgtcaatgttagtcatatttcagtcttccattttagtaatttatacataaggtatagtaattctgcttagttaaaatcagttatctgctcaaaaatcccttctagaattttctcaaggaataacttcaagcttttcactcagtttctgaaatctatctttttcatttttggaaacctgggaaatacttgatatctccagttttctggctcctgtcctactcattctgattttggaaaggttatccaccgtgggacacacctgcaggttgcttcagtattctagagactgaagctcaattaaagtagtgaaggatctctacaactgtgtgggatttgggactcaataaatagcaccccctgccgggcatggtggctcacgcctgtaatcccagcactttgggaggccgaggtgggcggatcacgaggtcaggagatcgagaccatcctggttaacacactgaaacccggtgtctacttaaaaaaaaaaaaaaaaagttagccgggcgtggtggcgggcgcctgtaatcccagctactcgggaggctgaggcaggagaatggcgtgaaaccgggaggtggagcttggagtgagctgagatcgcgccacttgcactccagcctgggtgacagggtgagactccatctcaaaaataaataaataaataaatagcaccccctattcccacccaagttttgaacaaaatgaaaaataagcaaaagaataggtagatgggagctggtaacatttatattgataaagctgatattggagaaagtactttatgtccataggcaattaagttttgaaaaatgatccctagaattacaaagtcttacctcatagggacacaatgtatctctataaaacacatggaagaccagttatatctcaaaggcagcttcacttccaagagaaaaaggagaaaagaaagggttaatgtgttcaatttatttttgcaaagtcaccagaaagactgaaaagatgagcatccacctccttttatgggatgggataggtgaggcagcagacagaagtgagggatcctgtgctcgtgaagattccttcctatagaaggaggattaagagtggggaagatgcagtcccaagcttagaggcatcattttcctcttgatgacgtcttctaccttttctagatagataattctctggaaaaagaaggcagaaatgataggagttagaaattttgctgctgtttagctgtcatttgtcagtaccttatcatattttccatcattggagaccattcctttggtggtttccttccattgttcttaactgttgttagcaagcttatcctgtgattgagtcttcccaacatgaattttgacctttttaagttcatacctttttaaaatctgatggcccaggcctctaaaagaatgcaaaatggaactcctgtgtttacccacaataaatttgcacagactaactgaaataacaaaaatctcagcttttggctggaatcaagctagttatttccatggtgatgaaaatcatgcttttaaaaaatgtttttgactaataagacttgggggaatatattattaatgaatatagtttgatatgtaaaatattcccaaatgaagggttcatcaatagacttgcctggtttttttttttttttttttgagatgtagccttgctctgtcacccaggctggagtgcagtggcatgatctcggctcactgcaacctccgcctcctgagttcaagcaattctcatgccttagcctcccgagtagctgggattacaggcacacatcatgacgcctggctaatttttgtatttctttattttttattttttttgagacggagtcttgctctgtcacccaggctggagtgcagtggtgcaatctcggctcactgcaatttccatctcccgggttcaggtgattctcctgcctcagcctcccaagtagctgggattacagttgtgtgccaccacgcccggctaatttttgtagttttagtagagatgggatttcaccattttggccaggctggtctcaaattcctgacttcaagtgatctgcccgcctcagcctcccaaagtgctgggattacaggcgttagccaccacacctggcctaatttttgtatttttagtagagatagcgtttcgctgtgttagccaggatggtctcaaactcctgacctcaagtgatctgcccaccttggcctcccaaagtgctgggattacagacatgagccaccgcgcttggccaactttttaaaaaaagattatagcatctcctttgattagttttatttcagaatatttcaggatggcatgctcagtattttttgtttcagtgtcagaattgtagagtatcccatggacactgggaaacatgaggggttgcactacgaggggaagctctgtggaataggacttcttcctagaatatagttattggatagtagtgatgacattccagaatagaaaatggatttttctgtaatagataaataccttgtagcagttttcctgggcagatttatagcccttcttcaggttactgtttaaggttgtcttaataatttatatgatttcttaatgatttacatgtaatcattcatatttcttaataatttagatatttaaggttttctagtgccttatagtttttcaatatttcaaacatactagtaccttattgtttttaatgtggtttttgcttcatcatttcatttgattttcatgacggtttactggagaacaggaatgatatgttcacatctcctaagtggcagaactggttgctactagattccagattttctgacttatccctagtccattgctcttcttaatgcatttggttattcttattgtaatttacttttcattttttagagttcttaattcttcttggtagtttttaatctgctgttcctcaatcttctgatgagagtggtagcacaagtattattatgattgctttattcactcaaaatagaatgttcagtgatatgcctcatcaaggttagataactgagttactaccagaattgaaataagaattagaagtgaaatgtcctgagttttggtttgatcctctttccattacgtaacaaaggctttcggtcaagacattatcaaatctcacatatttaatttatgaagtaaaatgaaaaaggttaaaaagagaaatggaacttaaatattacttgtttaaaattttttatattatgaaattaacataaggtttacttggggaaaaatatcttaataaataattgtcaaatattaaagttgctttaagcataaagttacaatattatcagtctattcatattattcttcaaaatttaggatttgttaatacacaaatgctctaaaattttaatattataaagtcaattttcaggtaataactttttgttaccttcttaacaattaattttattttagaggagaggggccactgaaaacttcccaggatttaattcatcaactagaggtatgccttgtttccgttttatgctagtactttaatttcgggctaaaagtgggtaataaatgttttccagatgatttattatatcatgtgtatatgcttacatctgtacctacctgtgtattacagagagcagtagaaaagtagaaaggtagatggcttgcaatgacattttgcaaaactatcctgacctcattggaaagaaacttaaatattatgagcataaagtagaatgggctttgttggtagtcaatagatgcaataataagctttaggtttacctaagtaggtgaaaatatcctgtaagcagatgcaaatccagagttctagaaagatttttggcctcttcattattgaattggataaaatatattgattaaatgagataacacatgagagagtatctgttaaaatgcttaagactattagagggtattaagtacatcttagtttccttctttccttcagtattcatgatgatttagggcattaaaggagagacagatatgctaacatccactcttgtgccatgtgtcttaacaggactccacataggcccatctgtaattctactccctctagttagaggctttagattggcaagtgggttgcaaaattccttttatgttttccctgatccccatgttagcctgtttgcctctctagaaccaagagcattcttgtgtgtaaatttgaaatttctgtcactttatcactcatatagtctcctttggcattcccatgtacatctgagatttgaaatttctatcactttaggccaggcgcggtggctcacgcctgtaatcccagcactttgggaggccaaggtgggtggatcacgaggtcaggagatcgagaccatcttggctaacacggtggaaccctgtctccactaaaaatacacaaaattcgctgggtgtggtggcgggcacctgtagtcccagctacttgggaggctgaggcaggagagtggcgtgaacccgggaggcggagcttgcagtgagctgagatcacgccactgcactccagtctgggtgacagagcaagactccatctcaaaaaaaaaaaaaaaagaaagaaatttctatcactttatcactcatatagttttatttggcattctgtgggaaagggatttcagcttaagaggatgattgtcaacataatcagaagtattatagaaaatgtgtcttctggatttttctgtaaagcagactataaatgagctatttcccttaagatagttgaaatt

SEQ ID NO: 1348 - DNA, 6000 bp, Homo sapiens
taagtaactcatgtttttctttagtcaatcattcattcattcactaaaacatttgttgagagttggctaaactctagattctgtgccaggcactgtacagggtgatggagatcactcataagaaggcctcttgctcttagccagatcatatgtaatactaaatttaaattttttgcattaaaaggctaaaaaatcatttgtttttgttaattatatactggttgatttatagatgtaattagcacatattcataagagacaaatatatacaatgagttactatacatatacaaagtgattttagctgtataaagtgatattgcaaaaaactacagctaatgtttcttgctgggtaattattagcataaatatcaggttcttagaggtctttaagagaatactttagagctaccaaaattagcagcagtgatgtaatatcaccctgaaataccaggagcagaggtgccccagagtgcttcacagctatgatcaggaaacttgacctgccccattgctacagcaacggcataaggactaggaaggtccactagctggggaggtcttggaaccctccgagccagaaagaagcattccagcatgattcctcagatgcaatgaggaaggtttacagaattttcacagggcaacagagatcaagtggtatgaaaaggtaggagttttaagctcaagtctcaaagataacctacctttacattctcagtcagaatttgacccagaaagaggaagtttcttcaggaacagaccgtacgttgatgaagtagaagtcatttcagtaaaaacggagtacagaacttggtcataatatcttgcattttatagatttattaaagattagtttcaagttcacattcgctattcagttgtaaaccgaatggatgggaggggagaaaatacaagctctccacacaggtatgctcctctcttttctgagagagaaggcatgggattttcagcataaattccatgttatgtgagtgctgtttgagttctgaagttcctatcaatatctgttcctgcaagtgatctctgtaagaccaccttacatgctggtcttagttattgttaaaattgcaaggtttcttcacaccctctttgataagaagtgtttagctggcagagctttcccttgacttctgagtctagtgtgggttggcccatgacagtgggaagaaatccaacatgttacatggagaccttgtatgtaaacaaactctgtagcctttgaaagtggaactgctttttacagttaaagggctgctaaatggcttgcagatgagatcttctggctcaccttgatcttcacatgaacccattgtgacctatctggatttcctaggacctgtagtttccatttgggttatattagtgcctcaggaatgtgtcactactggtcaagcaatactcagaaattcaggctgtgaggggttagattagaggaaagtaatttaggtgagctatccagagctttcaacctcagggtttataggaaaaaaaaacaaaatacaaaaacccttaggacttctcatactctagccctgaccttgcagtctcctctgaggggcctcctaagacccttaaaataatattacaataggactttgagtgtgcatttcacagtggaaatagcctctggctagcattacttccaaatgctagttccagctaaaaacaagtactttttattagtttcttgtctttcaacattctgccatcaaaatatattcattttattaacttaccgattattgggaacctgcaaaaaaaaaaaaaaaaaaaaacacacatgctgtctgcagccactgtttggttatttttgatagtttaagagaattataaatcaagttgttctgtctactagagtcagaaattctgtgctagaatgggacttctaaaattaggtggtcctgtcactttctagagaaagacccaaattcataggtttaagtggcttgtctgacatacacatacagccagttagtaacagaattcagaatagaatagagttcttttttttctgtcagtccgttgttctacttctctttccttttcttcatggttgagcagcttttggcaaaatgtgttccatatagcagtagttccaagagatgttaatagatgtaagaaaaaaagtgtgtgtgtgttgggggtgggggattgcatggtcaattaaaatgaaggaatgctgagtttgtttccttactgtaggacttctaagagttttgaacatgctattacacattgtgaatttataaaaggggacaaacactgtttgaccttagactgcactccccttctttattcctcagagcatctcaaaggactacagggtcctttgagaaacatggcccttgatcaagtttacaactctttgagaagacatccctaatggaaatactgaatggcagatctattactgtggtaccatgtagtgtgtaataaatcttgaagtccagaaagcaagtatatttgctgtttagagctatacttaaggtatagagattcttttccacctgtggtgtgtaaaatcagtattgtgtttaattttgcaggtttttcaaggatcaactaatgtgcaaatacagtggtgatatattgatattacattttaataatgcttttgtatggcactttatagttttcagacaccttttgtaacagccctgtgagacagacaatattatccttattgtacagatgggggggctctggaggctctgaaaagtttttggtgatattcccctaagtttataccacaaaatgatggagccagaatttagttgcagaacttctgactccaagtccagagttctttactagacatctggtttcttactagctttttgctagctttttattttacagtgaaaagtatggaagcaaatcctgataattttggcttattatcaaatatcatttattttttattgcagagacccagcagatgtaactctcattgtagccatcccaaagaaaacccttctttgccctttgcagtgccacttatttaggtaactgaagtgtatttccagtacaatttgattttgaactaagatttgatatagagttgtaattgcttacataactctttgaaaatgtatcatccctgggttctcaggtgaaggaggcaattcaaaagtaaaaaagaatattcgaatacaataaataccctctgttctcacacaaatgctgtttcttagctaacttgctttgacaacctactgatgtaacttctttattaatgtgaaatatttatattttgaaataaaattactagtgttgaatgaatcatgtggtaaacttaatctcctgtgtgttgaaaaacttgatcttttgtgaagccaaagtttcatgaatccatccgtctcttaggccttctgttatgccatttcctccggcaccattgtgtacactgaattcttaggagatactgtcaacttcgtaagggaaggtgtgtccaggaagtggacactgggcgccttaaagaggtcaagggccctcagtgcacaggggaaggtggccttgtgataggtaaggaagtggtgagatggttggctgagaagaattggaagaaaaagttggattgaggacctgtcctttttgaatgaagaaaaagaagctgaagcttggctatcttcaataccaaagacagctgtgcagcactggtagattgatgaagctgaagctacaggttgaagcactgtgaagcgcctttcaacggtgcttgggaaagagctttcttatgcctcaggttgatgtacccagctcatcaatctggtgttatggaagaagaaatgatccaggccaaggtgtccgggtggactggccagcctcagattcttttttactctgacaggttctcactggcagatatggtagttgacaaaacattttttcatgcttctcagtctgttgcttaagtctggaattccttcacggcgtgcatactgctgacaacctccttttggccttgctcctggagaccttagaataggagtcttcagctccccgcccccatcgtggggctctgtgcgagctcagagttgtgcttacagaactgattcttacccttcccctcaagtgagttgtcagaaatacacacttggtgttttcatgcaatgaacagttatgaagaaactgctctgtgcctggcactaggaaaaaacttcgaaaaatagttttaagaagtagtgttgaacagtagatgaggctttttcatgtttcttttaaatttcttttgaataagtctaaacagtagtgtgaaagatatactgacttcctgccgaatacccagatactccattaatgattgcattatcaaatgtttccccttcaatccagctcaaagtgtttgtgagaaatacatggtgaaagaatgagcagggtggagtggaaattggaccttccggagaagccccaggaagacattaccactggaattcccgtcccaggggaaaggcccctcccaacagacttgattctggttttggtctaccagtttcaaccccagcacagcttccagaagtctttgcgggaattcagagctgatttaggacgagtcacctatcgagaggacgggaagctttgctggggacgcttgtctgtccaagtaagaggaggccatgtggctgtgtgacagatgtgttttgtttctcctcgccaccctggcgagaaggtgcctggaacccatggaaggggtctgagaagagataagggcggggccatgtgggggcgggacccggcttagggggtggggttgcagggagcccacaccaggctggactgcgcgggcggggcagaggccgggggtgggcggggacatacggtgacgggcgtcggggacgcagggttggcggcggagccctgggggggcgggcccctgggggcggggtctcggttggcgcgagtgtcctgtcgccgccgcctcgggcgggtgggctgactggcggcaggctcgccgcggcgcggagtcccggctgcgggatagaccgagggccatggccgcctctcccggacccgccggcgttggcggcgccggagcagtctacggctccggctcttcgggcttcgccctcgactcgggactggagatcaaaactcgctcggtggagcagacgctactcccgctggtttctcaggtaaagtggcgcctggcgcggcccctcttctccttcccgccgcggcccgcgatggcggccgccgctcgcacgaccggacgggaggcagccgctgccccactttccgcgccggcactgcggcgttcttgtcggaccgcctgtgtggggctccgggacgggcctcggcccgggcggcgagagactggataatccaaactccggcggcagggttgagtggactcggcagcaggggaggctgcggggcgggggtgccggcctgggcctttgcccccagtacctgcctcgggtctgcggctcccgggtgcccccggccgggcgatgccccctccgcggggcgagtggttgagcccagctcccgaggcagagaggacccccgcggggcccctcgctggtacttagggccctccacgataaccgactttgtcaccagttcgcagcctggtcccgagcccggctcctccgcctggggtattcctcccggcctccccgcccagcgtgcgctccctgatcctttgtccctccccgccgtaggtcagttcgctggcctcccattcatcccggccaccctaccccttcccctgaacctgctgctgctcacttctgcccgcttctgtccggcctcgtggaagagtgacgtggagactgtatgacagttaatccagatgcacaccgttttgccaagtcccgtttgggatgtgtgcgttactgtatttgccaatcagctaaccgacgccctgagttttaggaaagtttttgtttctctgagctgggttatatgcagcttcagggctagaattcctcacttaggtctgtggtaagatgccaagcactgtggggagtgaat

SEQ ID NO: 1349 - DNA, 6000 bp, Homo sapiens
accccagatttcttcccaaatttttgctggaatgttatttctaacttcacaacacccaggaaaaggcaaggtcaaagataattaaatgttttctgatgatgggaaaactatcagactaattgactcagagtccatcaatttttatttatttatttattattttattattattattatttttctagatggagtctcgcactctctcccaggctggagtgcagtggagcgatctcagctcactgcaagctccgcctcccgggttcacgcccttctcctgcctcagcctcccgagtagctgggactacaggcgcccgccaccacgcccggctaattttttgtatttttagtagagatggggtttcaccgtgttagccaggatggtctcgattttctgaccttgtgatccgcccgcctcggcctcccaaagtgctgggattacaggcgtgagccatcgcgcccggccgagtccatcaatttttaattcaaacacttaactctttgaatccttttcccgtagaattgaatggccccacagaggctacatctgggcaacctcccgtagattgcagaaattctctcttagaggcccctgcccatagattgcagaaattctctcttagaggcccctgagatcttctgcttgtccacaagcagcatctccctcccaggtgggcctctgaggtccccctttcactagagtaccctgtgttccgcagcttccgcctgtctagcggaagttggaggacagcagctctgcctccaataagtgagagtcttacaggcatgccaggttaaaaaacaagtaaaagatcgttccctgctcttacaatccagttgagagtcaggacataaaaagggaccctaggccaggcgcggtggctcatgcctgtaatcccagcactttgggaggccgaggtgggaggatcacctgaagtcaggagatcgagatcagcctagccaacgtggtgagacccccgtctctactaaaaatacaaaaattagccaggcgtggtcgtgggcgtggtggtgggcccagctactcaggaggctgaaacaggagaatcacttgaacccgggaggcagaggttgcagtgagccgcgattgggccattgcactccagcctgggtgacaagagccaaactccatctcaaaaaaaaaaagaccctaacacataaagagattttgagctgttaaaaccaaaccaacaaggtgggcagcttcatccctccctccaccatcagtcctacaaggttaagacatctgacagagaaggagcccttgtcaaattggtagttcgcaaaaataaaggtgtagcttttaatctaaaattctaccccaacactaagttccataactattttgattaatatattcttaaggatttagcgaccgtgtgtgtgtgtgtttagacgaaaacagaaacggttccttaaaatatccagtttgtaaaagcacagtgccttgaaccacttagtactatcattttgatcaagtactatcaagtactatcacttgattgctccaacccaataagcttgggcgagcctggcactgtgctaggatcttctggagaaatccaagaaaggtaagactgcggttttactcctcttcaccttctcactactcggattttgggcaggcaggggaccagggtgggggctccaattcccggtttgtgtttgttttttcagggggcatcttactgagcactaaacacgcgcaggtgctgcaccagatgccaggagccccgcaagcggaggagctgcgtacacgcgtgtcagttaactgggcgcacagtgcccgtggcgccgcagacccggccctcagactcagtttcccctcacagggatcgctcgccccgccccgcggcggtctggggagcagcagccccgggccccggccctgccttgccggtttccgccggtgcggctgcgtccttcacactccaccggaagctccgggcctggccgccggtaggcggtggcggaggcggcgccgaggttggctgccctacacccctgccccgggaccgcagggcggctccccggcccccttcctcgccccgaactccccgctccagctcccgcttgctgaggcggggactcctcgggtgcagccggggacctggcacctcggctgcagagaccgccccggactcaactgcccccagcccagccgcgggcgccccggccccgcaggggctcattcctctttccgcgggcaccggcgctgcctggctcccagcgctgccctcgcaactggatatgtggaggtggcgacgcgacactcccccgccctcgggcgggctcaccgacctggctgggggctcagcctgcagagccgggcggcgggggctgtgctggcgccggcaggcgcgaggaatcacagagcggggcgcccagcctcatcatggggcggcccacggagacttcccgtgggagtggggtctggtgcaggggcgccccaaaggacgagtgggagatggggacacgcggcgcagagagactcctcgtggatggagccgatggaggcccagtgtagaagagaaaggggtcaaggagacggataaggagccaccagagacgcggggggaattccccgcagaggatgcgggaagccggggaaaggaagggattccggaaggaagggctgagagccgggtcaggtgctggcaggagggctggttggatagaaactggggcgggcccagggcatttggcgtccccgacatgcgtatacacttggagagatgattccctggagatccaagtgcctgtatagacaatcttttctagaagttctaccgttaggtgaggcgagagtagatgtagaaattggagacgagaataaagagtgttttaaaagcgtgcgtggttacaggactggctctgggttcaggggtccccactcactagctgtgagaccttgaacaagtcgcttagcctctctgtgcctcagttttctcatctgtaaggtggggatgatgatggcaatacctgcttcacagagtgaaaattagatgagatgatgtctgtaaaattacgtaagacggtacccaaaagtagtactatttttcccttttcttattagagcaggttgcgcacgttttgatgtccgtgggaatgagcaggtagagagggtggtattgaggccggaggggagagaagggacccacagatggggagagaagtcttgggtgcctgttttatcccaaaccaggggaaggagggaacaggtagggctggctgcaggaaagcttgcaggtatggggtacacagttaaaagggagtgtcttctgatagtcttgatgcaggcctggaggtcgtttgttatgggggtggaggtcctgatgtacattgtggcggtaagatgccgtgctgtctttgccaccagcctgtggcagccctggtgttacaccagggcaggtgggcagtttaatgtatctcaggccagatgacctgccctgcccacctgttgaggctccagtagatagacgtgaaagcacagtataagcataatgcaccactttaatccttttctctgaggagctggaaggcctgtagtcaccatctgagccaaatgtcattcaagtacttcacttgggttacacaccacactttgacccactatctcatttagtcatcacaacaaatgggtgaaataggtattattgtcccattttacagatgcagaatctgagtttcagggaagttaaggactttgtcccagggcccacagttagtaagcagtggacccaggatttcaactcagctctgtctgacctcaaaacccatgatctgaaaccactgtgaaagtttgcaaaacctctgtagcagccaagcaggatggaaagatgtgtagggattgtcttctccatttgatagatgagacaagagctgggtactctgatctccatcccaagcacacagagcttggggccccacagccctggtgtgaatcccactccactaccagaggctgtgtgcctttggaccaggcatcttgcttctctgaccctatatacagctgcagaagaattccttgcaggttgctgtaaggatttggagggaaactgttgcccagcacacagtacacattctgggagccatcgtttccccagtgcacttttcctgcaaatgtggatctacatcccacttggatgctgagaccagctgctgtgatcttgcatttgtttagcgctttgttctccttgaggcagtaaagtggtggcacctgaccggagcatgtagccacctatgacttcctgagtggggtggtgtggggagggccctgaggagtctgtggtcctaggccttggatttcatcagggctttcctgctccttctggttgcctcagtcccaggcaagatagggtcccagaatcttacagcccagaggccacctgttgcaacttcttttttacagatggagtcatcagaacccactgtgaggaagtgacttctccttgaggtcacccagacactccaaacagagcagagcaaaagcgcctagaacttgaaattttggacctgtctccaacaccctggggatttccaccaggaaggtgagcacccccactgagaattccaggctgctcagaggtgccagggaacacagaccagggaccagctgtggccccctcctccgatgtgcccagggaagtgggggaagccagcggcagcctgcgattctcaaccaggggaactctcactgtgctttctgagagtctgtgacacgggtcattttctctgacttgctctcttgctttttctcactctaaaaaaaaaaaaaaatgactggacactcctaaagccttcagtcaccatccaggggatttttatcgccacaaagggtaattcctgctccatccctgctgtgactcagctgtgacgttgaaccacacaagccagagagaagaagataaagtcatcagagctcctactcaccagagagtgaggcccaggccaggactccacaaggctggtcccctgccctggagcaacttaaacaggccctctggccagcctggaaccctgagatggcctccagctcaggcagcagtcctcgcccggcccctgatgagaatgagtttccctttgggtgccctcccaccgtctgccaggacccaaaggagcccagggctctctgctgtgcaggctgtctctctgagaacccgaggtgaggtgatggaggagcggagggtgggcagaaagtgggtgccagggagggacccctgatgggaggtgaggggcagaggagcctgtgacttcaggcggtgacttttcttctctgggcctcagtttccacacccttttctcacactccctgacactgcccctctggctgtggtggaaggagaggaagccacagaaaggcatcagctcccacaggggaaagccatccacaccgaggagagcctcgaggctgtgaggccactgtctcactgtgtggtctggtgctctgctaatgtccctaagccgcagctcgcttgtctgtaaagctgttttctgtgtcatagaattgttaatgaagcccaatgaataataatcacaaaagtccttataataacaaatataaacctcttggtgaatgacaaactgttagacgaatatctctccttccacagcattgctcatcacctcagaccgtttgctgggaacccttttggaggggacaaagagatcgatatatatttgtgtatttaatgatacttaaaatattaacaacccagaaaggcatgatatcagtactattgtggacatccctctttaagcaattatgcacctactgtgtgccaaatgctctgcccttgggtcctcagcacaacttagaggggtggatactattatgatcctattttacaaatgagaacactgaggcctaacagattaggtcagctttggtcagtttcctggcaaatatgcccttaaactatctcatgtgatgaccttttgtttgcggttttacagcttaagaaggtggcaaagctgaatcaggca

SEQ ID NO: 1350 - DNA, 6000 bp, Homo sapiens
ttcaatttctgttgccttgctgctccctgggcgttcagaggtcctccggtgatgcccctccatttcaagagccccccaaatgaagctgaatgactacagataagtttttggtactttccaaaattaaactatttcccttggtaaatttccagcaaatgagctcattaatctgaaaacaggatgtggcacatgaagagagtgaggtcagactgcctgctcttttcacttacactggcttagggcagagaggaaggggtgggtgggacagaagagaatggcttttataggccccaaatccttgagaaacttttcttcaaaaggcccttgtgcagtgtgcccacctttggaagagtctttgtttccagagtccatgaaaggaagaattgccacacagaaaaaccagtctgttagaacaggacacatgggtagctacagatgacaaagagaggcagtgagctggctagtatcaatgtcttcctcatcactggcatcttagagcatgtccctgatccatctgccaagctcttcccctgaaccacatcacctgaccatgagtgtcactggcacttccatcagaaattgaaatccccattgcgccttcaaagtggccagtcccataaacaactagaaaaaccccagggattgcttggtgcctagaattcaaataacttcagaggtgctttgtttcttttcttaaaatctggaaatctattgagttagggaaaatcactagacttagaaactcccttcaacaaataaccccagatttcttcccaaatttttgctggaatgttatttctaacttcacaacacccaggaaaaggcaaggtcaaagataattaaatgttttctgatgatgggaaaactatcagactaattgactcagagtccatcaatttttatttatttatttattattttattattattattatttttctagatggagtctcgcactctctcccaggctggagtgcagtggagcgatctcagctcactgcaagctccgcctcccgggttcacgcccttctcctgcctcagcctcccgagtagctgggactacaggcgcccgccaccacgcccggctaattttttgtatttttagtagagatggggtttcaccgtgttagccaggatggtctcgattttctgaccttgtgatccgcccgcctcggcctcccaaagtgctgggattacaggcgtgagccatcgcgcccggccgagtccatcaatttttaattcaaacacttaactctttgaatccttttcccgtagaattgaatggccccacagaggctacatctgggcaacctcccgtagattgcagaaattctctcttagaggcccctgcccatagattgcagaaattctctcttagaggcccctgagatcttctgcttgtccacaagcagcatctccctcccaggtgggcctctgaggtccccctttcactagagtaccctgtgttccgcagcttccgcctgtctagcggaagttggaggacagcagctctgcctccaataagtgagagtcttacaggcatgccaggttaaaaaacaagtaaaagatcgttccctgctcttacaatccagttgagagtcaggacataaaaagggaccctaggccaggcgcggtggctcatgcctgtaatcccagcactttgggaggccgaggtgggaggatcacctgaagtcaggagatcgagatcagcctagccaacgtggtgagacccccgtctctactaaaaatacaaaaattagccaggcgtggtcgtgggcgtggtggtgggcccagctactcaggaggctgaaacaggagaatcacttgaacccgggaggcagaggttgcagtgagccgcgattgggccattgcactccagcctgggtgacaagagccaaactccatctcaaaaaaaaaaagaccctaacacataaagagattttgagctgttaaaaccaaaccaacaaggtgggcagcttcatccctccctccaccatcagtcctacaaggttaagacatctgacagagaaggagcccttgtcaaattggtagttcgcaaaaataaaggtgtagcttttaatctaaaattctaccccaacactaagttccataactattttgattaatatattcttaaggatttagcgaccgtgtgtgtgtgtgtttagacgaaaacagaaacggttccttaaaatatccagtttgtaaaagcacagtgccttgaaccacttagtactatcattttgatcaagtactatcaagtactatcacttgattgctccaacccaataagcttgggcgagcctggcactgtgctaggatcttctggagaaatccaagaaaggtaagactgcggttttactcctcttcaccttctcactactcggattttgggcaggcaggggaccagggtgggggctccaattcccggtttgtgtttgttttttcagggggcatcttactgagcactaaacacgcgcaggtgctgcaccagatgccaggagccccgcaagcggaggagctgcgtacacgcgtgtcagttaactgggcgcacagtgcccgtggcgccgcagacccggccctcagactcagtttcccctcacagggatcgctcgccccgccccgcggcggtctggggagcagcagccccgggccccggccctgccttgccggtttccgccggtgcggctgcgtccttcacactccaccggaagctccgggcctggccgccggtaggcggtggcggaggcggcgccgaggttggctgccctacacccctgccccgggaccgcagggcggctccccggcccccttcctcgccccgaactccccgctccagctcccgcttgctgaggcggggactcctcgggtgcagccggggacctggcacctcggctgcagagaccgccccggactcaactgcccccagcccagccgcgggcgccccggccccgcaggggctcattcctctttccgcgggcaccggcgctgcctggctcccagcgctgccctcgcaactggatatgtggaggtggcgacgcgacactcccccgccctcgggcgggctcaccgacctggctgggggctcagcctgcagagccgggcggcgggggctgtgctggcgccggcaggcgcgaggaatcacagagcggggcgcccagcctcatcatggggcggcccacggagacttcccgtgggagtggggtctggtgcaggggcgccccaaaggacgagtgggagatggggacacgcggcgcagagagactcctcgtggatggagccgatggaggcccagtgtagaagagaaaggggtcaaggagacggataaggagccaccagagacgcggggggaattccccgcagaggatgcgggaagccggggaaaggaagggattccggaaggaagggctgagagccgggtcaggtgctggcaggagggctggttggatagaaactggggcgggcccagggcatttggcgtccccgacatgcgtatacacttggagagatgattccctggagatccaagtgcctgtatagacaatcttttctagaagttctaccgttaggtgaggcgagagtagatgtagaaattggagacgagaataaagagtgttttaaaagcgtgcgtggttacaggactggctctgggttcaggggtccccactcactagctgtgagaccttgaacaagtcgcttagcctctctgtgcctcagttttctcatctgtaaggtggggatgatgatggcaatacctgcttcacagagtgaaaattagatgagatgatgtctgtaaaattacgtaagacggtacccaaaagtagtactatttttcccttttcttattagagcaggttgcgcacgttttgatgtccgtgggaatgagcaggtagagagggtggtattgaggccggaggggagagaagggacccacagatggggagagaagtcttgggtgcctgttttatcccaaaccaggggaaggagggaacaggtagggctggctgcaggaaagcttgcaggtatggggtacacagttaaaagggagtgtcttctgatagtcttgatgcaggcctggaggtcgtttgttatgggggtggaggtcctgatgtacattgtggcggtaagatgccgtgctgtctttgccaccagcctgtggcagccctggtgttacaccagggcaggtgggcagtttaatgtatctcaggccagatgacctgccctgcccacctgttgaggctccagtagatagacgtgaaagcacagtataagcataatgcaccactttaatccttttctctgaggagctggaaggcctgtagtcaccatctgagccaaatgtcattcaagtacttcacttgggttacacaccacactttgacccactatctcatttagtcatcacaacaaatgggtgaaataggtattattgtcccattttacagatgcagaatctgagtttcagggaagttaaggactttgtcccagggcccacagttagtaagcagtggacccaggatttcaactcagctctgtctgacctcaaaacccatgatctgaaaccactgtgaaagtttgcaaaacctctgtagcagccaagcaggatggaaagatgtgtagggattgtcttctccatttgatagatgagacaagagctgggtactctgatctccatcccaagcacacagagcttggggccccacagccctggtgtgaatcccactccactaccagaggctgtgtgcctttggaccaggcatcttgcttctctgaccctatatacagctgcagaagaattccttgcaggttgctgtaaggatttggagggaaactgttgcccagcacacagtacacattctgggagccatcgtttccccagtgcacttttcctgcaaatgtggatctacatcccacttggatgctgagaccagctgctgtgatcttgcatttgtttagcgctttgttctccttgaggcagtaaagtggtggcacctgaccggagcatgtagccacctatgacttcctgagtggggtggtgtggggagggccctgaggagtctgtggtcctaggccttggatttcatcagggctttcctgctccttctggttgcctcagtcccaggcaagatagggtcccagaatcttacagcccagaggccacctgttgcaacttcttttttacagatggagtcatcagaacccactgtgaggaagtgacttctccttgaggtcacccagacactccaaacagagcagagcaaaagcgcctagaacttgaaattttggacctgtctccaacaccctggggatttccaccaggaaggtgagcacccccactgagaattccaggctgctcagaggtgccagggaacacagaccagggaccagctgtggccccctcctccgatgtgcccagggaagtgggggaagccagcggcagcctgcgattctcaaccaggggaactctcactgtgctttctgagagtctgtgacacgggtcattttctctgacttgctctcttgctttttctcactctaaaaaaaaaaaaaaatgactggacactcctaaagccttcagtcaccatccaggggatttttatcgccacaaagggtaattcctgctccatccctgctgtgactcagctgtgacgttgaaccacacaagccagagagaagaagataaagtcatcagagctcctactcaccagagagtgaggcccaggccaggactccacaaggctggtcccctgccctggagcaacttaaacaggccctctggccagcctggaaccctgagatggcctccagctcaggcagcagtcctcgcccggcccctgatgagaatgagtttccctttgggtgccctcccaccgtctgccaggacccaaaggagcccagggctctctgctgtgcaggctgtctctctgagaacccgaggtgaggtgatggaggagcggagggtgggcagaaagtgggtgccagggagggacccctgatggg

SEQ ID NO: 1351 - DNA, 6000 bp, Homo sapiens
ccagagtccatgaaagaaggaattgtcacacagcaaaaccagtctcttagaacaggacgcataggtagccagagatggcaaagaaaggcagtaggctggctagtatcaatgtcttcctcatcattggcatcttagagcatgtccctatcaaagggtccctctgctaagctcttcccctgaaccacattacctgaccacgagtgtcattggcacttccatcagaaactgaaatccccattgcgccttcaaagtgcacaaccaattagtaaaaccccagggactgcttggtgcctacaattcaaataacttcagaggttctttgtttcttttcttaaaatctggaaatctcttgggatagagaaaatcactggacatagaaactcccttcaacaaacaaccccagatttctttccaaatttttcctagaatgctatttctaacttcacaacacacaggaaaaggccaggttgaagatacttaataaatgttttctgatggtggggaaatcatcattaactattgttaccataagtaaaatttgtattaatagcatcttgcatattagtcatttattgaataaatatttagtgatgtctcctatgtaactagcatcatgctaagccaggggaaacaacaatgaaatcagatacagctttactttcatggttttaattcatctaatttcatatattcctatacacattttcatatattcctacaatttcgtgtattcataattctgtggtagaaagaaaaaaacctgtaaacaggcacgtttttaaaaatgctagttattataagtgtaataagaaccaagatggagattaacagaaggaaatttgggacatttttaataatcagaccatagcaaaaagtacacgtgttatgctgtcatttttataagatcatgttttatttctttgttttgttgttgatatcagttctgtgtaatgtgccaaagggacatactgaatttggattgaagaacccagtaccatttggtcttctaatctgataggttgctgacagcttgtaatcatctgtttaattaaatttcttggttcaagaatcagaagttatcagagcagattaaaatgatgctaacagaaaagctgttcactaattgtttttactgaacacaagccgtatgacagagacaaggcgtgctgctggtaataagaagaaggcaccaaagggctgactggggttgagggagtgagaaccattctgggctccacattttaagggctgttgacaaacaggagcctgcccaaatggctgcctttagccggctggattcacttacgtgttccattcattctgcttagaatggatgataaatctctactctgggaaacagtgcaggccaggaggtggttggatgcttagaggcaaagtctagggtgcacatcacttgtgctccatcatctcatcatctccaatgcagaatggcttgcaaatctgtgatcatctagaatccccctggctgcaggagccacaaaggctactaggttaggcagacaacttcaatgtcaagggtcggattgctaagggattggggcaaaactggagactgaaagcctttccgtgcctcttagaacaagccaaacatattaatacatggacaagaaggtagagggtggaggctcaaacactgcctgcttccctgtgttcattttcttgttcctcagtcatggctccatggtcagaccaccagatatgaggctttggccagataaactatttctctttttaaagttatttttagaaaaaaaaaaattcaactgggtagacatgagtggcctccaaaagattttgtttcctttctgagtcaggttcagcctcactgggctcgctttcaatttctgttgccttgctgctccctgggcgttcagaggtcctccggtgatgcccctccatttcaagagccccccaaatgaagctgaatgactacagataagtttttggtactttccaaaattaaactatttcccttggtaaatttccagcaaatgagctcattaatctgaaaacaggatgtggcacatgaagagagtgaggtcagactgcctgctcttttcacttacactggcttagggcagagaggaaggggtgggtgggacagaagagaatggcttttataggccccaaatccttgagaaacttttcttcaaaaggcccttgtgcagtgtgcccacctttggaagagtctttgtttccagagtccatgaaaggaagaattgccacacagaaaaaccagtctgttagaacaggacacatgggtagctacagatgacaaagagaggcagtgagctggctagtatcaatgtcttcctcatcactggcatcttagagcatgtccctgatccatctgccaagctcttcccctgaaccacatcacctgaccatgagtgtcactggcacttccatcagaaattgaaatccccattgcgccttcaaagtggccagtcccataaacaactagaaaaaccccagggattgcttggtgcctagaattcaaataacttcagaggtgctttgtttcttttcttaaaatctggaaatctattgagttagggaaaatcactagacttagaaactcccttcaacaaataaccccagatttcttcccaaatttttgctggaatgttatttctaacttcacaacacccaggaaaaggcaaggtcaaagataattaaatgttttctgatgatgggaaaactatcagactaattgactcagagtccatcaatttttatttatttatttattattttattattattattatttttctagatggagtctcgcactctctcccaggctggagtgcagtggagcgatctcagctcactgcaagctccgcctcccgggttcacgcccttctcctgcctcagcctcccgagtagctgggactacaggcgcccgccaccacgcccggctaattttttgtatttttagtagagatggggtttcaccgtgttagccaggatggtctcgattttctgaccttgtgatccgcccgcctcggcctcccaaagtgctgggattacaggcgtgagccatcgcgcccggccgagtccatcaatttttaattcaaacacttaactctttgaatccttttcccgtagaattgaatggccccacagaggctacatctgggcaacctcccgtagattgcagaaattctctcttagaggcccctgcccatagattgcagaaattctctcttagaggcccctgagatcttctgcttgtccacaagcagcatctccctcccaggtgggcctctgaggtccccctttcactagagtaccctgtgttccgcagcttccgcctgtctagcggaagttggaggacagcagctctgcctccaataagtgagagtcttacaggcatgccaggttaaaaaacaagtaaaagatcgttccctgctcttacaatccagttgagagtcaggacataaaaagggaccctaggccaggcgcggtggctcatgcctgtaatcccagcactttgggaggccgaggtgggaggatcacctgaagtcaggagatcgagatcagcctagccaacgtggtgagacccccgtctctactaaaaatacaaaaattagccaggcgtggtcgtgggcgtggtggtgggcccagctactcaggaggctgaaacaggagaatcacttgaacccgggaggcagaggttgcagtgagccgcgattgggccattgcactccagcctgggtgacaagagccaaactccatctcaaaaaaaaaaagaccctaacacataaagagattttgagctgttaaaaccaaaccaacaaggtgggcagcttcatccctccctccaccatcagtcctacaaggttaagacatctgacagagaaggagcccttgtcaaattggtagttcgcaaaaataaaggtgtagcttttaatctaaaattctaccccaacactaagttccataactattttgattaatatattcttaaggatttagcgaccgtgtgtgtgtgtgtttagacgaaaacagaaacggttccttaaaatatccagtttgtaaaagcacagtgccttgaaccacttagtactatcattttgatcaagtactatcaagtactatcacttgattgctccaacccaataagcttgggcgagcctggcactgtgctaggatcttctggagaaatccaagaaaggtaagactgcggttttactcctcttcaccttctcactactcggattttgggcaggcaggggaccagggtgggggctccaattcccggtttgtgtttgttttttcagggggcatcttactgagcactaaacacgcgcaggtgctgcaccagatgccaggagccccgcaagcggaggagctgcgtacacgcgtgtcagttaactgggcgcacagtgcccgtggcgccgcagacccggccctcagactcagtttcccctcacagggatcgctcgccccgccccgcggcggtctggggagcagcagccccgggccccggccctgccttgccggtttccgccggtgcggctgcgtccttcacactccaccggaagctccgggcctggccgccggtaggcggtggcggaggcggcgccgaggttggctgccctacacccctgccccgggaccgcagggcggctccccggcccccttcctcgccccgaactccccgctccagctcccgcttgctgaggcggggactcctcgggtgcagccggggacctggcacctcggctgcagagaccgccccggactcaactgcccccagcccagccgcgggcgccccggccccgcaggggctcattcctctttccgcgggcaccggcgctgcctggctcccagcgctgccctcgcaactggatatgtggaggtggcgacgcgacactcccccgccctcgggcgggctcaccgacctggctgggggctcagcctgcagagccgggcggcgggggctgtgctggcgccggcaggcgcgaggaatcacagagcggggcgcccagcctcatcatggggcggcccacggagacttcccgtgggagtggggtctggtgcaggggcgccccaaaggacgagtgggagatggggacacgcggcgcagagagactcctcgtggatggagccgatggaggcccagtgtagaagagaaaggggtcaaggagacggataaggagccaccagagacgcggggggaattccccgcagaggatgcgggaagccggggaaaggaagggattccggaaggaagggctgagagccgggtcaggtgctggcaggagggctggttggatagaaactggggcgggcccagggcatttggcgtccccgacatgcgtatacacttggagagatgattccctggagatccaagtgcctgtatagacaatcttttctagaagttctaccgttaggtgaggcgagagtagatgtagaaattggagacgagaataaagagtgttttaaaagcgtgcgtggttacaggactggctctgggttcaggggtccccactcactagctgtgagaccttgaacaagtcgcttagcctctctgtgcctcagttttctcatctgtaaggtggggatgatgatggcaatacctgcttcacagagtgaaaattagatgagatgatgtctgtaaaattacgtaagacggtacccaaaagtagtactatttttcccttttcttattagagcaggttgcgcacgttttgatgtccgtgggaatgagcaggtagagagggtggtattgaggccggaggggagagaagggacccacagatggggagagaagtcttgggtgcctgttttatcccaaaccaggggaaggagggaacaggtagggctggctgcaggaaagcttgcaggtatggggtacacagttaaaagggagtgtcttctgatagtcttgatgcaggcctggaggtcgtttgttatgggggtggaggtcctgatgtacattgtggcggtaagatgccgtgctgtctt

SEQ ID NO: 1352 - DNA, 6000 bp, Homo sapiens
cggcggcctccacgacggggctgggggagggtatataagccgagtaggcgacggtgaggtcgacgccggccaagacagcacagacagattgacctattggggtgtttcgcgagtgtgagagggaagcgccgcggcctgtatttctagacctgcccttcgcctggttcgtggcgccttgtgaccccgggcccctgccgcctgcaagtcggaaattgcgctgtgctcctgtgctacggcctgtggctggactgcctgctgctgcccaactggctggcaagatgaagctctccctggtggccgcgatgctgctgctgctcagcgcggcgcgggccgaggaggaggacaagaaggaggacgtgggcacggtggtcggcatcgacctggggaccacctactcctggtaagtggggttgcggatgcagggggacggggcgtggccgcctggcctggcgtgagaagtgcggtgctgatgtccctctgtcgggtttttctgccagcgtcggcgtgttcaagaacggccgcgtggagatcatcgccaacgatcagggcaaccgcatcacgccgtcctatgtcgccttcactcctgaaggggaacgtctgattggcgatgccgccaagaaccagctcacctccaaccccgagaacacggtctttgacgccaagcggctcatcggccgcacgtggaatgacccgtctgtgcagcaggacatcaagttcttgccgttcaaggttcgaccgggtttttctcatccagttagagaacgggtgggtggtgggagtatttagagttataagtctctggaaaagtgttgagacaacagttgaaggttatagacatgatgtatgtaataactttaatactattagtatgttacaaaacttaagacagttgctgtcgtactgtctacgatagtttaggaataaaagaccgattaaaactgaactttgtaagacacctatactccctgaagtatttctagtcaatttgcagccccaagggaccaaaataaaccaaattgtggggatggtagtgggtcttttaaactttgagatgtcattgtatctgtgtctgaaaacaataattctttaaaataggtggttgaaaagaaaactaaaccatacattcaagttgatattggaggtgggcaaacaaagacatttgctcctgaagaaatttctgccatggttctcactaaaatgaaagaaaccgctgaggcttatttgggaaagaaggtaaatatttctagaacaatgttaagtattttttgatcattagtattctcggttggctgttatgtatagaagccttcgtgaagggtttcaaaaattttaatcagaatggtattcatgcttgtcaggtttaattattgagtcccttactataagccaaacaaaatagacttttcatgtattatttaatgcttacaattccagggacataaaattttatatgttgtattcatcaataagttggcttaaaaactaaagtgatggtttgactgtaattttttttttttgagatggagtcttgctctgttgcccaggctggactgcagtggcacgatctcagctcactgcaacctctgcctcccgggttcaagcagctctcctgcctcagcctcccaagtaactggaactacaggcacaccaccacacctggctaatttttttttttttttttaattttcagtagagacagggtttctccacattgcccaggctggtcttgaaatcctgccctcaggtgatcctcctgcctcagcctcccaaagtgctgggattataggcagaagccaccgcctggccagactgtaatttaaataagggttaaactatgtgacaatacacttaattatcttttatccttttaggttacccatgcagttgttactgtaccagcctattttaatgatgcccaacgccaagcaaccaaagacgctggaactattgctggcctaaatgttatgaggatcatcaacgagccgtaagtatgaaattcagggatacggcatatttgccaaatagtggaaatgtgaagtactgacaaaacttttccctttttcaatctaatagtacggcagctgctattgcttatggcctggataagagggagggggagaagaacatcctggtgtttgacctgggtggcggaaccttcgatgtgtctcttctcaccattgacaatggtgtcttcgaagttgtggccactaatggagatactcatctgggtggagaagactttgaccagcgtgtcatggaacacttcatcaaactgtacaaaaagaagacgggcaaagatgtcaggaaagacaatagagctgtgcagaaactccggcgcgaggtagaaaaggccaaacgggccctgtcttctcagcatcaagcaagaattgaaattgagtccttctatgaaggagaagacttttctgagaccctgactcgggccaaatttgaagagctcaacatggtatgttccttgttttctgctttgctaatgagatctccttagactctgaattcaggacattgcatctagatacttagataacagacatcacagtaaccatgtcttttttctaggatctgttccggtctactatgaagcccgtccagaaagtgttggaagattctgatttgaagaagtctgatattgatgaaattgttcttgttggtggctcgactcgaattccaaagattcagcaactggttaaagagttcttcaatggcaaggaaccatcccgtggcataaacccagatgaagctgtagcgtatggtgctgctgtccaggctggtgtgctctctggtgatcaagatacaggtaggtcatcatcgcagcatctttcttagtgattcagtagcttgatggaagactcattagctattgctttagaaaataccagaatatgagcaacaaggtcacacagctagtaaagggtataagtgaagacaagactggggtagtctcaagatcattagcaactgtttaattcactgcctttaaaatgtgtgtgttagaacctaaccaaatgttagagagataaactttacatagctcatagggagaacttgaattaaaagttaaataacttatccttacaggtgacctggtactgcttgatgtatgtccccttacacttggtattgaaactgtgggaggtgtcatgaccaaactgattccaaggaacacagtggtgcctaccaagaagtctcagatcttttctacagcttctgataatcaaccaactgttacaatcaaggtctatgaaggtaattacttaagtttgttaatatcatggctttttttttgagatgaagtcttgctctgttgcccaggctggactgcagtggcacgatctcggctcactgcaaattctgtctcccgggttcaagtgattctcctgcctcagcctccagagtagctgggattacaggcgtggaccaccacacctggctaatttctgtatttttagtagagatggggtttcaccatgtttcccaggctggtctccaactcctgacctcaggtcatctgcctgcctccacctcccaaagtgctgggattataggcgtgagccaccacgccagatctatctatcatggcatattttaaaagaacatgacttaatatgtcctattgaaatggctagggaactaagtaactgctgttttcagatggaggtcttaatttgaataatgttgatattagatatttagcattcttttttttttttttttaatggagtcttgctctgtcgcctaggctggggtgcagtggcatgacttgcaacctctgcctcccgaatagctgggattacaggtgcccaccatcacgcccggctaagttttgtatttttagtagaggcggagtttcgccatgttggccaggctggtcttgaacccctaacctcaggtgatccaccgacctcggcctcccaaagtactgggattattacaggtgtgagccactgtacccagccaatgattagcattctcactaataatagcatctgagctggctcctagagtacaagaaaaaggagttcacagtactttaaaatagataaaattcagttgagttagtaacctaactcattgttagtactagttgctgctccttgtagaccaatatgaaattacttttagctcgataaaaccaaaagtgtcactttatgcttcagactgaaatgcggggatctagatgtgctaatgcttgtcagtaacaactaacaagtttttctgtatgtaacttctaggtgaaagacccctgacaaaagacaatcatcttctgggtacatttgatctgactggaattcctcctgctcctcgtggggtcccacagattgaagtcacctttgagatagatgtgaatggtattcttcgagtgacagctgaagacaagggtacagggaacaaaaataagatcacaatcaccaatgaccagaatcgcctgacacctgaagaaatcgaaaggatggttaatgatgctgagaagtttgctgaggaagacaaaaagctcaaggagcgcattgatactagaaatgagttggaaagctatgcctattctctaaagaatcagattggagataaagaaaagctgggaggtaaactttcctctgaagataaggagaccatggaaaaagctgtagaagaaaagattgaatggctggaaagccaccaagatgctgacattgaagacttcaaagctaagaagaaggaactggaagaaattgttcaaccaattatcagcaaactctatggaagtgcaggccctcccccaactggtgaagaggatacagcagaaaaagatgagttgtagacactgatctgctagtgctgtaatattgtaaatactggactcaggaacttttgttaggaaaaaattgaaagaacttaagtctcgaatgtaattggaatcttcacctcagagtggagttgaaactgctatagcctaagcggctgtttactgcttttcattagcagttgctcacatgtctttgggtgggggggagaagaagaattggccatcttaaaaagcgggtaaaaaacctgggttagggtgtgtgttcaccttcaaaatgttctatttaacaactgggtcatgtgcatctggtgtaggaagttttttctaccataagtgacaccaataaatgtttgttatttacactggtctaatgtttgtgagaagcttctaattagatcaattacttattttaggaaatttaagactagatactcgtgtgtggggtgaggggagggagtatttggtatgttgggataaggaaacacttctatttaatgcttccagggatttttttttttttttttaaccctcctgggcccaagtgatccttccacctcagtctcccagctaattgagaccacaggcttgttaccaccatgctcggcttttgcattaatctaagaaaaggggagagaagttaatccacatctttactcaggcaaggggcatttcacagtgcccaagagtggggttttcttgaacatacttggtttcctatttccccttatctttctaaaactgcctttctggtggctttttttaaaattattactaatgatgcttttatagctgcttggattctctgagaaatgatggggagtgagtgatcactggtattaactttatacacttggatttcatttgtaactttaggatgtaaaggtatattgtgaaccctagctgtgtcagaatctccatccctgaaatttctcattagtggtactggggtgggatcttggatggtgacattgaaactacactaaatcccctcactatgaatgggttgttaaaggcaatggtttgtgtcaaaactggtttaggattacttagattgtgttcctgaagaaaagagtccaggtaaatggtatgatcaataaaggacaggctggtgctaacataaaatccaatattgtaatcctagcactttgggaggccaaggcgggtggatcacaaggtcaagagatagagaccatctttgccaa

SEQ ID NO: 1353 - DNA, 6000 bp, Homo sapiens
aagcagtccagtaagacaggcaggacagaaattcctgacattcaatagattaagaatctgagcttggctgggcgtggtggctcacgcctataatcccagcactttgggaggccgaggcgggcagatcacctgaggtcaggagttcaagaccatcctggccaacatggcaaaaccccatctctactaaaaatacaaaaattagctgggcatgatggtgtacccctgtaatcccagctaccaggaggctgagacaggataatcgctggaaccggggaggcagaggctgcagtaagccaagatcatgccactgcactccagcctgggcaacagagcaagactctgtctcaaaaaaaaaaaaaaaaaaaaaaaaaaaaactgtggctctgagaaattggtttttgtcaaagttatgtgccttatcacctagttgaatgttctctctaacaaaacatgtggaaaattctcaattatcaggatctaaatgttaatattaaacttgtaaattacataggtcctttcctttttcttcctgctggatgcttgtcatttattattagtcctctttcacaaaggaagatttattttttactttttatttttgaggcagagtttcgctctgtcgcccaggctagagtgcagtggcgcaatctcagctcactgcaagctccacctcctgggttcacaccattctcctgcctcagcctcctgagtagctgggactacatgcgcccgccaccgtgcccggctaattttttgtatttttagtagagacggggtttcaccgtgttagccaggatggtctcgatctcctgatctcgtgatccacccgcctgggcctcccaaagtgctgggattacaggcgtgagccaccgcgcatggccacaaaagaagatttaagagctaaatgacatccaatcctaataagtcttacctctgcttaattagctttctgagatcaggtaggaaatggaaagcaattttttttttttttgagagagagtttcgctcttgttgcccaggctgcagtgcaatggcatgatctcagctcacctcaacctccgcctcccgggttcaagtgattctcctgcctcagcctctcgagtagctgggattacaggcatgagccaccacgctgggctaattttgtatttttagtagagacggggttttccattttgaccaggctggtctcgaactcccgacctcaggttatccgcctgcctcggcctcccatagtgctgggattacaggtgtgagccaccaggcccagcctggaaagcaattttcttacccataggagcacaagtgaaatgggctggtttaaatttctggataaaaatttatatttgcatatcatctgttatcaaaatatttacaaaatgtgtaactggagctggatgtggtggctcattcctgtaattcccacactttggaaggctgaagtgggaggattgcttgaggccaggagtttgagaccaacctggttaatgtagctagaccccatatctatgaaaattataaactttaaatttaaaacccaaaatatgtgactactctatatcctaaaacaaaatgtaaggttttttttttttctttttagacagtctcaccctgttgcccaggctggagtgcagtggtgcgatcttggctcactgtgactttcgcctcccaggttcgagtggttctcatgcctcagcctctcgagtagctgggattacaggcgtgtgctaccatgcccagcaaattttgtatttttattagagatggagttttgccctgttggccaggctggtctcgaactcctgacctcaagtgattcacccaccttggcctcccaaagtgctgggattacacatctgagccaccatgccgaaacccaaaattaagtcttataaatctgaagctcaagatgacaacctatagaggttaaaaatcaaactgccaaggctcaaatactggctcattatcttaggtgtgcaatctcctgggcaagtttctttacctcttggggcttcagattccttcactctaaaataggggtaagaaaaaaatgcttttttgtttgtttctttttgtttttgtttttgtttttgttttgagacagagtctcgttctgtggccaggctggagtgcagtggtgcgatctcagctcactgaacctccgcctcccaggttcaagcgattttcctgcctcatcctctgagtagcagtagctgggactataggcgcgcgccactacacccaactgatttttgtatttttagtagagactgggcaccatgttggccgggatggtctcgatctcttgacctcgtgatccgcccacctcggcctcccaaaatactgggattacaaaaaactgctttcttaaagataaaaagagataatgcacgtacgtctttagcacagtgtctaacagttaagtattgataacttgacctggatattatttttggcatttaatgttcagcaagctagttttgaccatgtactttcctattcgtaagtgactgtgctttggaatatactagaaaatgtatgtaaaatgtctggttttaaaaagatgaaaccacaatatattcaattccctttggaagttagccatgtatcgcttttctaaattttacaaaaaggagagttacaaaacgttactctgttaatcaaggataaggctgaaatggagagtttttttttttaatggaaatggactgcactataaaaacatttgattgaaatgaaagaagctgtaatgtggtcaaatgatgatttctatcttaatgctggactgatgcaagccaaagaagggtcaatgttgccgcaggattacaagccctgctgaaagagatgcatgatgcaacctctgtagtgaacagagtcaactcttgagtcaccagtctaacctttgagaagcactaaggaaaaagaaaattcttgagtactgagtcacaggctcaacatcttaataaagtgtgtttaggatgttttagtggtatctggacacagtatacccatgaatctcaaatatttcatatcagagctttgccctttccatagtaggtcctccaaaaacattcctcaaacaaatgaattttttttttttttttgagatggagtctagctctgctgcccaggctggagtgtagtgacgtgatctcggctcactgcaacctccacctcccgggttcaagcgattctcctgcctcagcctcccgagtagctgggactacaggcatgcaccaccacgcccagctaatttttggatttttatagagatggggtttcatcgtgttaccccggatggtcttgatctcctgaccccgtgatccgcccacctcggcctcccaaagtgttgggattacaggcgtgagccaccacgcccggccacagatgaattttttgttttaaagttaagagatcaggcacagtgtctcacacctgtaatcccagcactttgggaggccgaggtgggcagatcgcttgaggttgggagttcgaaaccagcctggctaaaatggtgaaacctcatctccacaaaaaaaaaaaaaaaaaaattagccaggcatggtggtgcgtgcctgtaatcccagctactcaggaggctgaggcaggagaatcgcttgaaccccggaagcggaggttgcagtgagctgagattgcactactgaactccagcctgggcgtgacagagtgatactccgtcttgaaaaaaaaaaaagtattggcaatagagtgaactccacctggttatcaatcctaactccatcactcaccagctctgtgacttgtttagttatttaatctttttcagtttcaatgtcctcatctggaaaacgggaaatgcctaccgagtattgaactgtcaagactaaatgacacatgaaaagcacactgaacaatgcttaatccacggtaggctttcagcaaatagtggtctctattattttttgcaacaggatgttatataagaataaggcattatcaagacgattttcgcctatcaaatgtgttgtctgcgtgtacatcagaccttttcctggaatgaaggtagaaaagtatcaacaataaaggatggagaaagccccgtaaatgataacctttgccccagagggaaaggatgggcagcggaggggaaagtaaagggtggcaagctagaaaaattagacatccagtgtgggagggctggcactggagtgggttgccacagtagggaggggactcagagctggaggcaattcctttggccgggcttgtcctgcgacttaccgtggggcagcgcaatgtggagaggcctggtaaaatggctgggcaagggtgcggaggggacataactggcaggaaggagtcatgattcgtggtcgaacagagtccagaccagctcgacctgtgagcaacgaacggccctgagactcgcataccccaataccggtagtggccgtgaagggcaaagaaatgtgttctgaggcgatcccagcatctaagctgcgactggtctactcagagactggatggaagctgggaagagaaagctgcttcccgcttcggggtgagggatggaggaagggagaacaagcagtagagaagaaaaagtttcagatcccacagccccggggggtcactcctgctggacctactccgaccccctagggccgggagtgaaggcgggacttgtgcggttaccagcggaaatgcctcggggtcagaagtcgcaggagagatagacagctgctgaaccaatgggaccagcggatggggcggatgttatctaccattggtgaacgttagaaacgaatagcagccaatgaatcagctggggggggcggagcagtgacgtttattgcggagggggccgcttcgaatcggcggcggccagcttggtggcctgggccaatgaacggcctccaacgagcagggccttcaccaatcggcggcctccacgacggggctgggggagggtatataagccgagtaggcgacggtgaggtcgacgccggccaagacagcacagacagattgacctattggggtgtttcgcgagtgtgagagggaagcgccgcggcctgtatttctagacctgcccttcgcctggttcgtggcgccttgtgaccccgggcccctgccgcctgcaagtcggaaattgcgctgtgctcctgtgctacggcctgtggctggactgcctgctgctgcccaactggctggcaagatgaagctctccctggtggccgcgatgctgctgctgctcagcgcggcgcgggccgaggaggaggacaagaaggaggacgtgggcacggtggtcggcatcgacctggggaccacctactcctggtaagtggggttgcggatgcagggggacggggcgtggccgcctggcctggcgtgagaagtgcggtgctgatgtccctctgtcgggtttttctgccagcgtcggcgtgttcaagaacggccgcgtggagatcatcgccaacgatcagggcaaccgcatcacgccgtcctatgtcgccttcactcctgaaggggaacgtctgattggcgatgccgccaagaaccagctcacctccaaccccgagaacacggtctttgacgccaagcggctcatcggccgcacgtggaatgacccgtctgtgcagcaggacatcaagttcttgccgttcaaggttcgaccgggtttttctcatccagttagagaacgggtgggtggtgggagtatttagagttataagtctctggaaaagtgttgagacaacagttgaaggttatagacatgatgtatgtaataactttaatactattagtatgttacaaaacttaagacagttgctgtcgtactgtctacgatagtttaggaataaaagaccgattaaaactgaactttgtaagacacctatactccctgaagtatttctagtcaatttgcagccccaagggaccaaaataaaccaaattgtggggatggtagtgggtcttttaaactttgagatgtcattgtatctgtgtctgaaaaca

SEQ ID NO: 1354 - DNA, 6000 bp, Homo sapiens
acaggctcaggccaagctgcccgtggtgggagggcgtgcttccatcccgggctggcccccatggccctcagcttcctcccttctgcccctgccgcaggccggacggggccttcggcatgtcggccccgacctggtgctgtcagactcccgcatcctctcccccaagcccttcccgttctgccctgccctgccaaatgtgaaaccctgctgtctcccccaccctccccaaaggtgtctctgagccgcctcttggggccaccaaggacagggccatgttctgtccccccagagctggtcttgggatggccgtgtgacaggcatgctccacccctccagcttcgtcctggggcagggctccctccaagcctgtctccccactccccggccagaggtcagcaaccacagaaggccccccagaccacgcatggcagaccaggctgcagtggcagccctgaggtgccccccgccgagtcccagggccctgcaggggcctcgacaggagccgggcctatctctaaagcagagggaatggctgggcatgaacttcgacattccaaaaccccaagccaggaaaaagggcagggcctggtcctagggatgcttactggcagcaagagcagtgcccagtcagggtgggaggtagcaccaggctctgtgaccctcacccaagtgggggggtggtcagtggaagctggggaggcttcactcagctcaaccctgcagaccccccatatgagaacccccctcctcccaccagctgggggagatgacatcactgctctctccatggggagggggctcacagggcaccaagttcgggatcctaggactggcaggacctgctggagcctgagatgggccccaggggcctgaggttgcctcctcctgtccagacccagccttggcacctcccaagactgccaagggccctaccatggccccacagcccccagggctggcagttccatctaggagggtgcctctaggccccactctcaggctaggatggagaggcagatctgggcctggtgaggtgacctgcttctggaggggcagggccgcacccgagagcagggacaggtgcccgaacacagggtctccaggacgtagcgcccccccgcatacttgaatgtatgtgcgtatttattgctcacgtctgtgccatgttgtcaatgggtcctttccaacccaagaggtacatttgtttttctgtttttcctgaaaaataaagtcggccaagtgagtgtggtccgtatgggcttagtcccgggtgggggcctaacccggtaagaggctgcactgtgcaaagtgtccacagatacccactgtctgggccctctgagacctcagagagatggagttcccactgcatttaaccacgggggagctggggcacagaggggtgaagtggctgcctgctgtcaccactgattcctgcacccctacctcctcacgctcccagcccctagggaaacagagcatgctctgagctgacactcacgtggccgggaccagcccccagaagcagcagcccccaggtcagccccacgaccccctgaggacccagcctgctgccgcccacccagcacccgggggagggaggtcctttcctggagtctgatccggctgggctcagggtctggacactgagccacagtggaggagccgacggcagatctgcagtcttggggcttgtctgggcgctgcttgtggtgggtggcacccccacggggcccccgtcaggggacacacaggtgcgccgggcagtcctgctgcccctcgccacagcccacctggccatgttggcagccacagcctctgtgctggttgactccgttgcctcctccaccccagaaggggccttgggaaccagaatcaacgtgtactccaggtccagggtcccagccagcttgcgtgtggtggtacacgcacacagggtccaagtaaccgtgcagggcccaggaccgcgcacagccagggaagcgcagcagtgccgcccacgctactggctgggacagcctctgaaggtgcggccgaggaacctgcttggagagacgctgtgacgagggatgcccaggccagcaaccgtgcccgggaggcagggatgtcctggggcgggggggtgtagagtggcaggagattaggatggcaaagccccttgcagaaacctggctgtgggattggggctgcggggagggaagggcggagggagacagggtccagggggcctcaggcaggagctggcgggatgcttctggcacgcggggggtagccataggtcttctctaggaacgtgccagccttgggaaggatttccctccagggccagcctgggcccagaggtgctggcatcagacagaaaagacatggtaacgtccacatcccaactaccagccgccatctccccatccgtaagaggaggggttggcccaagcggctctccttgctctaattctgcacttccaggtccagacggctccctggacctccccacatgctggtccaggccctctggaggcagtgaggcagccaagccaagcccagccccactgcacttccaagcccccaagagacccccagccagtgcctccatggaggagcaggcctgggtgccggtggctcagccgagaagaggacagtttccacaaatggcacagaaggctctgggtgggaataatagagggttgttggctgaaagaaggacagggggtaatcgaggcaaagcccacgccacaagcacactgggaacgatgccgccgcgccccggcctcccacgggccggatgtgagctggcagtcctggccgtgtcccgctgggaggggccgcactgggtccctgtcgtgctcagtcctgcctccacctcccacctcgccccattctcttccctgccggagtgtggcgggtgatgaatgctgaaggttacgctgcccagaacgcttctgcaaataaacaggctgctgtgtttgctcgctttcataaacacgggaacatcctgcgcacagacaaggctgggagacaaaccccacacacctcggagggccctggggacgtccagagcgctgtccaccgagggaaggaggcccaggtggctcccccgggaggggtctggagctcctaacacacggccacgccatagctgctcgtcctgcctgggccagcaggcagcctggtttgctcactgtttcgccgacggccggcggccgaggaccagggctcaggtctgcactggctcacggaagggaggccgccagagctggccaggggggcggcaagggccttgcagaggaaggctgaggctcacaggggtggtgacctgctcaaagtcacgcagcgacagccaggaagggctctgacgccacatccagccccctttccacgcgactgtggcctctgtgggcaagagctgggtgactctgtgtagaaggaactgtggtgaggcgagaggtcctgcggctcctatgtcccacccagcagcaccagggattcagagcaatcgttctaactccagaaaaagaaaggccacgagggccacaggccccagcatctggaagtaatgtctgtttattgatagaaaacaggccacgtccagagaggcccagggccaaaacctccttctggaaggccgaagtcccacagtgccggggagcgcaggagtcagctcggctccgtcttgccagggctggggggaccctcatcctcacccgcttccggagctgcagtggatgtgggggcccctgcagcctccagaaccagttccagggccccctcgcccgccacacggtgcacctgctcgcctctggccgtcaggatctcttcgatatttctggggggcagggaggcaacatggctcttcagggccccccagccgccctgcacttcagtcccctcagggcgccccatggccaggccagagctgcaagcaccaggcccagcactcctgtggcatcaggccacacgggcacttcagacgctggcctgtgtgccctcaccagccctgtgtctctgccggtatgcgccgcctcaggaacccagtctcctgctcctgccccctatgtgccagagggaagaatctgcagccccgggtctgatgggaggacagtcccagctccaagggccaggtaccaccaagcacctggcatgctggtctcagacctgctgtcgctgttactgtcctgcccaggacctcccggccaggcaaggcccggaccaggctcccggcaccacctccactgctctcccagcagccagggcccaggccacacctcctggtccacaccccaagccttgctgtgggccagccaccccaagatggcagagggcaaaaaagttccacgctagagagggacaaggctgccagtgatggcagagggcaggcagaggcagggaggcagggccacagggctggcaaaatttaacaaataaaaacgcaccccctacttggggcatacttaaactcaaaagctatctgggctttataggaaattctcatttaactgtgtgtcttgtattgataaggtggctggatttcccaggtgagatctataaacctcaacactagggcaaggttcccccagggaggccagggtacttctgggtggccttctggcccagccctggggtacaggcctcacctcttcccattcaggtccgagaaccagcccaggttgtcagcgatgatatggtggttctggcagccggggcaggtcacaatgaccacgccttggtgataggccagcttggagatgcgcttggaggacctagtcccgcagacctggctgggacagggtagctggtgaggctgtgagggccgccacgcccctcccgggaagacccgcccctctaggggtagctccagccacctcaccctctccagagaaggccccgcccccgagggatagctccacccacccccaacctcgccctctcccgggaaggccccgccccagggacggctccacccctcctcatggtccgcctccgctccctcccagaagccccaaggggtggctccactccttcctgtgacttgaccacgccgcctcccggatccccggcgggccgcttctccccgcaggccgtgtagcgtcagatacgggtctgtccccggttccgtcccgccgcgcgcctaccttgcaggtgtagacgagctggtagtgcgccgcctccacgcgccccagagccgccgcgggccccggcccctgctcggagcttgagcgccgccagccccaggcccaggcccgccgcctccccgcgacctctggacgggccccgcggccccacagccgcctcaggcagggcgcccggggctgcacgcgactcagcaacctcggcgcgccgcgcagcgcagtccgcagcatcccgctcgccggctccgtccgccctgccccggccccgccccgccgccatcttggaagtgggcgccgggcggaagcggcgttcttgggcttccgtcttccgggtcgggggcgcgctgcgctatgccgccccctggcggcctgagggggccctgcgtccacgtgcagctcgcaccccgaggacaccgcgggccgcagcgaggagggacggccgcggggctgcgcgcgagtgtccgagcgggaatgcgggtcacccgtgctgtttatttacgcagctgtgttttctaacactaatacaatgcatgcatgtattgtgtgttacatggtgaaacagaacagatcctgaagttacacagatggcgtgtgcatgggggtggtgagcacccgcatggcctccgcaaaatgagtgccgcttaacaaacggccccaatgcccggcagtccggctgggcctttcagggcaccagattcctcgttccaggccaagtcagcgacggctcggggaagtctgcgccccagggcgtcggcacccccgggtggcaggaggccgggccggtgggtgtgccctggtcggggcctgcgctgctgcggctaggagccctcagtgtcggtgttgtcgctgcccgtggtgttctcccggtcctcct

SEQ ID NO: 1355 - DNA, 6000 bp, Homo sapiens
tcccatgccccgtcccaagtcccatcctggaggttgtttccaatggacaccattgctgcttcggctaaatgctggatggcactttgtccacatcaggagccttaaaacgagacccctggggctacaaaggaagccccggcccccatgagagcagcccaggctcagagctcctgtctcagccccacctcagcctcactcgcgcctggcccacgccaaggcaggggaaaagggcagatccagctgtgcccccatgggggttggtgtggctcccagggcgggggctcccacgggacttcccgggagcgcgttggccagggattagggaagctgccagccgttgctccagtctgggcagaaggggttaggtgagggcctcccagcctcggctgcaggggtggtcaagccgtcgtgtttgcacattcgctcctgcgtctcagtgtccgcagtgaggacaggggtggtaaagagtgctgcggtcacgaaggacgcttagctatggacagtcagggtctccatatcaagccgcgtccaaaatttatcaaatgtgcacgtgtgggggtacatagcacacgctgtgtccaccgggggtgcaggcttgggaggagacagaagggcagcagggacaactgtcacatttacaatcccccacgtgctgacttcgtgtccgcagagcacacaaatggaggggctgtgaccagcctccgcgcccagcggcttgacgtcctccggagcctctgcttggagttgggcggccgggccgagggcccagggcaagcttggggccctcactgagggtcggccttgtgctgtcccgtcaggccatagccacgcgggaggagctgcacgcacagcacgcccggggcctgcaggagaaggacgcgctgcgcaagcaggtgcgggagctgggcgagaaggcggatgagctgcagctgcaggtgttccagtgtgaggcgcagctactggccgtggagggcaggctcaggcggcagcagctggagacgctcgtcctggtgggcctggggcctgcggcagggaggggagccggcgcgtgggatgcagggccaggggagcacggagcctcagccccggccttcccgacccaacccttctctgtgacgggccccaacctaaccaaacccctcctggcagtggggtgagggcacacgagcagttcagggtcccagcaggaagtggggctgcagggccggggtgggtcctgggcctggccatcaggcagcctagcaggttgttctgggcatggagggggcctggtgtggctgagggcatgcccagggctccctggaggatcccgctctgtgccctgcccaccctgtgcctggggagccctctgccctcacagcccacccaccccattttctatgaccacagagctccgacctggaagatggctcacccaggaggtcccaggaggtgagtgagaccccagccagcacgaggctggccttccttcacctggggtcctggctgagctgccaccaggcatagccccacactgcccgtcacatggccctgctcggtgggctgggctgggtggaggaagagcaggtggccaaatgctaaggcctctgatggctcaaggggtaaggtaaggcacggacagtgcccacctcctggccgcccaatgtccgtctgctgggcacctgagtctctgagaagctctgtgcagggggtgacggcaatggctgcacccagctgagggccaagggctggggtgggcagtgtggccgggtccagtccttggcgaagtggcctaatgggacatcttgactctctttggaagctctcactcccccaggacctggaggacacccagctctcagacaaaggtgaggtggggacagcagtacacccagaggcctcccagcttccccaagtgaggcccatcttcagcacaggcagcccgtgccgcaatgcctgtgtcaacccccacaacccccactccacagacagggaaactggggctggggataagtaaaatggtcaaggtcacctagagaacaaactacagagcccagctggaacccagggccccagctagtgggacaagtgtcccctggggtggagagtgtgggggtctgggcagcccccatgggctgcagaggtgagcaggcccaccgtcctgagagtgtggggcccctctgggcagcccccacggggtgcagaggtgagcaggcccagtcctggctgctccaagcttcctcctggacagagggaggtggtaacgagcgaacgaccaggtgcatgaagctagaagatggggcgagatggggccccacgtggcttgagggaaagggctgaatgcaggggtggccaagggcctgctgtgtcccggtgcagtgggggtaaggcagtggcaggggcttctagcgggcagggcaggccccctctgcctgtctgggggaaggactgggtggctagctgggagcagctcccgagtgtccaggagtgggcagtggtgatgaggtaggtgtttgcactgaaggtgctgtcaggtaggggttggggagggcccagcagaggggtcctgggaggctgcaccggagttggacaagcttcctgagtaccaggccgtggcctccaagcagaggcggaaggggaaggaggagccgcagacggggaagtgaagaccagcgcctttggctgcagctcagaacacttgaacatggggatgccaagcccccatgtaggcacagaggcgagcaggacccaggagtccggctcaggcactgcccccatccccctgggtggctgtggcaggagcaggggcaggtgtgaaggttggagggtgagcaggggaggggctggctctaaggggctgccaatggccaggacagccctggcctggccctcaccgcagtggggctgagactggacgtgcgtggtttctgcccaagggtcctgatccctggtctgcccaggtcctggcggtttctgagggggtccagccgcctgaaggttctctcccaattgctgcagtacccctgcccccacttcaggaggacccagacagccactgtagctgtccccaactctctccccagggccgccatgcccacagatgctttggagtgatgggggacggtgctgctcaggcccagggtttaagttcccccgaggtctgggaggcgttcctccctggcaggcagccagctcgggggagggatggtcactggcgggagcgttgggcctgggctggcatctggcggcctcctggagcaatgaacaggcaagcgaggccataaggcctcagtctcatctacagaaagcagagtctacactggacccatgtggggatcccaccaggccttggaagacagccccactgcaatgccggggaggggtggggcagccgtgctatacgtggcccagcagatgggcaggtcccacaggcacgactctcctttccaggctgccttgccggcggggggagcccgaaacagccctttgcagctctgcaccaggagcaggttttgcggaacccccatgtaaggcttccccggggtggggtcctcccagccgtgggcctcagggtgaccgatcacagggagagtggctccctgccctgggcaccccctgcggtggccccgacgacagctgaggagtgaccacaaggtctctgcccacagtgctcggggtgcggtgtctgggctgcgaagtggatccccctttcttgggcactgcagcagcttggggggctttttggacgtggatgtgcctggtcctggttttccgagggcctttacagtggatgaggaggtgaacacaggagtcctgagagcaagcaccacctcgggctttgttgtagaaacaatggcccggaccccaggctggagccgtggcttggcctcctgggtgtgtcttggcatctgaaatgcaggctacccacaccggctcacctccaggggtacaggcaggtcccacagggagagcttggcgctgagctgaggctgtctgggctcctcgcctcccaaccagtctgcagttacaggggccagtggggggcgggtgagaaggacgggttccctcaggggagccggccggagcccgagccttcccccttctccaggacgcaggcctgagcagcggggagccgcccgagaaggagcggcggcgcctcaaagagagttttgagaactaccgcaggtaggcgggcggcccccaggcttctccaaaacgggctggggagcggcagccgggtcgcgcctgagacacctgtcttcacaggaagcgcgccctcaggaagatgcagaaaggatggcggcagggggaggaggaccgggagaacaccacgggcagcgacaacaccgacactgagggctcctagccgcagcagcgcaggccccgaccagggcacacccaccggcccggcctcctgccacccgggggtgccgacgccctggggcgcagacttccccgagccgtcgctgacttggcctggaacgaggaatctggtgccctgaaaggcccagccggactgccgggcattggggccgtttgttaagcggcactcattttgcggaggccatgcgggtgctcaccacccccatgcacacgccatctgtgtaacttcaggatctgttctgtttcaccatgtaacacacaatacatgcatgcattgtattagtgttagaaaacacagctgcgtaaataaacagcacgggtgacccgcattcccgctcggacactcgcgcgcagccccgcggccgtccctcctcgctgcggcccgcggtgtcctcggggtgcgagctgcacgtggacgcagggccccctcaggccgccagggggcggcatagcgcagcgcgcccccgacccggaagacggaagcccaagaacgccgcttccgcccggcgcccacttccaagatggcggcggggcggggccggggcagggcggacggagccggcgagcgggatgctgcggactgcgctgcgcggcgcgccgaggttgctgagtcgcgtgcagccccgggcgccctgcctgaggcggctgtggggccgcggggcccgtccagaggtcgcggggaggcggcgggcctgggcctggggctggcggcgctcaagctccgagcaggggccggggcccgcggcggctctggggcgcgtggaggcggcgcactaccagctcgtctacacctgcaaggtaggcgcgcggcgggacggaaccggggacagacccgtatctgacgctacacggcctgcggggagaagcggcccgccggggatccgggaggcggcgtggtcaagtcacaggaaggagtggagccaccccttggggcttctgggagggagcggaggcggaccatgaggaggggtggagccgtccctggggcggggccttcccgggagagggcgaggttgggggtgggtggagctatccctcgggggcggggccttctctggagagggtgaggtggctggagctacccctagaggggcgggtcttcccgggaggggcgtggcggccctcacagcctcaccagctaccctgtcccagccaggtctgcgggactaggtcctccaagcgcatctccaagctggcctatcaccaaggcgtggtcattgtgacctgccccggctgccagaaccaccatatcatcgctgacaacctgggctggttctcggacctgaatgggaagaggtgaggcctgtaccccagggctgggccagaaggccacccagaagtaccctggcctccctgggggaaccttgccctagtgttgaggtttatagatctcacctgggaaatccagccaccttatcaatacaagacacacagttaaatgagaatttcctataaagcccagatagcttttgagtttaagtatgccccaagtagggggtgcgtttttatttgttaaattttgccagccctgtggccctgcctccctgcctctgcctgccctctgccatcactggcagccttgtccctctctagcgtggaacttttttgccctctgccatcttggggtggctggcccac

SEQ ID NO: 1356 - DNA, 6000 bp, Homo sapiens
ccccaagccaggaaaaagggcagggcctggtcctagggatgcttactggcagcaagagcagtgcccagtcagggtgggaggtagcaccaggctctgtgaccctcacccaagtgggggggtggtcagtggaagctggggaggcttcactcagctcaaccctgcagaccccccatatgagaacccccctcctcccaccagctgggggagatgacatcactgctctctccatggggagggggctcacagggcaccaagttcgggatcctaggactggcaggacctgctggagcctgagatgggccccaggggcctgaggttgcctcctcctgtccagacccagccttggcacctcccaagactgccaagggccctaccatggccccacagcccccagggctggcagttccatctaggagggtgcctctaggccccactctcaggctaggatggagaggcagatctgggcctggtgaggtgacctgcttctggaggggcagggccgcacccgagagcagggacaggtgcccgaacacagggtctccaggacgtagcgcccccccgcatacttgaatgtatgtgcgtatttattgctcacgtctgtgccatgttgtcaatgggtcctttccaacccaagaggtacatttgtttttctgtttttcctgaaaaataaagtcggccaagtgagtgtggtccgtatgggcttagtcccgggtgggggcctaacccggtaagaggctgcactgtgcaaagtgtccacagatacccactgtctgggccctctgagacctcagagagatggagttcccactgcatttaaccacgggggagctggggcacagaggggtgaagtggctgcctgctgtcaccactgattcctgcacccctacctcctcacgctcccagcccctagggaaacagagcatgctctgagctgacactcacgtggccgggaccagcccccagaagcagcagcccccaggtcagccccacgaccccctgaggacccagcctgctgccgcccacccagcacccgggggagggaggtcctttcctggagtctgatccggctgggctcagggtctggacactgagccacagtggaggagccgacggcagatctgcagtcttggggcttgtctgggcgctgcttgtggtgggtggcacccccacggggcccccgtcaggggacacacaggtgcgccgggcagtcctgctgcccctcgccacagcccacctggccatgttggcagccacagcctctgtgctggttgactccgttgcctcctccaccccagaaggggccttgggaaccagaatcaacgtgtactccaggtccagggtcccagccagcttgcgtgtggtggtacacgcacacagggtccaagtaaccgtgcagggcccaggaccgcgcacagccagggaagcgcagcagtgccgcccacgctactggctgggacagcctctgaaggtgcggccgaggaacctgcttggagagacgctgtgacgagggatgcccaggccagcaaccgtgcccgggaggcagggatgtcctggggcgggggggtgtagagtggcaggagattaggatggcaaagccccttgcagaaacctggctgtgggattggggctgcggggagggaagggcggagggagacagggtccagggggcctcaggcaggagctggcgggatgcttctggcacgcggggggtagccataggtcttctctaggaacgtgccagccttgggaaggatttccctccagggccagcctgggcccagaggtgctggcatcagacagaaaagacatggtaacgtccacatcccaactaccagccgccatctccccatccgtaagaggaggggttggcccaagcggctctccttgctctaattctgcacttccaggtccagacggctccctggacctccccacatgctggtccaggccctctggaggcagtgaggcagccaagccaagcccagccccactgcacttccaagcccccaagagacccccagccagtgcctccatggaggagcaggcctgggtgccggtggctcagccgagaagaggacagtttccacaaatggcacagaaggctctgggtgggaataatagagggttgttggctgaaagaaggacagggggtaatcgaggcaaagcccacgccacaagcacactgggaacgatgccgccgcgccccggcctcccacgggccggatgtgagctggcagtcctggccgtgtcccgctgggaggggccgcactgggtccctgtcgtgctcagtcctgcctccacctcccacctcgccccattctcttccctgccggagtgtggcgggtgatgaatgctgaaggttacgctgcccagaacgcttctgcaaataaacaggctgctgtgtttgctcgctttcataaacacgggaacatcctgcgcacagacaaggctgggagacaaaccccacacacctcggagggccctggggacgtccagagcgctgtccaccgagggaaggaggcccaggtggctcccccgggaggggtctggagctcctaacacacggccacgccatagctgctcgtcctgcctgggccagcaggcagcctggtttgctcactgtttcgccgacggccggcggccgaggaccagggctcaggtctgcactggctcacggaagggaggccgccagagctggccaggggggcggcaagggccttgcagaggaaggctgaggctcacaggggtggtgacctgctcaaagtcacgcagcgacagccaggaagggctctgacgccacatccagccccctttccacgcgactgtggcctctgtgggcaagagctgggtgactctgtgtagaaggaactgtggtgaggcgagaggtcctgcggctcctatgtcccacccagcagcaccagggattcagagcaatcgttctaactccagaaaaagaaaggccacgagggccacaggccccagcatctggaagtaatgtctgtttattgatagaaaacaggccacgtccagagaggcccagggccaaaacctccttctggaaggccgaagtcccacagtgccggggagcgcaggagtcagctcggctccgtcttgccagggctggggggaccctcatcctcacccgcttccggagctgcagtggatgtgggggcccctgcagcctccagaaccagttccagggccccctcgcccgccacacggtgcacctgctcgcctctggccgtcaggatctcttcgatatttctggggggcagggaggcaacatggctcttcagggccccccagccgccctgcacttcagtcccctcagggcgccccatggccaggccagagctgcaagcaccaggcccagcactcctgtggcatcaggccacacgggcacttcagacgctggcctgtgtgccctcaccagccctgtgtctctgccggtatgcgccgcctcaggaacccagtctcctgctcctgccccctatgtgccagagggaagaatctgcagccccgggtctgatgggaggacagtcccagctccaagggccaggtaccaccaagcacctggcatgctggtctcagacctgctgtcgctgttactgtcctgcccaggacctcccggccaggcaaggcccggaccaggctcccggcaccacctccactgctctcccagcagccagggcccaggccacacctcctggtccacaccccaagccttgctgtgggccagccaccccaagatggcagagggcaaaaaagttccacgctagagagggacaaggctgccagtgatggcagagggcaggcagaggcagggaggcagggccacagggctggcaaaatttaacaaataaaaacgcaccccctacttggggcatacttaaactcaaaagctatctgggctttataggaaattctcatttaactgtgtgtcttgtattgataaggtggctggatttcccaggtgagatctataaacctcaacactagggcaaggttcccccagggaggccagggtacttctgggtggccttctggcccagccctggggtacaggcctcacctcttcccattcaggtccgagaaccagcccaggttgtcagcgatgatatggtggttctggcagccggggcaggtcacaatgaccacgccttggtgataggccagcttggagatgcgcttggaggacctagtcccgcagacctggctgggacagggtagctggtgaggctgtgagggccgccacgcccctcccgggaagacccgcccctctaggggtagctccagccacctcaccctctccagagaaggccccgcccccgagggatagctccacccacccccaacctcgccctctcccgggaaggccccgccccagggacggctccacccctcctcatggtccgcctccgctccctcccagaagccccaaggggtggctccactccttcctgtgacttgaccacgccgcctcccggatccccggcgggccgcttctccccgcaggccgtgtagcgtcagatacgggtctgtccccggttccgtcccgccgcgcgcctaccttgcaggtgtagacgagctggtagtgcgccgcctccacgcgccccagagccgccgcgggccccggcccctgctcggagcttgagcgccgccagccccaggcccaggcccgccgcctccccgcgacctctggacgggccccgcggccccacagccgcctcaggcagggcgcccggggctgcacgcgactcagcaacctcggcgcgccgcgcagcgcagtccgcagcatcccgctcgccggctccgtccgccctgccccggccccgccccgccgccatcttggaagtgggcgccgggcggaagcggcgttcttgggcttccgtcttccgggtcgggggcgcgctgcgctatgccgccccctggcggcctgagggggccctgcgtccacgtgcagctcgcaccccgaggacaccgcgggccgcagcgaggagggacggccgcggggctgcgcgcgagtgtccgagcgggaatgcgggtcacccgtgctgtttatttacgcagctgtgttttctaacactaatacaatgcatgcatgtattgtgtgttacatggtgaaacagaacagatcctgaagttacacagatggcgtgtgcatgggggtggtgagcacccgcatggcctccgcaaaatgagtgccgcttaacaaacggccccaatgcccggcagtccggctgggcctttcagggcaccagattcctcgttccaggccaagtcagcgacggctcggggaagtctgcgccccagggcgtcggcacccccgggtggcaggaggccgggccggtgggtgtgccctggtcggggcctgcgctgctgcggctaggagccctcagtgtcggtgttgtcgctgcccgtggtgttctcccggtcctcctccccctgccgccatcctttctgcatcttcctgagggcgcgcttcctgtgaagacaggtgtctcaggcgcgacccggctgccgctccccagcccgttttggagaagcctgggggccgcccgcctacctgcggtagttctcaaaactctctttgaggcgccgccgctccttctcgggcggctccccgctgctcaggcctgcgtcctggagaagggggaaggctcgggctccggccggctcccctgagggaacccgtccttctcacccgccccccactggcccctgtaactgcagactggttgggaggcgaggagcccagacagcctcagctcagcgccaagctctccctgtgggacctgcctgtacccctggaggtgagccggtgtgggtagcctgcatttcagatgccaagacacacccaggaggccaagccacggctccagcctggggtccgggccattgtttctacaacaaagcccgaggtggtgcttgctctcaggactcctgtgttcacctcctcatccactgtaaaggccctcggaaaaccaggaccaggcacat

SEQ ID NO: 1357 - DNA, 6000 bp, Homo sapiens
cctgcctgtcacctgggtgctcacagcccaggggcttctccctgttcctgtaccagctgtggtgagccttcccaggccagcagggacccctggccccgcagggctgctggccactctgctgcctcccctgactgagactcgggcggcccagggccccagggccccagcgttgagcagctcttggcagcccccagccaatatgaacagggaaccggagccttcctgcaggacagacaccccagctcctcccacacacgccctctcccaaagtcctgcagaagcggatggcagtgtggcctttgtccctggagaggcccaggtggccagggagatacctgagcccaggacgtcctcccacgctgaccctcctgaagcagaacccccttggtccgggaggctgccagccttcggtggtgtcatcccagcaactgagccaagggggacgccggggtccccctcagggacacaggagcccagggggcctctgggcctggagaagctgcccctgcgccagcctgggcctgagaagggggccctggacctggagaagccgcccctaccccagcctgggcctgagaagggggccctggacctgggcctgctgtcccaggagggcgaggcggccacacagcagtggctggggggccagcggggggtgcgtgtgcctcttctgggcagcagactgccctatcagcccccagccctgtgcagcctgcgagctctgtccggtctcctactccacaagaaggccctggagcacaaggccacctccctggtggtggggggcgaggctgagcggccggccggagcactgcaagcctcactggggctggtgcgggggcagctccaggacaacccggcctacctcctgttgcgggcgcggttcctggcagccttcaccctccctgcgctcctggccaccctggccccccaaggcgtccgcaccaccctctcagtaccttcgagggtgggctctgagagtgaggatgaagacctcctgagtgagctggaacttgcagacagggacgggcagccgggctgcacgacagccacatgccccattcaggtagggtgggcgcccagccccacttccccatggcaggcggcggtccctggggtgccctcgcctgcctggagcagtggggtgggggctggtggaagttgcgggcaggaaggctggctgctgggtgtcttaggaggaggaagctggttcctggcctgcccagttgcgtgtagattctgcagaagtggcctccctttggggcagtgtggaaaaggggagaagagaggcctcattctcgtgcaggagcctccggccatcctgatgctgcccagccaggtggccttgtctgagcgagaagctctgggatggacgctgacccggctctgagccgcacacgccacacacacgtgtgctcccagggtgggccatgggcacagtggagggtggtggctgtgtttgtctctggatttctggggtcccaaaggtccctctctgctgtcacctctctgagtgtccttggggagagttttccaatctctgtaggtgaaaccatgtttggaaccctggaaagcatgtggagctggggcccccagagaggcctcctcccctggtgccagggtgcccacttgcagcagctgggaggctggcctccctgagaaaccaccagaagcaggcagcctcagctggacctgtgggcctgtcatagggagtgtggcagagggccttccatctctccccagggttgtgtctcgcaagtccctgggctgaagtgtgggaggaagcaatgtccaagagttggggaggaccccggccagccaggggaagaggccctctgtgccccatccatgtacagcctcctgccctgcctgggtgtgatggctgtcccatgggggagtgggaggcccaccagagggatggcttggatggggtcagagcccccgagggagggagtgcacagtcacgtgtggccccaggagtgcctggagcagctcccgcctgagctgagggtgccctgtcccaagtgggacactcacccacagggcccctcctcactcccgtcccttccccgtccatcatggctcgggggtgtcactcttgtccccactgcctggattttctttcagggagccccagactctggtaaatgctctgcttcctcctgcctggatacttctaatgaccctgacgacctggacgtgctcagaacccggcatgccaggcacacccggaagcggaggcggctggtgtgagcagcaggtgagtcctgagtggggaggccactgccctacaacccaggggacagagtggtgtccagatggcagggggccttggcctctgctcggctctttggcgctcacagcaggtgtgctgggttaggtgggcaggtccagggtcatggaggccctccagggggagaagcatttaacccacatccttcctgctggccacccatgcctcgggccttggcaccactgtgcccctgaccataggctcattccctgcctttggggtctgggctcctccctggccgctgtgctctggtggtgccctgttcccgtgcattgctgcgtcgtctcccagcttgtaaaacgatcaccatccccaaccgcagccaccaggctggctcttcactgctggagccctggtgccctggcctggcccttggcgcatgtgggtcaggtttaccaagcagactgggcgtggccggcgctggggtggtcttggttcctgtttgtctgtcccagccctgcttggggtctggctggggtcaagggcaccccccacctggtgttcctgtgttccaggacaagcactttctcagaagcccgtggccctgctgacgagagacagcccacccccagcctgcaagagaggcagccagaggccaggtatctgctggccgctgactgaccaggtccgcagtgaacagaggcgggcctgccgactgactgtgtggcatggagcatggctgttccccaagtgcacacctgaacacttggaggaataaagttctgtttttaattgtggagctggacacaggctgttgtggttttgttgtcctgaggtaccgggcagtgtacagggaccccccacctggctggggtcaggctgctgcctagtggctgagccaccctagtgcaggcagttcgggaacaagcagggtgctgggggcccagagctggggtcctggaaggcctcccgtaccccggctgccctcctgtcagagaagcaggctttctttcgcccatttcctggaaagcatctgtggctttgtccttcaggctagccggcaccctccccagatggctgccagccctcgcgctgccctggctgacccagggggttccctggaacagatgacctggctaccccgacacggcggcagcccccaccctccactgttccttttgcatgggcctttattggcataagactagcccccatcttctccgtctgtcccctagctccctttcctttgtctctgtggcagcagcgcccccaggcccttggctatctgggcttcgatccttcactggagccactgtggggcctcagccctgggcacctggcagacgggacggtcccatggccgacctcactcctgagtatgtgttgctgtgcctggttctctagtctggtgcctagtctgggggccactctgatctgtgggttatttagcggtatattatttaatttccaaatatttagagattttgccgatatctgttaccgatttttagcttccgatatggttagagaacatggtatgtgtgttcactcctaaggacacacaccacagggaagtcactaaggtccgcgttttaaacgctggggaaacactgggtcatgagggcctggtgccagctccggttcgctccctggcagggcccaggatggccccggcctgcacactcgctcatgttgatggtgaggggtccagcaggggcacggccccctggaatgtggcattcccgagagcccaggaggacccctaactgtccgctccttaatgtgtgatgtcagacgttgtccgcacagaggcctgagggctggaggctgagaacggttaggcaagctccacaccagcttccttgccttccagcctggcggccccttctcgaacctgttgggtggcaactcagttcaaccagctttaccgggtgaggcggggcctgggggttcccaagcctgcagggatgaggctctggcagcccacacgctgaagtgcacagttcagggcagactctgctgtccgttgtccctggatgggggccgagctgtgccctgctgtcaccggctcttctgaagctggtttgggggaccccgagagtggcctcagtcctcacatgcatcctggtggagagcagggatgcctcatgatggggataacgaggataacgacacttctggaagggacgtttctcccccgtgtgcagctgggtggtggccgatgccatggcccctggcaggctgctgtggcctcctgggctccataaggtgggctgcagcccttctgtgaccaaggcgtgtgctggccatgccgtgtggctgtgtgcccccctgcacatgccctgccccgctgtcctgagatgctggcgagggcgagggtgttcgcacagagcaaagcatgccttactgaagaagtctccagaagcctgtgaccaggtcaaagtggctgggtgcgggctggccttgtccagccccctgggggtctctgctgtctcttctacttgccaggtgccagggctgggcctctggggcatccccaggacccccagcccccggccaggctgggagggctgggagcagctttcctctggagggcagcggacttccacttccgtctgcctcttggggcctcctgggctgggcgaatcagaaagcaggtcaccagggactgtccccctgtgggaggactggcgggactgtggagttaagcagaacccatcaggaagtgcacaggcgtccggcgtgctcctccctccctgcagccccgggcagcatctcccagaggctccgcggcccaggctcctggtgtgtctgcagtgcaggtggctcctggaagaccctcaggtgggtgggtctggtgctttctgaaaggtggccaggaaggttggcgttggcctagttcaggatcctggcactgatcccccagagcagcctgaggcttcccacaggcagccaggcagcctccgccatgcggccccgtccctttcacggcccctgggcggagatgtgttcatttcagtggaattacggtggcagatgggaccctgcatttcaagctggggaagcaggaaaggggcccagtgttcccaggactgtctaccgtgtggccagtgtttttattcagtcccttgtctgtcaaaactgtcctgaatggggtgacaaagtgcagcgggaagttgagaaatgcctcaaaagaccaagcctggggcaactatgtctccaggagcagtgacccagctcctctgggctggaaaccagcgtttcccagcggggctggaggctgtctgaggaccacgtggctgctcccagccttgccgcagtcccagtctcagagggagtggctttcagcggctgaggcccccaccatgctggcagaaagggacagcagtggctggtcccaacatgggtagttctgttgcagccactgggatgggggccgggcctcatctggggcaggagaagagtccagggattcactggtgcccggcacctcaacctggagaaaacaccgcagcagcactcctggccagccaagggcaacactgacagcccctcccagggttgcggggccggcagggggtgacagagacacgctcctgtgggcagctcttcccggccagtgcagcgaccccgcagctgcagcagggctgggtggccactcttgcatcatcagcagccggccgtggaggagggagggcacagccagggatgtgagcaggcgtcggtcaggggaatgaggaagtcccacaagaaccggctcccccagc

SEQ ID NO: 1358 - DNA, 6000 bp, Homo sapiens
gttgctggcacggatgctgctgtgtgacagcacaagttcatgtgcttgagggtctcctggccacagccagccccaggcttgccctggacaggcgggcttcagattccccccaaggttctatgccattgagttggaggacaagagcttccccactgtccagcgttgaagcaaacctccctccaggtcccacccctccccaggcctttgtccttttatcagggattgccctgggggagcccccctggggagctgatgaggagggagcctctgtgccccgtgcactggcctgagggggtgaggccagggctggggctgctgcaggggactctggcccggagctgcggctgccttcctggaaacactcctgtcagatgactgcagagtgagagtgaaaccagcttccctcggaggctgcagcacagggctgacatgcaaacgtctgaaaaagaggcaagctctcggtgtgagcaagtggactgcggctatttgaggtgggcacttcccctggggacagcaccaggcacacaagggtcccttgttcatggtcccgtggggggcccagcttggacattctgcctcctggctccatgtgcaagctgggctctgtcgtcccaagacctgagtaaaaggacatgaggtgtgagccttcaagggtgccaaccacgcccaagggaagccaagcatccacagagccctgctgggcacagagggcagacgcagccgctggatttcagatgcatccacagagccctgctgggcacagggcagatgccagtggcatggcggcccctcacctcccgtgctctgcaggcccagtaggtagctgtggggtcctccctggccaggccagtgagtggctggcatccacggcagcatctgctgtggtccatggtcatgccgcccctccagggacactggcaccctcgtcaggacacggagcccaggacagcagctgcatgtgtccatctccaggttccaactgctgccctccttcctgctcctgcaacccccatcctcaggcagtgagagggtgctggggcttctcctgagactgcccggggacataccctccccctgcccctgctggaggcctgggtggctgacttttgctttcttttcggcaggaaggagcccacgtgggaatcccctgagctgcgccatggccagagtgagtcacccctttccagccagcaaacaaggcgagtccccaggccaaggtgtcacagcttccaagctggtgggcggggtggggaggccgcttcccaatcagtgtgtgcctctgcctctcagtcaggctggtatcaacttgctatgccttacaggcctgtcatcacaatcaatattattagacagagtcttgctctgtcgtccaggatggagtgcagtggcgcaatcctggctcactgcaacctccgcctcgcaggttcaagcgattttcctgcctcagcctcctgagtagttgggattacaggcacctgccatcatgttcagttaatttttgtattttagtagagacggggtttcaccaccttggccaggctggtcttgaactcctgatctcaggtgatctgcccacctcagcctcccaaagtgccgggattacaggcgtgagccaccatgcccagccagttttttttttacgtgtctgtgccaatcttctggaaacagagcagtataaattaaacaaaggcattttcatgagagcagcactggggcaagtactctgagactgggcggcacggggcagtcatcctggtcactacctgctctcgagggctgtgggcatttgccaagcttgggaaaccttttctggacttggggtggggctgaggtggtctcagactcagcccttcaacactgtcatcatccaggaccagtgaggtgtgtcaccccatgttggaggccactgtctgaaagctgttagaatgactttcccgttaccctgaaggaagtagagtgtcctaaaacaggtgaaccccttcttttttctttgagatggagtcttgctctgtcacccagggtggaatgcagtggcgtaatctcggctcactgcaacctctgcctcccaggttcaagtgattttcctgcctcagcctcctgagtaattgggattacaggcatctgccaccatgcccagctgatttttgtatttttagtagagacagggtttcaccacgttggccaggctggtcttgaacccctgacctcaggtgatccacccacctcagcctcccaaagtgctgggattacaaacatgagccactgtgccgggccttttgtgtatttttttttttttttgagatggattcttgctctgtcgccaggctggagtgtagtggcgcaatctcggctcactgcaacctacgcctcccgggttcaagtgaatctcctgcctactcagtctcctgagtagctgtgagtacaggcgcgtaccaccatgcccagctaatttttgtacttttagtagagacagggtttcaacatgttggccagaatggtctcgatctcttgacctcatgatctgcccacctcggcctcccaaagtgctggggtgagccaccgcgcccggccttttgtatttttttagtagagacgaggtttcaccatgttggccagtctggtctcaaactcctgacctcaggtgatctgctcgcctaggcctcccaaagtgctgggattacaggcatgagccgccgtgcctggctgttttttcttttttaaaagagacagggtcagccaggcgcagtggctcatgcctgtaatcctagcactttgggaggccgaggcaggcaattgcctgagctcaggagttcgagaccagcctgagcaacacggtgaaaccccgtctctactaaaatacaaaaaaaattagccgggcgtagcggtgtgcgccggtagtcccagctactccggaggcttaggcaggagaatttcttgaacccgggaggcagaggttgcagtgagccgagatcgcaccactgcactccagcctgggtgacagagcaagacaccgtctcaaaaaagaaaaaaaagagacagggtctcactctatagcgcagcctggagtgcagtggtgcaaccacagctcactgcaacctccacctcctgagcttcagtcatcttcctgcctcagccttccaagcagttgggactacaggtgtgcagcaccacacccagctaaattttttttcctttttttggtagagatggggttcccccatgctgcccatgctggtttcgaactcatgggctcaagcggtcctcctgcctcagcctcccaaagtgctgggattataggcatgaactgccacgtgaaccctttctcatcccgagctggctgctgcagactcaggacagctttgagcctcccaggtgcagccaggaggagacgccttcttacgtttgagagctcagttagttcctgggcttgagcaacctcactgagcctgcaggtgcggacttgggacgtttccatggctgcttgcagcaaactcaggggtgatgacgttgatggaatccgatggcttcctgagttccatctcaaggccttgctgtcccaggaatgtgggtttggggcggaggggaattccaactgcaaaccaagtaacatatatgaaatgtggcattggcgcctggggacagcgtggcctgtgtaaattatgcaacttcaaagcctgccctgttttgcagtgtattccatccttgaggagtcccgtggtctcagggtctgaatgcttggaggagacttacctccgtgaacgtttccttctctgcaaagcggggtgaaaggtctccatttcaccaaaggctggatggagagggggtggtgtgtccagtgctagcccgtgcaccgccagagagaacctgctgcagctcccgttctcctgggcagatgacagtgccgcctcccccatgcagcccacaggactcctagggcagcccctgttttggccgccaaggccactgttttcatttgagtgtctggaggccataggttgtgttttcacttgaggtcgggagttcaagaccagcctggccaacatggtgaaacctcgtctctatcaaaaatacaaacattagccgggcgtgatggcgggcgcctgtagtcccagctactcgggaggctgaggcaggagaatcgcttgaacccgggaggcggaggttgcagtgagtcgagatcgcgccactgaactccagcctgggcgacagagtgagcctccgtctcaaaaaaaaaaataaataaagtgcacaacccagtagattagcacaccggccatgtcgggcggccgtcaccactgtccggttgcagagcattacctcaccccaaaaggagaccccatagccttaataccttacttaagtgtgcagtattcttttagtcctgtttctcataaatgttacccaaattgaggcgccgctctgcgcccggcaccgggggaggcggagggacccgcaggtgtcgggtaggtgcggccgccccgccagggccccgcgtcccgcgcgcgacgcgcgcctcgtgggaaccggtgtcgcccggcttgggctcccggctcacctctcgggtgtgcggcaggggtctccgccccggggccacgggaggggaagcaagggcctcgctgtctcgccgcacctggggaagggacccaattagcgcggaccccacagcgcagcacctcaccagctccccgcaccaacgccccggcgcgctctttgaggaaaaagcagagggcgacttaggtacccacgccgtctcagcgccgaccaatcggcgcacgctgcggctcctgcgggctcgctggttggctccggcgtcagtccgtcaggcgcgctcggagcggggcgtatctggccaatggctctcgctacagcttcctgagggctggctggttggctcccatgtccgtccgtcaggcgcacgcggcggagcggcggcggcggcggcggcgttgggggcggtagctgggcgggcccttagttccgggcgcgctgcgaccgttgggtgaggcgagcgcggggtcgggtgcggggtcgggcgcgggcgcggggtcgggtgcggggtcgggcgcggggtcgggcgcaggcgcgggcacctctcagggagactccgggccggagcgggagcgggggcgggagaggccgcggggcgggggcggggccagcccgaggggatttctctgagccgctgggccggaaaccaagtccgagcgtggctggcgcgggaaagttcgggaacgcgcgcggccgtgctcggagcagcgccagggcacggtccggggttttgcgcggggtcgcggctcccagtaccgcctgaggcccgtgggcggcccacccggccctgccccgtcccgggtccgtcgctcccccgcaccctgtcgcccctccacgctcagctgtgggcccctcgtgtccccgaagccccgcaccctcagccggctgcgtgctcgggagggtcaggggcgcctccgacccctgagtttgccagcgccccccagccaggggtcggggaagaccagtgaggctgggggcggagccgactctgctgccttcctgcccagtggctggggagacccaggctgagcctgggtgaaaagtccctctggctgctgggagggtcgggggcagcaaggagccagtgcggggatgggctgcggtggaccgggccgggatcggggccggggcctggtcctggcagtagcaggggatgtttgtggaaggtagagccgagaaaaagaggagttgcaatgtctgcaagaatctggcgtgagcagctgaaggctggtgcttcctaggccaagatgaaggagtcacagcgcccatggcctctcgggaggcggccagatgggcagcctggggtcaggggaacggtcagggccagagctgggtattttggagttgtcattttgaggccccgagggctgagggtcagtgcagaagagcaccaagcctccactcggtgtagggccgacagggggtggggtgtctggcagccggtgaagacgg

SEQ ID NO: 1359 - DNA, 6000 bp, Homo sapiens
gcttgccaaatgcttctggaatggatggatggaaccccatctctactaaaaatacaaaaatcaggcgtggtggtgcacacttgctatcccagctacttgggaggctgaggcagaagacatgcttgaacctgggaggcagggattgcagcgagccgagatcacgccactgcactccagcctgggccacagagcaagactccgtctcaataaacacacaaacaaaaaaacccacatctacttctattattaacccacctacttttctgagccccaaggggctttctggacagattccagcagagcggctgctggtcaggcagcagtgatctctaaagctacgcaggtaattttatcagatgctggcagagaaggggttctcatgggtgggtacctggcaggcggatcggggctcattcctttcttcttggtccttggaggggcagggcagtgagagacacagctctacccccactacccagcagctgttgtctctcccacttccaattcctgggtgtgaggcccacctgatcctcctttcccaaggaggctgtgtggccccaaaggcctcccaggtcatgccctagtcaggcatagcaactgtgttgttccctcccagatacgaggggcaaaggagttagtgtccaaggctaagtcccacgtgcagcactctgtatggaaaaacagccccaattagcaattcattcatccatccatccatccatccattcatccatccatccatctattcatccatccatcatccattcattccagaagcatttgctgagtgagcacatccatctatccatgcatccatccacccacccattacccatccaattatccatccattccagaagcatttgccgatcgagcgcatccatccatccatccacccatccattccagaatcatttaccaagcaaacacatccatctatccatccatccacccactcattgattatccatctatccatccattatccatccatccatcccagaagcatttgccaacagagtgcatccatccatccacccacccacccattcattatccatccatccattcattctagaatcatttgccaagcaaacatatccatctatccatctgtccatccacccattcattatccatccacccactcattatccatccatcccagaagcatccattattcatccatccacccattatccatcatccatccacccattatccatccatccatccatcatccatccatctatacattatccatccatctatccattatccatccatccatccattatccatccatccatccattatccatccacccacccattacccatccaattatccatccattccagaagcatttgccgatcgagcacatccatccatccacccacccattcattatccatccatccatcatccatccatccatccatctatccattatccatctatccattatccatccatccgttatccactcacccatccatccatccatcccagaagcatttgccaagcacatcctgggagccaggcccaagcaggcgggcatcctcctggctctgagaggagcttgagcagagcccacagacagcaccaccctgctggcgggtcaccaagccaccaagccagtgcaggctgaaggctgagcacacagagcaccggtctcagtgtctggacatggttagccgtccccacccgcatggaaggaaacttcttctctcccctaagacaggctttgcagacttggaaagggaacgccgtgttgcagggctcaggcctggagccccggccagagcagatgcgagccagcctcatctggaaatagcagctctggtcccggcctcgctgaggcactgaaaaccagcaccagggccccgtccagcccggcctcgctgaggctgggaaacaaacacaggtctgtaaggcgcagctccccagcaaactccccacccctgcccagcacccacagcgctcctggcctctgtcctctattccaggacccctgtagcgagcctggcttggtcctgggtcctcaggggacactgtccacccccgctgccctggcagagcctcaggaatgtgcttggtctccacagccctccccacagcaatgtcccaaggttagacctacccatgcctcagtgacttctgagacacccgtcccgccgcccagcagccactccagcctccagagctggccccaacctccagccccaggctgagccgccctccccagaggtcaggaaaagcctcaggcagggctcacagctgcacccaggagtcacccagggtgaccccgctctctggggcgggtcactcctgcccacccacagccggggactgtcattttctcagtacacaaaggagagaaaggaaaaacaagagcgagaaagacacagggagagaaaaggaagagagaaggaaagaaaaaagaaagacacagggaaagaagaggaaagaaaagaagggaggaaggagggagagtgggaggagagggaaagaaagggagagacagggaaaggcaggaaagggagagatggggaaaggcaggaaagagagaggcagggaaaggcaggaaagaaagggagagacagggaaaggcaggaaacgcaaggaagcaatgggaagggaaagaagtgaaaaggaaggcggggagggagggacgggagaaagggaggaaaagagcaaaggagacagggagacaggaaagaaaaaggggagggaggcaaacggggaacgggagaaaaagaaaggaagggagagggaatgatggagaaaaacaggagggagggaggagagaagaaaaaggaaaaggagggaggagagaggaaagaggcagggaggtaggatagaaaaagacggaggagagaagaaaaaagaaaaggaggcgggacgcagtggcgcacgactgtaatccagcactttgggaggccgaggtgggcggatcacctgaggtcaggagttcaagaccagcctggccaacatggtgaaacgccatctgtccttaaaaaaaaaaatagccgggtggggtggctggcacctgtaatcccagctacttgggaagttgaggcacaagaatctctagaacctgagaggcagaggttgcagtgagctgagatcacgccactgcactccagcctcggtgacagaacaagtctccatctcaaaaaaaaaaaaggaaaacagggagaaagggagaaacagagaggaaggaaagaacaagacaggaaagaataaaaggaagaagaaaaagagaggcaaagggagagaggaaaaatgaaaaaaaaattaaaaaatggaaaagagacagctaggcgtggtggctcacacacctgtcatcccagcactttgggaagccgaagtgggcggatcccctgaagtccggagttcgagaccagcctgaccaacatggcgaaaccccgtctctactaaaaatataaaattagctgggcgcggtggcgcatgcctgtcattccagctacttgggaggctgaggcaggagaatcgcttgaacccgggaggcggagcttgcactccagcttgggcaacaagagcgaaactctgtctcaaaagaaaaaaaaaacggaaaagagagaggggagaaagggacgagaggaagggagacaggaaataaagaggaaaaggaaaagagagggaaggagggaaaggcagaaaagggaggaagggaaggaaagaggaaaagggaaggagagacggaaagagggagaaaaaagagggagggagcaaagaaaaaacagaggaagggcggagggagaaaagcagaaaaaggaaggaaaaaaatgaaaaagagggaagaaacgtagcaagaaaggaaggagaaagggagagagaaatgaaagaaaaagggagggagggaaacgaaggcagagacggaaagacggagaaaaaggagggaggcgggaaagcagcaaaaagcaaaggcaagcagggaaggaagagacggggagaaaagggcgggcgggagagagccgggaagggagaggaggcgggaggagggaggagggaggcgggagggagggaggagggaggcgggagggagggagggagggagggaggaagggcggagtgggaggtcgcgaaggaggaccccggccgcagcccccgccgggcagacacgggcacagacacggggaaataggggagcccgggcgggtgggcgcggcccacggaacccccagccccggcgcggagggcaccgcggggtcaaagaacggaggcccagagagatcccccccccaccaacctaggccgggcgcggagggcggcgcggagtcacggatcggcagcgggactgagccgcgcccacgtggaagccgccgcaggcttcgcgcggggccccccgggtgcacgcgggcaggggccggggtctcccgacgcacgaccccggagagtgttgaaagggtcggagctgcccggaggtcaagggtcaagggtcgggggtcggggcaccacatgtcgcacatcccggcggggtcgccgcggcctccgggagaaagcggacgacgcactcggagcgaactgggcatcagggtgggcttctgactccgcagctgccctcccgcccgctcgggtactggcagcggcctgaccttcacaaggtcaaggctgccgcggaacccccagcggcccctacggcgcatgggcggggcctggctcccggcatacctaggggtgcggggcgggacgtctccggggagcgcagccaatgggcgcggttcgctggagtgcggggcgggacgcagcgggattcccggcagccctcagaggcgaggcacgcaggctggtgtggggcggggcctggcggcgcagccaatgagcgcggcgcgaggaggcgcgggggcggagagtgggcgtggcgtcggcgtcttagcggctgcgcggtggctgctccgtcctttcggtccaggcggcggcagggctgagccagcgacgccctccattcactctccgcgcccgttctccggctgtcctcccgttccgctgcccgccctgccaccatgacggaacaggccatctccttcgccaaagacttcttggccggaggcatcgccgccgccatctccaagacggccgtggctccgatcgagcgggtcaagctgctgctgcaggtggggacgcgggcgcggccgctccggggactaggggacgggaaccgagtggccgggtcgggcggggacgtgggcagcagagccttgcaggcgggcgccggaagtggaaggccgcgatcgctttgtccacgcgccgccggcttccgggggccgcgtcacgtgaccgctgctgcagggcgtggcgacgtccacgcgtgcgcactgggcccggcgggcggggggaaatgcggcacggattggagggcgcatgcgcgctgagcagggcccatggacggaccctgcggctggcgggccttgaccttgagctcaatcctgcgggtcccccggctgggaccaacccttccggtggatgcctggcaggtgtctgctcttgctccctccaccgtgaagggtaattctaaggccaatagggcaacgagcctgcccgcaggtgtcctggaataaccaggatatggttattggtggttcttacccccttcttagctcatttgtgcaattctgatccagagcaatgcattttttgtcttttgggagaggcttatagaaagtagcatgatgcctaggaacattgccgccaggacgtccttgctaacgttgtactccgagtgacagctcggtgatgggaatgaataggcttggctgcaaggacaggtcacgcccgcgatcccagcgcttttgagaggcccggggagtattgcttgaggccaggagtttgagagcagccggggccacacagcaagacctcacctcaaaaaaaattattttaacttaacgaagcaggacgtcccagtgcattgagaggcccggagaggatcgcgtgagctcaggagtttgagaccagcctgggcaacagagcaag

SEQ ID NO: 1360 - DNA, 6000 bp, Homo sapiens
ctcaataaactaggtatcaatggaacatgtcccaaaataataaaggctatttatgacaaacccatagccaatatcatactgaatgggcaaaaactggaagcatcccctctgaaaaccggcacaagacaaggatgccccctctcaccactcctactcaacatagtattggaagttctggccagggcaatcaggcaagagaaagaaataaagagtattcccttaggaaaagaggaagtcaaattgtccctgtttgcagatgacatgattgtatatttagaaaaccccattgtctcggcccaaaatctccttaagctgataaacaacttcagcatagtctcaggttacaaaatcaatttgcaacaatcacaagcatttctatacaccaacaacagacaaacagagagccaaattatgagtgaactcccattcacaattgctacaaagagaataaaatacctagaaatccaacttacaagggaagtgaaggacctcttcaaggagaactgtaaaccactgctcaatgaaataaaagaggatacaaacaaatggaagaacattccatgctcatgggtaggaagaatcaatatcgtgaaaatggccatactgcccaaggtaatttatagattcagtgccatccccatcaagctaccaatgactttcttcacagaattggaaaaaactactttaaagttcatatggaaccaaaaaagaccccacattgccaagacaatcctaagcaaaaagaacaaagctggaggcatcatgctacctgactttatagtacaaggctacagtaaccaaaacagcatggtactggtaccaaaacagagatacagtccagtggaacagaacagagccctcagaaataataccacaaatctacaaccatctgatctttgacaaacctgacaaaaacaagtaatggggaaagcattccctatttaatatatggtgctgggaaaactggctagccatatgtagaaagctgaaactggatcccttcattacaccttatacaaaaattaattcaagatgggtgaaagacttaaatgttagacctgaaaccataaaaatcctagaagaaaacctaggcattaccattcaggacataggcatgggcaaggacttcatgactaaaacatcaaaagcaatggcaacaaaagccaaaatagacaaatggatctaattaaactaaagatcttatgcacagcaaaacaaactaccatcagagtgaacaggcaacctacagaatgggagaaaatttttactatctacccatctgacaaagggctaatatcaagaatctacaaagaacttaaacaaattttcaacaaaacaaacaaccccatcaaaaagtgggcaagggatatgaacagacacttctcaaaagaagacatttatgcagccaacagacacatgaaaaaatgctcatcatcactggttatcagagaaatgcaaatcaaaaccacaatgagataccatctcacaccagttagaatggcaatcattaaaaagtcaggaaacaacagatgctggagaggatgtggagaaataagaaagcttttacactgctggtgggagtgtaaattagttcaaccattgtggaagacagtgtggcaattcctcaaggatctagaactagaaataccatttgacccagtgatcccattactgggtgtatacccaaaggattataaatcattctactataaagacacatgcacacatatgtttattgtggcactgttcacaatagcaaggacttggaaccaacccaactgtctatcaatgatagactgggttaagaaaatgtgacacatatacaccatggaatactatacagccataaaaaaggatgatttcatgtcgtttgtagggacatggatgaagctagaaaccaacattctgagcaaactatcacaaggacagaaaaccaaacactgtatgttctccctcataggtgggaattgaacaatgagaacacttggacacagggaggggaacatcacaccctggggcctgtcgtggggtggagggtagggggagggatagcattaggagaaatacccaatgtaaatgacgagttaatgggtgcagcaaatcaacatggcacatgtatacctatgtaacaaagttgcacgttgtgcacatgtaccctagaacttaaagtataataataatagaaaaagaaaattaaataagttggaaatacagtacgcccagccaacaggcagacacttgaagagattatggtaaatccattgcaaggaataacattcagccactagaatgaaagaattagaggtataaattgaggagatttcattattaattaggaaaaaggtttgcctggaaattcaatatggaatggtttgatttttataaatgaaacaaagtggaaagccatgtgttctatctaaacatatacatgccaacacatcagcaaccctactcgttgatgttgatcctagagaaatgcatgcacatgttcatagggaacatgcgcacaaatattaataagagtattattttgttttggaaaaatgggaactgcataggcgtggatcattaggaacaggataaattgaaaatgatgaaatgtacaaaattaaaataaatgaactagagttccatgtatttacatgggtaaacataaaaaatataaagttgagctggaaaaccaaagtgttgatcaatgtatacattatgaagacgtgctttaaataaaggaagagattctatattgtgtacagacacagaagtaggtagcaaatatatacaagtctccatgggcataattgctgacttcattatagaggagcacagtggggaaggagagagcagagtgggtcagggaagacgtaataggagggttttgccatatccaatatataaaagataaacagtaagtagggcctaatatttaaattttatacagctagctattggtgtttataatattaatctctcttctttgccctacgtttgagattaagtcgcagtaaaaaaaaattcatgctaaaaacaagcaaataaactgcaaaagtaatcctcccatttttgtttcatgagggtaggattgtacatgctatagacttccatgcaagacccaaattcctggaaacagtaaaataagttcatacctgtactgaaaaacaattcagagcaattatcaatggaccagaaactgcgagaattctcagaatgtgggacagcagatggagccagactactgttttgagtaggtcatgtcccagaacgcgtgcaaaggttatcccaaacggagggctggctcaagagtgctctgtgtcctggagaggtgctttctttgcttgaccaaattgatttattgctaacttacccaacaggaggtctcggtgggctctaattataaagaaaatttcagcaagacaggcataaagtattcatttgtttcttaagagttcagttaagaacacctataaaatcttttccatcatgaattccttcagcacgcatttattaaatgccacactcacacaccgcttggaaaaccttgagaggcaaaatctgtgcttaccatgtaataaatgcttttcattttttatctcatttaattctcacaaccctatgagggctgtactttagccccactttatagatgggaaaacaggcttagagagaagtgacttgcttaaactaataccttgaatgacataagaaagatatagagtgctagttatagggctttcctcaatggagtaaaaatggactcattacccttttgggcagatcaagacaagcttcagggagaaacaggtctgtgagcagtcaaatggaatttagatagttggagaaggctgagaagacaggtcaggcagagcaaacagtgagcaaaagcaagcagtggataaagttcagagtatgctctgaaagaagcaaaataaatcaggagtccaggaagactggagcctagaaaccttggagccaatctgaactccatcatcccctccacattccccacttcatccattctgtctgcaaagcccttcaacggtcacctttaaaatgtctttctgcctctccatccccatggcaacagccttaaggcatactttagttcccagtgcttcttattccaattgcttcctatgtggtctgccaggaaacagtttgcttttctgagaggctgcacaaatgcaattcctctgatcctgtcactgccctgctttcatacatacatacatacatatatgtgtggtagatatatgcactgtatataaacataatgtggtagatatatgcacgatataggtatgtatgtatgtatgtataaaagcagggcagtatatatatcgtgcatatatctaccacattttaaaggctctgcacctctttcaccctgcttgtttctgcagtcccatctcctcacatcatccagcacatctgccataacaatattatccgggtcctacatgggaccacaaattgattagtatacacacaaatgccttctgaaaacagggcgagtgaatgaacgcgctgtgtaagccaagacaggaaaggaaggctggagacagctgactccttccaagaatacaccctcccgccacccctggcctcccaacccccaacacacacacagcccgtcgtcagtgggaatggagccgacgcactccttccctagaccgtcgagccaatcttggaatgtttgtagtaggctgaaaatacagaaactttaagctatttttttctcttctgcaaactccaggcccctccaatctctagctgtcatttctgcccttgtcccacccctgtcgctgcctgccccttttcctatctgctagcggaagtccctgtggaggaccagcctacttcctctttggtgctaggagtgtgcgtggcaggagaggcggggccaattttgctgagctttctcgcgggcttgcagctgcggcaagtgctggcggcggctgctcgcgcaagtcagctggcgtgggaactaccctttgtagctgagaacggcttgtttattgctacaaagactctattgacattggtagcttcagcggcagcagcttcttacggtataaagctgttgcttcctgaagaggctacaagcatccttccctaggactgctgtaagctttgagcctctagcaggagacatgcctcggggacgaaagagtcggcgccgccgtaatgcgagagccgcagaagagaaccgcaacaatcgcaaaatccaggcctcagaggcctccgagacccctatggccgcctctgtggtagcgagcacccccgaagacgacctgagcggccccgaggaagacccgagcactccagaggaggcctctaccacccctgaagaagcctcgagcactgcccaagcacaaaagccttcagtgccccggagcaattttcagggcaccaagaaaagtctcctgatgtctatattagcgctcatcttcatcatgggcaacagcgccaaggaagctctggtctggaaagtgctggggaagttaggaatgcagcctggacgtcagcacagcatctttggagatccgaagaagatcgtcacagaagagtttgtgcgcagagggtacctgatttataaaccggtgccccgtagcagtccggtggagtatgagttcttctgggggccccgagcacacgtggaatcgagcaaactgaaagtcatgcattttgtggcaagggttcgtaaccgatgctctaaagactggccttgtaattatgactgggattcggacgatgatgcagaggttgaggctatcctcaattcaggtgctaggggttattccgccccttaagtagatctgaggcagacccttgggggtgtaaaagagagtcacaggtaccccaaggagtagatgccagggtcctaagttgaaaatgatgtcgattgggggcgggggacactgtatttgatatttgtgatcagtgatcattgttcaactgcgaaatagagtgtttgcttttgataatggaaaattgtattcgttt

SEQ ID NO: 1361 - DNA, 6000 bp, Homo sapiens
tcatgtgaaggtttttgatatgccatagtattataaacaccaatactaattcctcctctctgcatccactctattctttgcaaaatacttttactctgggagatcttttgggcctcacaactccatgagggaatgaagctgctgtgttacctctggcaatgagctcagtctacctcagtggccctaggaagattcaaatcatgttgattctagaggcaaagtcaccttcatttgcccttgagatcagctctgttgactattctatacagaaagcctcatgcagaagttctcactaaggctaattatccctaaaagatcactcaaggaactgagaaatcagtattaaaagctggggagattggcctgggcacactgtttcccttatctgggaaacacttgccttacaggaacattgtaatggctactgggaaaacatagataacatatttctgttgttgggctctcaagccatcagatagtcttatcttgttgattgggagatactcctcatcacagaccactaaagaaaactgcacaggaactgtctgggaccagggcacagtcaggcaggccagtcatgtgagccaactggtcctgtgatctgctctccttcagggtggccaaggagggggcagttgcttgaagttcaccactaagctcaaagaggaaaacatgcaaatggtggcttctcctccatgtcagatgtgatctctctcttctttcctgctacagtaatccggtacaacagtgatctggttcagaaatatcacccttgcttctggatcgatgggcagtatctctgctgctctcagacagccaaaaatgctatgggctgccaaattttggagaacaggaatggaagtaagcaatctgatcgatataatttctttctcctttgactgtttccatcactctcccaagggtctgtcaagcccagggtcatagcataaggttgtacactttgggtgctaaacaaagggtcctgggggagggaggaggcacatgggggctgaaatccagctggtaatctgctctccaagctatgtgacctggcatgcctagctactttttctaacttgcctaaaggcactcaatatggacggcaaagtccctgaccaaacctgtccttggcccctttcctaaagtgcattccatatcatcactggcttcttgttttgcaggcttaaaacctgggagttctcaccggaagacaaaaaagcctcttcccccaacgcctgaggaggaccaggtatacagggaaactgggtgctgccactgcttaaatggaaacttatagtcaagccctaagaacacactagagtcttagaattaccctgggacttggcagtgttaattggtattcttgctaagatgggggatttgttcttctaattaggatttcctcctcgatggaaagatagaaggctctcagcaaccatgtaatccaatcacctgtttagaacaaaacctgatttttttaatgtaaagtttttgttgttgttttgtttttgcttttgtttttgttttgagacggagtctcgctctgtcgcccaggttcgagtgtaatggcatgatctcggctcactgcaacctccgcctcccagattcaagtgattctcctgtctcagcctcctgagtagctgggattacaggcatgcaccaccacgcccagctaatttttgtatttttagtagagatgggggtgtcaccatgttgttcaggctggtctcgaacccgcctcggcctcctaaagtgctgggattacaggcgtgagccaccgtgcccagctggaaagtattttcaaacatacagtaaagttagaagaatttaacacttaataccaacatactcaacacttagcactaacaccacctatcactaacacttcagaagttttttttttttttttggttccttcttgagggctagaaagccctttctcacatattgtaagtaagtagagcaggtattattatactcattttacaaagaaggaaaccaaggttctgagccacttagtagattcacgtacaagtttagtgccaagccggtttcctgaccttagctataaatggtttttgtctagtgagctttaaaaatagtaatgtttgggtcccattcctgagagtttgattttgatgtaattggtctgtgaggaaactgactaggtattggaattggttttttgttttttgtgggtttttttttgagacagtctcactctgtcacccaggctggagtgcagtggcgtggtcttggctcactacaacctccgcctcctggggtcaagttattctcctgcctcagcctcctgagtagctggggctatatgcacacactaccatgcccagctgatttttgcatttttagtagagatggggtttcgtcacgttggccaggctggtctcgaactcctggcctcaactgatccgcccgccttggcctccgaaagtacattggaatttaaaagttccatacatggtctttatatgtgtgcaaggctgagaactcctgcactggtgcttaaaaatggttgttgaatgactgctgagtaatattttagtatgcctgatttgggtgtcttgagtaagccagagagttgggagagaagagaagagtgcttggtatcttgacaaaccctcctaccttttctcctaactacatagatcttgaaaaagccactaccgcctgagccagcagcagcaccagtctccacaagtgagctgaaaaaggttgtggccctttatgattacatgccaatgaatgcaaatgatctacagctgcggaagggtgatgaatattttatcttggaggaaagcaacttaccatggtggagagcacgagataaaaatgggtgagtccacaccagcccttcctgagcctggtgcctgcccactccctacacgcaaaaagtgctgcggcataattcccgtgatcagcatcctcatcagagactgttcttcccacaccagactgaacatgctctccctccaagtacttcccagcgtgcagctccctatacatggcctctgccacatctctgagcctctgttgttgggcacatataaccaatgcaacatgtgcataagctctgcacctcactggctcactgcctaaccatgcatcagagacatgattgtctttgagggaggtgcatgatacatatacctccatttgagatttgttctgagctcagggacgtgggcatatgaatctgtctcctggaggctggggaggtgctggatgaactgccacattgtttccttcacaggcaggaaggctacattcctagtaactatgtcactgaagcagaagactccatagaaatgtatgagtaagtatgtttatgtcagtccacaatcttccaggaggaactctctctctctatatatatatatatttatttatttatatatattttatatatatttatatatatatataacacacacaagtgtatatatgtatacatatgtatacatacactggtgtatatataggtatattatgtatacatacacaagtgtgtatatatatatatacacttttttctactttcaacatattttttatttcaagatatatattaaaattagtaccatctgaatcaaatgatgccaccacctcaaattagtgtatctgtcttacctttaccccccaaacaccctccatttatgagagctggagaggtcaccatgccctcaaatccagaagaatcacactcaaagaaaaaggagttgacgacctgatgaaagaattaaaatgtcaaactgctactgttgtcctttcctccctaatcatggaagtggattgttctcaagtgccctagtccctgatctcttccctgcaactccctgctgcttgcctttgcctgctactctccatttccatgaatcttcaatgccaacctgggtttgggaaagggatacagtgtgctatgcacatgacagatgctcagtaaatagggtttgagtgagttgactgaatcactgacatggacaagccctggagggtgctgtaacctccaatctgcttatgaccaggagccactcaagcagcactctcccttcacaggtggtattccaaacacatgactcggagtcaggctgagcaactgctaaagcaagaggtaagtgtggaaccactagcacacagcattctccttgcataagtgaggatcttgaactgagggcctgttctgccccctacctttgggcaaggcagtgtcaaagctgccatcgtctgggatcccaattacaccattttttttgtttttgtttttctgagacggactctcggtctgtcacccaggctggagtgcagtggcgtgatctgggctcactgcaacctccgccttctgggttcaagtaattctcctacctcagcctcccaagtagctgggattacaggcacatgccaccacgcccgactaatttttgtatttttagcagagacggggtttcaccatgttggccaggctggtctcgaactcctgacctcaggtgatccgcccacctcggcctcccaaaatgctgggattacaggcatgagccaccatgcccggcctgcaccttttaatattaaaagcaatgaggctgtagctcaagcgtggaacttggcagtaaaatcaggggttgttctattttctctctcaagtttgggcaggtgggatgcaggtgtgagcaccacttcctcctacagacagcttctttttcgttgtttcaggggaaagaaggaggtttcattgtcagagactccagcaaagctggcaaatatacagtgtctgtgtttgctaaatccacagggtgagtgctactattccaaggccctgaggacaaagaacaggggtaccctcctaatagctccttgatgctgtgcccgtcccacttcctctgtctctgaaactcaaaactcatctcacttcacttcctgggttctgttgacctttgtgcccaagttactgactaagcatccacttcttcagggaccctcaaggggtgatacgtcattatgttgtgtgttccacacctcagagccagtattacctggctgagaagcaccttttcagcaccatccctgagctcattaactaccatcagcacaactctgcaggtgagtaccaggggcaactgagaagggagttacagacaccaggataagcaatgcaggacaaggtgataagaggaagaatctgcctcacaggacagtgtgaattcactgtgaaaggaaatccctgtgatactgggtagaagctggtaaagaggtggtcagaggcagacctacacccaacagggactgactctttatttggtgattgatgttcagtgttaagagaagacacaaaagaggctggtgactgattcatcagcaagtattcattgagttcctactgtgtactcagcgatttcctcagttctagaggagaacacgggaacattctgagtcgaggtccttgtcctcaaagaacatacaggttagacaacatcagaagaaagtttataagcactgtaaaatttctaaaaactgagacattagtgagggcatggatatgggggaacagcttcatcaagaaggtaggatgtgagctaagcctgggctgggaggtgggaatatattcagttaggcagtgtatttcaattagtattttctcttttttgtccctgaaaagtattttgtgagaggagaaacctctggaaatatgtgggttcatggaggtcttctgggattcaaaatgtactagaaagatacacaccggaagtgtgaggctttaagtgaggatgtgtgaggcatcccacctcctacaccacaccaacagcatgacctctctctctgtttcaggactcatatccaggctcaaatatccagtgtctcaacaaaacaagaatgcaccttccactgcaggcctgggatacggtaactccttatttctctggggtagggtggactggccagttgcaaaaactacctttgctggccttgccttagggagtgtccttgagg

SEQ ID NO: 1362 - DNA, 6000 bp, Homo sapiens
tctgatatatcgagtccacacaggagcctggacccatcccggcatagcacgggcgacgaagggggggaaagattaagctggatgttactcggcccccaccagcaagtcctaccatgcttgcgtgagcgctatcggcgcggaaagaaagaaaccgcgaggcaaacggaagtatataggaggttcccgatcgcacttcctcatgggagtcggtaggagcaatcatagagtgtaaggctcagcgcagcgccctcgggcggctgagaggactcagttcggagccgcgggcgggagcttaaggaaggactccgcctaaagggtggtccactcaccccgacttcctcccgccccgcagctttcaacgtttcgtcactttatctcttttggtggactctgctacgtagtggcgttcagtgaagggagcagtgtttttcccagatcctctggcctccccgtccccgagggaagccaggactagggtcgaatgaaggggtcctccacctccacgttccattcctgttccacctcaaggtcactgggaacacctttcgcagcaaactgctaattcaatgaagacctggagggagccaattgttccagttcatctatcacatggccagttggtccattcaacaaatggttattggatgcccattatgtggcaggcactgttccgggggagaggtacagtaatctaataggcttataaatgtgcaattatgaactaagtactttgaagaaaaggaacaatgattggcattaaagcagcacccttctgttgagggagtaagtcagcagctctaggttctgaaaagtgacaatgaaattgtttggctcctgtaatagcaatcatcaagcctagaagtagaaagtacctagcggctcttcccttccttgcaaacctggcagaaggcatatactaggtctcaagagagtccagcatagaaagacttcagggtgctaaacattttaaatagattgtgtcatacaattctcacaataattctaggagacaggtggtactattattctcattttacagattaagaaattgaggctgtaggatgttaaacgatttgcccaatgtcaacggtatttagtgaatctaggatacaaacccaagtagactgactctagagcccgcgttcctttaacattataaaatattgctgttgtggcctggtaattataatagctaaaaaaattatggcgcacttactatatgccaggcattctcctaaccaccttacatactaccccttttaatcctgacagcaaccccaggaggtatataccagtattagtatttaacaggtgaggaaactgaggcacaagagatgttaagtttacttacctgaagtcacacaggttgttatttttttgtggagctggaatttgatcctaggtagtctaacactatagccttgcacttaaccactacatcatacaaaggaagcaggggcatctgcagtgtagaggatggtgaggagacagaattgggctgagacacaggaggaggtggcagtggaataggggctgaagaaccgtgagagtctggggtatcttgcttgcacaaccctccaggaacacgcgtgggacctgagctgacactctgatcacccccttttttgttgggtggtctctgggaatgagataataaatatattaccactacctgctacatttcctgaaaatttctttgccaaacttccagcattttctttttctttccagattcttaagcaatctcactggcctttaggggtttatgttagtaacatggaaatatgaagaccgtgaacatggcccctcttcatttaatcaaccttagttctttctatcatatctggtgttatgtggctttgtgggggttttgcttgtttttgtttacttaaaaatatttaattgacaaaaattgtttatattcaaggtgtacaacatgatgatttgatatgtgtatacactgtgtaatgattaccacagtcaaattgattaacacatctatcatccatcaccatccatagttaccatgggggtggtgaggacacttaaaatctgctctcttatcaaatttcaataatacagtattattaactatggtcactatattgcacattagatccccagagcttatacatcctataagtgaaagtttgtacaccaatgctgacaccgaggtgggaggatcgcttgagctgttctctgttttggacatgctcctgctcattaatttcccctaagacgaggcactcagaactgaatgcaggactctaggtgtggtctggctttgcagagtaagtggcatgttaccttcctctgtctagatattttacttccataaggaagcctcaatgtcaccttggcttttctggaagccatgttaactgatgacatgccttttgattactatcagcaaaaacccctgaaccattttcacaaatgctactgctactccactttctcctggagtcatttgaagttcaaatttggggcccaattatgagacatcacctttagccctggtaaaatacactttgtggaatttggcttctcacaccaggtgatcaagatctttttgggaactaattgccctcttctgtcatccagtctagcacacaaagccttgcaccattcatagactaaccgggctactttttatattttcctcaaagatgatcaataaaaatgctgaacaggatagcaccaagaatagaaccttatattgcattgggaatctcttcaggtgacactcagctgtttatttgcactatctgagtacagtctttctgtcagtatggatgagtgtgctaggggagtggtcgtgggcagagggtgaagaaaagcctacgtctacttgctcttttcccttgtgctcctctctctctcttgtttagctctcccattggatgcctatcacctcccagtccccaccccaagatggatcttgagaaaggacagggcatgtgacaacaagtggcataagactgaagaaaagagcctgggcacggtggctcacgcatgtaatcccagcactttgggaagctgaggcgggtggatcacgaggtcaggagatcgagaccatcctggctaacatggtgaaaccccgtctctactaaaaatacaaaaaattagccaggcgtggtggcaggcacctgtagtcccaactactcaggagactgaggcaggacaatggcgtgaacccgggaggtggagcttgcagtgagccgagatcatgccactgcactccagcctgggcgacagggcaagactccgtctcaaaaaaaaaaaaaactgaagaaaagaggagggaagatgaatgcctgtggccaaccctcaggcaggtgagtggaacagctattgggggtgactagcgaaaggatagacgttgtcaataaagtaaggcaatcatacaacacatgctgtccatctgtcttgtgcaaatgtgagtatcaaccactctatcatcagtctacaaatactttaaatgtttttatttaaagtcctgttgatggctgggagaggtggctcactcctgtaatccctgcattttgggaggccaaggcaggagtatcgcttgagcccaggagtttgagaccagcctgggcaacatagtgaaaccccatctctacaaaaagtagaaaaattagcccagcacagtgatgtgtgcctatagtcccaggtactagggtgactgaggtgagaggatcacttgagcccaggaggtggaggctgcagtgagccatgatcacgccactgcactccaacctgggcttcagagcaagaccctgtctcaaaaaaaaaaaaaaaaaaaaaaggtcccagggcctgttggggcttgggggtgaggggagggatcttagaggatgggtcaataggtgcagcaaatcaccatgtcacacatatacctatgtaacaaacttgcaccttctgcacatataccccattttttttgtttgcttgtttgtttgttttttagacaaaataaagaaaaaaaaataaggtcctgttgacttaaaacttcggatgaaattgtagtgggacctgtgatctgtttctacattaggatacagtgccttggggcaaggaaatatggcagtgcccgaggtgtcaaggtgggcaggcagatcagtcagcaggggctccaccatcatggtctgcattcaatactggctgcatttcctaggagaatccctgggggaatcattgcagttggagcataatgtagggggcccctgagaaaacctccaggcttcaagtgacatacctagtctgctttaccggtttacaggactcaagagaaaggtggacattgagagttaatccctgaggccaaatcttaaatggagaaagtcaacatccacagaaaatggggaagggcacaagtatttctgtgggcttatattccgacatttttatctgtaggggaaaaatgctttcttagaaaatgactcagcacggggaagtcttgtctctacctctgtcttgttttgtcctttggggtcccttcactatcaagttcaactgtgtgtccctgagactcctctgccccggaggacaggagactcgaaaaacgctcttcctggccagtctctttgctctgtgtctgccagcccccagcatctctcctctttcctgtaagcccctctccctgtgctgactgtcttcatagtactttaggtatgttgtccctttacctctgggaggatagcttgatgacctgtctgctcaggccagccccatctagagtctcagtggccccagtcatgttgagaaaggttctttcaaagatagactcaagatagtagtgtcagaggtcccaagcaaatgaagggcggggacagttgagggggtggaatagggacggcagcagggaaccagatagcatgctgctgagaagaaaaaaagacattggtttaggtcaggaagcaaaaaaagggaactgagtggctgtgaaagggtggggtttgctcagactgtccttcctctctggactgtaagaatatgtctccagggccagtgtctgctgcgatcgagtcccaccttccaagtcctggcatctcaatgcatctgggaagctacctgcattaagtcaggactgaggtgggtctggggtatggcaggggctgggcagcagcagcaatgtaccttgcttgggacccctaaaaaccagagagacagcatggctggtgccatttatcagctagtggaggaggctgacggagggtgggagtgtcatcagcacaaggccctggcagtcccttctggtgattagagaggccgaaagggtcctttccgacaagggctgagggtgggcggaacaggaagagaaaaatgtgacatgaggtgaccatccgaacaggtagcaaatgttagaaaggggtacctctggcaaacttagtggaaaagtaatattgcagggagcagtcagataaaaacaagcccttctgtcaaatagtgcttgaagactcaatagggatacatgggtcaatgaagcctttagaaaaagaaatactaagaggcagattctctgagaacatggtaaaagctcacgctccacgttatgaagttgacctttgtgagctagggaaaggcctggctaggccagggtgtaggctacctgccttgagctgtaccaggccaaatgtcgccagggtcagagctggcttattaaaggactgtgtggaagctgtgccaacctcgtggtaacaatgggtaaaagactgggccaggagaaagcagcctctgcctcagcccagacagtgcggccaacccttgaggttgtggcaaaggtttctcctcttaccattgccctccatgtgcatggcttgcttttctcttgtcttcattatttctcctttcctttcctcctctccaacctcctcctcttcccactcatcctcttttctctacctatatcccctcttcattataccctcctctgttctgttgattaccagaccctgacatacagttagcacttaacaaataattgccgaattgcat

SEQ ID NO: 1363 - DNA, 6000 bp, Homo sapiens
gaaaaatcaggttccctggccaggcgcggtggctcacgcctgtaatcccagcactctgggaggccaaggcgggtggatcacaagatcaggagatcgagaccatcctggctaacacggtgaaaccccgtctctactaaaaaatataaaaaattagccgggcatggtggcaggcgcctgtagtcctagctactcgggaggctgaggcaggagaatggtgtgaacccaggaggcggaggtggcagtgagctgagattgtgccactgcactccagcctgggcgacagagcgagactccgtctcaaaaaaaaaaaaaaaatcaggttccccttgttgcactgtatactagcaatggaacttacatgggagtagtaacagtgaaataagataaagtgacttcatgaacgtttatgcatgagttttgttactcctcaaagttcatccctaagtcctgggaaaagtaagaaaggtgctcacctcagcctaaagctagaagggccaaaggagttctcttggcctacacatagtccagctaatgtcatcagtttaggagactgcatagggcagagctccttttccaccagagtcctaaacaacaggaaagagtggccacgggtctccggtgtctcaagatattatctgcaatccatgaaataaagaaaagaatacccctcagttccccaatagataatgaggtgctgaatatttgctgctttcacgttcagacatcttagtctcatagcccttttattttttcagactagatctcttgaattaaatatattatctcccaaatcattgaaactcttacagtgacacccttaaaatttcatcagattcattccacattttggaaatcttggcatcaaagttataatggccatagcttagaggaaagctggagtaggcataatttcctatattcttaacacctagtttcagtctgtaatcggtgcttaaatttagagagaaagagagaatcacaataaaaaagtatcagtaaagcatcagagaggtacatagagaacctattctaggcaggaacagagatactcatacccacagggcccactagggctcagactaccttctcccaagcctagcatttacacaggagagataatgagaggaaaacaggacaataaccacagtccaaccaggtgcatttcagacaagtacatgtgagccatgtcatggcaatacacataaagatttcagcaaaaacgagcttccactgatgggatactaatacaatagagggatcttcactagttgaggtcaaatcatgaaacagttttatttttccaatagctgtatcagcagtgttctttctatcactccctcccccacttcgcatggggcaatgggcttctttaactacatttctgtccagttctccaacttttcagtcactactgcttattaaaatagtttcagtcagactaaagatttggttctattcattttcaaatgccaatctcacttttcattctgagtcctcctggtgcctccagggcagattagaattgaggctcctgggcttgaaacatgtgtaaaacgtgtgtgtggggataagaaccatctaatcagttcaccttctctctgccttttgggacacatgaatcccaaatgcagaatatagtgtccttctaacttggccttgaaaaaatttgtttttgttctcaacagtgtgctgtctatttccaactcctcagaaaacttcagggtcaagaaaacatctcaatcaactcctattcacaacattttagtaaagataacagcatttcccggataattttcacctatctttaaaacattactttattacaactaatcaatatagcataatatccaatctggatgttacaaacaaatgtctgttttcatccaaggaaatttgatggttttgaacacaggatttatccaagatgggtgaaaaggaaaacagcaaagcatttagccaccaaaagaaataaaaatccacttgctaaacttcatatccaatagtcacatcacagtggcttctcagctttcaggagatttttttctaggtaattcttaattttcataaaagcttttccgtattgctctaaatacagtccccagaatgaaaaacaacctattcgcctcagtactggatacattcattcaacaagtattcagtaatcacctacttggtgcaaggaacactattagtcactgggtacacaaaatagaacacagcaagcatgttttgggccctcatggattttaagaacaagtgggtctagctaaggaaagaatcatactctgctactctttaaatcatgttagaaaccatcgaataacaataaaaataatgtcaacaaaaattgatgatttactaggctatgtagtaaattattgttatgtgtaattctaacaatccttgtttcacagaggaagcacacagaccttgataagtaattgatccaaagttgaacatcaagtaaacagctgactgaatttgaagccagacttgtctgatactactgttcatgctttgaaactgcatcattccagctgatatcattaatatagcaatctgtataaaaagttcttaactgtgagacagaatccaggaatcactaacatttctttaaaagacaaatattgagtgtgattttataatttgatgttttggagctatgtactaatatatccatatacctctagaagaatatatatgtaattttatatggaatacatatctccaaaacgtctaactacatacacactgggcatatactcttcctttattcactgtgtcatctggtttagcagggtaggaaattctacaggagtttggggccaaaactagagttagtaagcatttgtctggcttgtcttgcctcagtgctgcatttaatgcttttggttccttatcataaacaacagatatcaaatattttttataacaatgccacttttctaaagacatctctattttctagctgtgataatttttttaaaaatgatttcaagttggagaaaggaacatttgcactcaggataaggttcagtctcaagttaagttgtttcacacaccccctgcttatttctaatatattttgaaacattcgcaccaaagggtagatggttttgaaactactttctgcataatatgtacttaacttctgagctcatactaagaagatatttgtagggatggtttgaaaggtttggaaaggaaagcagggaataaaagactccctttctctgatgactgtgatatcaaaaacatcaaagttacataaaatggtgaagatctgacgaccagactgctccctgaagattcactttacagatcatttcgaaaacaccaactgtgttcagaaagagtcccgcctttcaggcgcctgtagtcccagctactccggaggctgaagcaggagaatggcatgaaccctggaggcggagcttgcagtgagccgagatcgcgccactgactccagcctgggcgacagagcgagactccgtctcgggggaaaaaaaaaaaagaaaaagaaagagtcccgcctttttatatatttttttcttttcttttttttttttttggagacggagtctcgctctgccgcctagactgaagtgcagtggtgcgacgcggctcactgcaacctctgcctcccgggttcaacgattctcctgcctcagcctcccgagtagctgggactacaggcacgtgccaccacgcctggctaatttttttgtatttttagtagagacggagtttcaccgtattagccaggatggtctcgatctcctgacctcgtgatccgcccgcctcggcctcccaaagtgctgggattacaggcgtgagccaccatgcccggccaaaaataaaattttaaacgagctagtatgtatcaaaagtaatggcttgatgttgtgtggagcccagaaaaaatattttgtgtggtacaggtcaacataaacaatgagagatttcattgtgcaggataaagcatttccttttttttttttttttttttttttttttttgacagggtcttgctctgtcgcccaggctggagtgcagtggtgcgatcccggctcactgcaacctccgcctcccaggttcaagcgattctcctgcctcagccccccgagtagctgggattacaggcgcacgccaccacgcccagctaatttttgtatttttagtagagatggggtctcaccatgttggccaggctggtctcacactactggcctcaagtgatccacccgcctcggcctcccaaagtgctgggattacaggtacgccaccgcgcccaaccagcatttctttcaaaattaaaaacttataatttataattttctgaagcatgcagattttttaaggaaataaaaagaaatatatacagtccactccacttccttgccccgctttctgacaaatgccctcctgcctccccaccttagccctcactctaaattttctagaagggtaggaattcaggggctacgtgggcattgatggctgtgcacacgcaaggggtagaagtgggagtgcagcgcaaagcatgttgccaggtagaaaaggagagaaagcagaaaaggccaaagccaaggcctgaagtgagagggggcagtggtggaggatgatgcagaccctccctggtaaccagaggagggcaaactccaaccgcagagcagtgatgccacttgtgggccctcagattggagaggaccgagaagagtgacagggctgtgcgctctggggcacctcatgcagacgggagtagggaggctgttttttgcgcgtgcatatggcggtggcgggtggggggaagggggagatcctgctgcactggccgcccaagttggggggcgagctcggtggtgacgcgcggccctcacgtgacccagagctgcagagcgacgcagccttcggtgcagtcgtcactcgcgtctggctaccagctccccgctgccctgagctcggcgggctggcattcggcccggggaaaagcggagcaggtaagggctccggggcccgtgagccccggccatgccagcagcggctgaccgacctcggcgacaggcgcagaacagcgcagggggtccccgccagctttctccacaccccaacatgcttgggaacacagaggcccccagggatggggaagcaggggcggctgggtttccaggggcggcagagccaccaagagcgatggaaacccacccccgagtccctgcaggaaaacagcgaacaccgcggggggctgggcgttcgagggtggggtgggggtggggggcgggagacgcggggcgctggcagcgaggggagcccgggctcggagcacggaaagggccgggcggcggcgggtcttcgctagcgttccgctgcagcagcccccaccccccacaacccccaccccggctcgactgcaggtctgcgaggctaagtgtctccgcggcgcacctcgcggcgagaatccggaggagaaggagactgcaaggataggcccaggtcggtgcgagggacggtggtggggcgggggtcggaacgtaaggaaagcccagtctgagaccccaaccccctccaccccatcccccactcctataccggtcctccattttggtgcctgcaaagctctgggaaagaatcccgggaaacgaaaaatggtgggtttgggggaagggaggtaaggggagaaagctggagggaggggctttaattggaggccccgtagaggacgcgcggaacttctaaggtgggaaaaaacgaaattaaaaaatcctttgatatcagggctctgaatcctgctggtcagagcaccaagcattcagtctctctccttgcctttgtcttacttgtgttcaaagaaaaacaaccagaaaaaaaaaatctcatcatggcaaatattcaccaggaaaacgaagagatggagcagcctatgcagaatggagaggaagaccgccctttgggaggaggtgaaggccaccagcctgcaggaaatcgacggggacaggctcg

SEQ ID NO: 1364 - DNA, 6000 bp, Homo sapiens
agagtggccacgggtctccggtgtctcaagatattatctgcaatccatgaaataaagaaaagaatacccctcagttccccaatagataatgaggtgctgaatatttgctgctttcacgttcagacatcttagtctcatagcccttttattttttcagactagatctcttgaattaaatatattatctcccaaatcattgaaactcttacagtgacacccttaaaatttcatcagattcattccacattttggaaatcttggcatcaaagttataatggccatagcttagaggaaagctggagtaggcataatttcctatattcttaacacctagtttcagtctgtaatcggtgcttaaatttagagagaaagagagaatcacaataaaaaagtatcagtaaagcatcagagaggtacatagagaacctattctaggcaggaacagagatactcatacccacagggcccactagggctcagactaccttctcccaagcctagcatttacacaggagagataatgagaggaaaacaggacaataaccacagtccaaccaggtgcatttcagacaagtacatgtgagccatgtcatggcaatacacataaagatttcagcaaaaacgagcttccactgatgggatactaatacaatagagggatcttcactagttgaggtcaaatcatgaaacagttttatttttccaatagctgtatcagcagtgttctttctatcactccctcccccacttcgcatggggcaatgggcttctttaactacatttctgtccagttctccaacttttcagtcactactgcttattaaaatagtttcagtcagactaaagatttggttctattcattttcaaatgccaatctcacttttcattctgagtcctcctggtgcctccagggcagattagaattgaggctcctgggcttgaaacatgtgtaaaacgtgtgtgtggggataagaaccatctaatcagttcaccttctctctgccttttgggacacatgaatcccaaatgcagaatatagtgtccttctaacttggccttgaaaaaatttgtttttgttctcaacagtgtgctgtctatttccaactcctcagaaaacttcagggtcaagaaaacatctcaatcaactcctattcacaacattttagtaaagataacagcatttcccggataattttcacctatctttaaaacattactttattacaactaatcaatatagcataatatccaatctggatgttacaaacaaatgtctgttttcatccaaggaaatttgatggttttgaacacaggatttatccaagatgggtgaaaaggaaaacagcaaagcatttagccaccaaaagaaataaaaatccacttgctaaacttcatatccaatagtcacatcacagtggcttctcagctttcaggagatttttttctaggtaattcttaattttcataaaagcttttccgtattgctctaaatacagtccccagaatgaaaaacaacctattcgcctcagtactggatacattcattcaacaagtattcagtaatcacctacttggtgcaaggaacactattagtcactgggtacacaaaatagaacacagcaagcatgttttgggccctcatggattttaagaacaagtgggtctagctaaggaaagaatcatactctgctactctttaaatcatgttagaaaccatcgaataacaataaaaataatgtcaacaaaaattgatgatttactaggctatgtagtaaattattgttatgtgtaattctaacaatccttgtttcacagaggaagcacacagaccttgataagtaattgatccaaagttgaacatcaagtaaacagctgactgaatttgaagccagacttgtctgatactactgttcatgctttgaaactgcatcattccagctgatatcattaatatagcaatctgtataaaaagttcttaactgtgagacagaatccaggaatcactaacatttctttaaaagacaaatattgagtgtgattttataatttgatgttttggagctatgtactaatatatccatatacctctagaagaatatatatgtaattttatatggaatacatatctccaaaacgtctaactacatacacactgggcatatactcttcctttattcactgtgtcatctggtttagcagggtaggaaattctacaggagtttggggccaaaactagagttagtaagcatttgtctggcttgtcttgcctcagtgctgcatttaatgcttttggttccttatcataaacaacagatatcaaatattttttataacaatgccacttttctaaagacatctctattttctagctgtgataatttttttaaaaatgatttcaagttggagaaaggaacatttgcactcaggataaggttcagtctcaagttaagttgtttcacacaccccctgcttatttctaatatattttgaaacattcgcaccaaagggtagatggttttgaaactactttctgcataatatgtacttaacttctgagctcatactaagaagatatttgtagggatggtttgaaaggtttggaaaggaaagcagggaataaaagactccctttctctgatgactgtgatatcaaaaacatcaaagttacataaaatggtgaagatctgacgaccagactgctccctgaagattcactttacagatcatttcgaaaacaccaactgtgttcagaaagagtcccgcctttcaggcgcctgtagtcccagctactccggaggctgaagcaggagaatggcatgaaccctggaggcggagcttgcagtgagccgagatcgcgccactgactccagcctgggcgacagagcgagactccgtctcgggggaaaaaaaaaaaagaaaaagaaagagtcccgcctttttatatatttttttcttttcttttttttttttttggagacggagtctcgctctgccgcctagactgaagtgcagtggtgcgacgcggctcactgcaacctctgcctcccgggttcaacgattctcctgcctcagcctcccgagtagctgggactacaggcacgtgccaccacgcctggctaatttttttgtatttttagtagagacggagtttcaccgtattagccaggatggtctcgatctcctgacctcgtgatccgcccgcctcggcctcccaaagtgctgggattacaggcgtgagccaccatgcccggccaaaaataaaattttaaacgagctagtatgtatcaaaagtaatggcttgatgttgtgtggagcccagaaaaaatattttgtgtggtacaggtcaacataaacaatgagagatttcattgtgcaggataaagcatttccttttttttttttttttttttttttttttttgacagggtcttgctctgtcgcccaggctggagtgcagtggtgcgatcccggctcactgcaacctccgcctcccaggttcaagcgattctcctgcctcagccccccgagtagctgggattacaggcgcacgccaccacgcccagctaatttttgtatttttagtagagatggggtctcaccatgttggccaggctggtctcacactactggcctcaagtgatccacccgcctcggcctcccaaagtgctgggattacaggtacgccaccgcgcccaaccagcatttctttcaaaattaaaaacttataatttataattttctgaagcatgcagattttttaaggaaataaaaagaaatatatacagtccactccacttccttgccccgctttctgacaaatgccctcctgcctccccaccttagccctcactctaaattttctagaagggtaggaattcaggggctacgtgggcattgatggctgtgcacacgcaaggggtagaagtgggagtgcagcgcaaagcatgttgccaggtagaaaaggagagaaagcagaaaaggccaaagccaaggcctgaagtgagagggggcagtggtggaggatgatgcagaccctccctggtaaccagaggagggcaaactccaaccgcagagcagtgatgccacttgtgggccctcagattggagaggaccgagaagagtgacagggctgtgcgctctggggcacctcatgcagacgggagtagggaggctgttttttgcgcgtgcatatggcggtggcgggtggggggaagggggagatcctgctgcactggccgcccaagttggggggcgagctcggtggtgacgcgcggccctcacgtgacccagagctgcagagcgacgcagccttcggtgcagtcgtcactcgcgtctggctaccagctccccgctgccctgagctcggcgggctggcattcggcccggggaaaagcggagcaggtaagggctccggggcccgtgagccccggccatgccagcagcggctgaccgacctcggcgacaggcgcagaacagcgcagggggtccccgccagctttctccacaccccaacatgcttgggaacacagaggcccccagggatggggaagcaggggcggctgggtttccaggggcggcagagccaccaagagcgatggaaacccacccccgagtccctgcaggaaaacagcgaacaccgcggggggctgggcgttcgagggtggggtgggggtggggggcgggagacgcggggcgctggcagcgaggggagcccgggctcggagcacggaaagggccgggcggcggcgggtcttcgctagcgttccgctgcagcagcccccaccccccacaacccccaccccggctcgactgcaggtctgcgaggctaagtgtctccgcggcgcacctcgcggcgagaatccggaggagaaggagactgcaaggataggcccaggtcggtgcgagggacggtggtggggcgggggtcggaacgtaaggaaagcccagtctgagaccccaaccccctccaccccatcccccactcctataccggtcctccattttggtgcctgcaaagctctgggaaagaatcccgggaaacgaaaaatggtgggtttgggggaagggaggtaaggggagaaagctggagggaggggctttaattggaggccccgtagaggacgcgcggaacttctaaggtgggaaaaaacgaaattaaaaaatcctttgatatcagggctctgaatcctgctggtcagagcaccaagcattcagtctctctccttgcctttgtcttacttgtgttcaaagaaaaacaaccagaaaaaaaaaatctcatcatggcaaatattcaccaggaaaacgaagagatggagcagcctatgcagaatggagaggaagaccgccctttgggaggaggtgaaggccaccagcctgcaggaaatcgacggggacaggctcgccgacttgcccctaattttcgatgggccatacccaataggcagatcaatgatgggatgggtggagatggagatgatatggaaatattcatggaggagatgagagaaatcagaagaaaacttagggagctgcagttgaggaattgtctgcgtatccttatgggggagctctctaatcaccatgaccatcatgatgaattttgccttatgccttgactcctgccatttatcatgagattaatactgtgattcccgctgttttctttttccttgcattttcctaatatgcctttactgatccgtttgctgtgaaccctatgttatttccatgtgtcaagtgggtcttgtgttgccagcttctatttgaagattgcctttgcactcagtgtaagtttctgtcagcagtagtttcacccatttgcatggaaaaatttaaagctaataaagcaatttaaaaagcaatctatacatttattgtctcattaaaaatgtatacttacatataacagatgaactaaaaaaaaatctgagattaaatacactagagtgttaattggtgaacatttctgtgtgttaactaatcccagcactttgggaggc

SEQ ID NO: 1365 - DNA, 6000 bp, Homo sapiens
ctagtgataaacttcctgttttcatttccttggagtaaaaacctcaagatccacccagaacaccaccccaaacttcctgtcatcttgttctatcttctttttttttcaaattttattattattatactttaagtttcaggatacatgtgcacaacgttgttttgcagctcaaaagcaaaaatatccaaaattgtacaactcttttttgtttttgtatccttttaggagcttgaaaagtggttggggtaaatgactcccttaaacaaagctaaataaccatttgctctgaattgatggtcagttttggagagatgattattttgcctctttccctgtctctttggtgagggattgttctctctaatctccagctttgagaatttgtccaatcaatcaaagcagatcttgaattacttctaggccacctggacagggacttaattatagcttcatcaataatagtaatatttcaaataatgtatcaacagaatggggtgactaccagaaaaacagggttcagagaggcaaaactgttgagagaatgacttggagggctcatcaatctggcaacccgagtgataatccctgacagaaatttcccgaaactaaagcaaaataggttcccagttaccagctttcctgatctgattgcaaagttaccaagccagatttaccttgtttcctaatattgggatggagatgaagagggtgcttcagataaggaacgcaatctttgtggtcactggaaagtagtatatctctattgcaaagtaataaattaacaatcaaagtactatatcagttttgagataatttgattgacatgagccatcactgagagcctgggtattctgagaaagttcaatatctagacctaaagctcaaggaccaaactctagcttaacaatttgttgatccactgccctatgagagttctaacctgacaacatctccccaaaacatccccccaaaacatccccatcgcctaagagtggtgtttaaatatttccaagacagcttgttggtttggccaatttagtcaattggcaattttggataatttagtcaagctatttaatttagtcatatcagtgggagaaatgtcaaatcatttagctgatatttggaatgtaaacaaaaatatagataattttcatttaaaatttttttccaccagttgggttatatagcatttgaggatagaactagggtgccttttgcaagattctagtctgaacatggtgctcaggcctgaagctgtctttggggcaaagggaaattagaactctcccttctccttatgttcttgggaccagattcagctggaagcagctggtctcaagaatgtactgagtctgacatccattcatctcactacatcagtttcaccttaacttacttaatagtcctctgtgtcacttttcatgtgatgcgtagacaaagaggtagtttgatgaaaataatcactcatgttgggcatttcactgaattttaagctggtttctacaaaatggccaatctgattgttatttctgaataaaagaccttatttttttttccatttgctttaattgtgacatttcacagacaggcacaaaaataatatgcaaagattcatcaataatgggcaatcttcttaactaccctccttttagagacccccaggttaggaaaagtccagtgacaattaaagcaaggctactctatgggtaagtgaattaaagaaaagttggtataaagtatgtacgtgggtacatgggtatgaatggtgtgtgtgtgtgtgtgtgtgtgtgtgttgaagttgagagaagtggcaatgatattggcactcagtgtggtggctggggttggggaaagttaaaatgactctgagagacctagattaaaaaggaagacccatatatattaaaatcattccgtaatctgtacctctaatctttacctctataaccagggcactatgtctagaatttttacgcatttttgcatttatgtatttcttttctcctttgaagtttcatctgtgtgtgtgggtggaggtgaggcggcaaataaaatttgttctgaactctgtaaccttctagcagaggaagaatttctctcaagaacatttacttttttagcttagtcctttaaaatttactgttaagtaatctcacaataaacaacaggtattcattagaaaaaaattaatttaatgtgatttactatttaattctgctagctcagctacacttgtcctgcagagctgcataatttattcaaatggcctgaaactttttaagtaagtctaccagcagaaaaattattccctactcccaggagaatgaactttttgtgttgtactgcttcccaggactgacacttatttgactctcaagtgtatttacattgttggcttaactgggagttctttgctgaatcaataatatacagtatttcttcaagtggtgtcaatattattgctattctttttataaactttttgttaattctctgcagttacaaaatttttctttgacttgtgaaaaaaattactcctaagattatgaagacgcagagtaaatggccctttaatcttctgggaaatatgtacctctttaaactttatttatgtcagaacttactgtaatgaaggacaaaagctctagacaaggtcccctgttccttgtgggtgttcaaggctaggtcttccggagacaagcctgtagtttgttctcataattttatagctcacctcctggctgtttctttgcaaggggcctaagagggtacaagaaaaagagcagggtgagaatctgacccattgtgaccactcgggaggccctggcctggaaacttcccctttatgtggcaaaaacaaacatttgaaatggagggagaaaccaggtttaaacaatgagtgaaaacagtttccatctcagctttcctgctgataaacatatgtgccccctcatttgtttctgaaacataagttttccatcattttaacagagcctcagcctcaactgaatctgtccagagcataggaaacaaatattttgagatttagtaaaatggtgcatacatatattaggggcattttgacaatgttcaaactgtttaccaaacaaactttatgatggcctatgcaaacctttgaatcctactgtatttttcacataacgatgacttctcactgatctcatctgcctgtgtgctacagtattgactttaatattaatggagaaacagacagatatcaaaagccatgtgatttgtctcatgccatttgcaattttgtcttctgtcatcaacactgacttctccttccttgttctgctgaactccatacttaggtgcccagctacttcctcagagcctgccctcattctttacctgtggcctgcagcatggacaggtgcattcttgctgcttatctgaaaaatatgatccacagaaataacttgaatctttttgcccatttaaaatgtgctctaggttctctggttctctgtactaactatagaaagccatctagtcacaagtttctccttcctgtggtctccatttgggcaatacaattaagaaaaatacgtttccccacataacaattcttccaattcttttccccttctttgatgcttttatgatagattatgaatggtcatcagtgattttctgtaaatgccacgtttcctttttgccaagacaaagagtgagactaagggaccatctagtgcttcctcttgtggtatagaggctaaacagcgtgagttctgatattagtttcctttgatttaaatgcaagtgtcttcatttaatagctgtatgatctcagaaaagttattaaactctatgagtcctagtttcctgatttgtaaagtgggggctaatatgaatagcttgtaatagcacctaccatatgctaggcatgattttaggcactttaaacatattagctcatttaattttccattagcttatttaaaattcctactctacgatgtaggtaatttatatcattctcctttctcagatgagaaactgagacatgaagaagtaaagtaacttggccaaggtcagaattagtaagtggtagagctgggtttgtaaagccaggtagttggatcccagaggctatttactaaccagtgtgctatattgcctctctattaaattattgatgataaataactcatcacagtgttcggcacataacatttattgtcagctagtattatcactaccatcacctgttcttatctttcttcattttgtcactcttgcttctgctggattggttgtgtagtttattgcccccactgccacaagagacagcagcaacagtgatctaggttgaaatagctagcgaatccctcttcactttatgtgctttgtatttaaaccacaaatatgacagagacctatgaaaggagactaaacctctttttggtcgtgtaaaaattatattcctgcaatctccaaccctccagcaacaagccaacaaaaactgcgcaaagcaagggagaaattttagaagtggtagacttcaagtaaaattcctaccattctttaataaacaggggtaaaaatttcagaaagtaatgaaggttgtgaaagctgatgaacaaagactttgctactataataaatttcctagtctctactcactaatttctattagaatgccaatatcaggaaaaaaggaagagaaaattctgtaaataattactatatttttctcctaccaagtaagccactgacttcaaaattctctagcacatttgtggaaacttcattttttttgtttgagatttatttgaatgagctgttatgattggagacagtgagaatttcagattaatgttttgcagacaaaaaaaaacctctctggaaagctggcaagggttcataagtcagccctagaattatgtaggttgaaggctcccagtggacagaccaaacatataagaaggaaaccagagatctggtgctattacgtcccagcgtctgagagaacgagtaagcacagaattcaaagcattctgcagcctgaattttgaaggtaagtatgaacaatttatatataatttacttggaaagtagaacatacattaaatgaaaatattttttatggatgaacttctgtttttcctgtgttttaacactgtattttgcaaaactcctgaattatttagctgctgtttctcttacaggagtgtgtttaggcactaagcaagctgatttatgataactgctttaaacttcaacaaccagtaagtcttcaagtggaatttattattgattcttttatgttaatttgttaggtcaaaagaaaaatctttagagcaaaataaaagttttgctctttattaggaggttctttagatattacacttttaattgggtagcttatttgcatgtattttgaaactatctaaagtaaatagtgtttcctttgtatgcttatctttagctaatgtgtttttttttttggttttaaaataatgcttctagtgaaaaaaatcacaaaaacctcaacactgtaacgtttgagagcaacggctattcagttcggttaaaccgaaaagagagaaaaagaaaaatgataagactatatcatgattaatcattgatgttcatttctcatttcactgagcaatctaaactacttctacttgaacctaacataggtttggctgtttttttctttatctgatttaattgaaaatggattgtttagatattaaatagaccaaaattagatatctatatctaaaactaatattctctattaaaaggagaagacttagaaatataaatatatttcataacttcttcttaactatattattattgtgaaaacaatagaaaagtaaaactaaaggaattatttttaattattaaagacaaaccatgattccccatcacaatatgttcctttggcatattctcttttagttttttatatacttattttttccattgcttatgttacttatattttccacagctgta

SEQ ID NO: 1366 - DNA, 6000 bp, Homo sapiens
cccggcctataactgcattttggaaaagagttctagtgctaaatctttgccgttcccctcagcggataactacatattttacgttccacagtatccagctgccactgaggtgtggtggccatcctcaaaattcccttctacttatccacatcttgtgtcctttagtctctgaggatgtgtcctctttttctgttcaaggataatgcctctattcatgcttgatccgatctctttctcctttcctctgagtctttatgccatcaattttcctttcttctgttaggttgaaccatattaaattgctgtttgcatcatttggcaatggtggaacattggcaacttcatgcggttcaagttaatatatcttcattcttttcctctctaaatgttccttctcctcaaccaaaaccaattacaataaaatatccttgtataggtaagagtaagctctctatatattgtgttttgaattttacacttacatatgtccctgcatataaaacctaaacaccgtatctcaggtatactggcctttgctgttcatatctcccagttgacaattcacccaataagtatttactgaggatctggcatgttcatgaaacacttattcactcacccaacaaatatcttctgagcacatacactgtgtcagatactgttctaagcactcgaacgatatcagtgaacaaaacaaggatccttgtgctcttagagcttatattctagcaggagtggaaaggagacaatgtacagtaaagaaacataataattaaaagtaccatatagtatgttagaaagtgacagatgccgggcacggtggctcacgcctgtaatcccagcactttgggaggccgaggcaggcggatcacctaaggtcgggagtttgagaccagcctgaccaacatggagaaaccctgtctctactaaaaatacaaaattagctgggcgtggtggtgcatgcctgtaatcccagctactcgggaggctgagtaggagaatcgcttgaacctggtaggtggaggttgcagtgagccaacatcgtgccattagcactccagcctgggcaacgagagcgaaactctgtctcaaaaaaaaaaagaaaaagaaaaaagaaagtgacagatgccatggaaaaagcagaaagttgagcagaggaagggagattgggagtgctgggaggaggaactgtaattttaaatattgtggtcactgtaggccttttggagaaggtaacaattaagcaaagacttgaaggaggagaaggatatgctatctggggaaagtgttccgggcagagtaaacagcaagtacacagaccctgagtcaggaaagctaaagaaagaaggaggagaatagtaggaaatgaagacacaaaagtaagagtttagggtctttgtattaggtatctactgctgtgtaacaaattgccctaaaatttggctattgacaataatacacaggaattcaagagtcctttggcttgggggttctggctctgggtcccaagaggctacagtttctgaaggctgtgcctgaagattcttcttccaaggcggctcactcacatggttggcaaattggtgctggttgttgatgggggaggaagagatgaggagaggggaagggctttgtttctatttgtgtgggtctctccacctgctgtttttaaaaaaaagcctagtgaagtaaagcagtgagagtagagaaggaagaaagaaatctgtaactagctgtgatcaattggttgtaaacaccacttcactcagaccagcctccacatgctgtttgagtatcttcatgacatgacagctggcttcccctacagcaaccaatccaaaaacggagcaaggcagataccacaatgccttttatgacctagtcttgtaagtcacacgctatcatttctaccatatactactgatgacacagtcagccctggttcattatagaagagaactaccccagggtgtaaatagcaagaggtgaagaccattggtggtcatcttggtggctatgatagccttggtaggtcattataaatctgtggtttttactttgagggaaatgggaagccaattaagggatctgagcagtgaaatgacaatgatctcacatgtttcatgaggacaactcttgccactgtgtgaattgactggagaagagcaaggatgtaagcgggagaccagtgagaaggctattacagtccaagagagatgcactagggtcataatggtggagtcgagaattggtgatattctggattcattttgaagacagagatgacaagatttgctgatggattggatgtgggatataagagaaaggaattaaagatgacttctaagggttttggaggaataggaattacaaaaatgagttccacatagatcttgccataaatgagcttacaacataggagagacaaggtgtgtacgcaagtgccatatatactacatggcagaaagcactatgctccataatacagtgccaagtacaataaaaaagttctggagatggttgcacaacaatgtgaatgtacttattgccactgaaaaatggttaaaatggtaaatttttatttatttacttatttttatttatttttaatttataaattttaatttataaattttatttatttatttatttatttttatttttatttttttgagacggagtctcgctgtgtcacccaggctgcagtgcagtggcaggatctcggttcactgcaagttctgcctcccaggttcacgccattctcctgcctcaggctcccgagtagctgggactacaggtgcctgccaccacgcccggctaattttttgtatttttagtagagactggggtttcaccgtgttagccaggatggtctcgatctcctgacctcgtgatccgcccgcctcagcctcccaaagtgctgggattacaggcgtgagccacggcgcccggcctatttatttttatttacttatttattttgagacggagtctcgctctgtcacccagggtggagtgcagtggtgcgatctcggcttactgcagcctccaactcccgggttccagagattctccagcctcagcctaccaagtagctgggattacaggcactcaccaccacactcggctaatttttgtatttttagtagagacgggttttcaccatgttggccaggctggtctcgaactactgacttctggtgatccacccgcctcggcctcccaaagtgttaggattacaggcgtgagccaccatgcccagccaaaacagtaaattttatgttatgtacattttaccacaagaaaacaacggtgcttaaaaaaagcaaaaacaaatattagagaagtgccactagagttcagagcatggagagatgaacttcagctaagaaaatcagagaaggctttgtgtacgggcagtcttttttttttttttttttttgagacggagtctcgctgccttccacgggcagtcttttcacataggcagagggagtagtttgaacaaattagcggaaggcaggaaaactgaggataggcggggcacaaggagtagttctgatttgttagaagatagggtagggcacccaaggggagaataaacatgcaactacgagttttaagaaaattctttcctctcctccctccaagttcccttgttgtgaagggaggatcatatcttgtatcacttgatttcatttgaaatgaaatattcagaatccatcatctcaccacattaccctgtaagatcccattttcctgaaacaaaaattcctatgttgatctgacaatcctacaacgcatttgaaataaatccagggtatgaccagcattttatgtacacagacttcctttgtttccggtccatctgctttctttttcctctattaattttcccttcacctcccaatcttaacccccgccattcccccagggtctccctttcttgtcatccctttcatccttcccttcttggaaacagatccgattctaacctcagttaccttattagccgcgtgatactgggatagttatcccctgtgggcctcagtttcctttgtaaaatgggcttattaaacccccaaagacagtgcttatcttacagggttgtcaacattacaacaaagaacacgttatatgcctaacacagtacctgatctatagtaagaactcaacattttcgccccttctcctcctcttttctgtccttgtgcctttcttccactattcctcaaccccagggcccaacaggtaaaaaccgtgggaaaaaccatccttaaggctgaaagaagaaacactggagctgggggcggagactacgaggtgctcactgcgcatgtgcgcgcgctaggtcagcttctcggttccagccgggcgggggggtcgggtgggggtgggggtaggggttgcaagggcctcattttttcttactgcccccatccggttcggggaggtggcgggaccttggcggcgcccggagccggcgtggcgctcatcgagggacgcccggcccaagtggtaagttgaaaaatggcggaggggggaagaaggaggggctttgcagggcaggaggctgacctcccggccgggggtgggagggacacgccggggcccagtggcgcagcccgggctgggagactgacggaccgcgcccggtgtctctttgaggccctgacgtggacacacttcgggtttcacgactccgggtttctccaggggatgggccggccggtagaggcgcgtgagggagacgaagggacttccgtttccttcacctaggctggggccaagccgcagagcggagttggcatttccagattggggctcgggccgcgcctcctccgggaccctccccttggaccgagccgatcgccgcggggcagttcgggccggctgtcctggcgcggtgggtacagcttgtgtaggctttcccctcccccgctttccctccttcccctctcctccctcccctcttcttttcccctccacttccctcgggccggcgctgctggggagggcgggaaggccgcgccagcccatcaggggtggcccggccccggctgcttgcccgggttcctcggactgccgacggcaggcgtgggtgggtgggtgacttcaggcctgcaggattgccttcctaaaccctgtgacacctaaggtaaattgaggcaaagaactttttaaaaaaatatgatcaaagggatttcctccccatgtgataacctgtggcttgtgtggagcagggtggagtgtgtctggagagggcatatgaaactgaaagaataagggccaaagagcttccggaagaggaaattagctggtgattctttccaatctgctttcccagtcacctttccggcatgttctgtaaaacaaaatgtaatttgactttgtttcattattttaactccataacacttaaattgttttcttttcggggaggggagtgtttattctcaaactaagcagtagccctctccaccttcgaaaaaggaacaacgtcaatccaacctttgttaaaaaactccaacctatcagattttaataatctagtagtttgctttcaaatataattatgtcgctagttctgtcacaactatactttgatagtttaatgactcacagaaatttgtaagactggaggttgcagtagtgtttctttcttattcttttttttccccataatatttattatagtcaatgaacagtgttacagacggccatcttagaattataacattttagagttggaagggatcttagtcaaaccctgtccttttacaaaaccagaaaccacggcttaggaagatttcatagcttgctaaaggctatccaactagttagattagaacccatgttatctggcttcttgcccaccactcttactgcgcaattgctccatatcgcctccaagcatgaaaattaaatgtattcaattcaacacacatttctgaagagtataatactttgtaccagtgactgtggtaccactttctatgt

SEQ ID NO: 1367 - DNA, 6000 bp, Homo sapiens
attgtgcaagccacaaaaggtggaaggttattcaggagaattcggaagtcacacagttttaatgtttaaggtttaatgttccttgaccaaggtctgattcaataggtttcttcttgggatgctatgctggaacaatagcaacgatacatatgacatctgcaagaactatcataacatggtttccaacttgatgtccaatgagagtaaacagtaaatttgaggtatcatctatgcttttattaaaataaaaaatggcccttgaatgttgtacttccaaatatcagtagactccgcagcctgaatcaaaatattcccatcactggatggtgagcttctagaattacccagataattttctttagtttcaaatactcaggtaagtatatcaatttgccattatatttcatacatatatacattttatccatttcatcatagtcactaggctcaaaatgtgtaagtccaaaatgtgaaatcctacctttaaattttgtaaagtagaataagaggtcaaatttatcatgatgagttaacatatttgaaggctaggtaatgcctggtatattagaacatgctcagtaattaatttttttaaaaaatcattatttttttacttaaagttattttctgttcaacactatttttcattaagttgtattcacttttagggggcagatgatctatggttcattacagaggtaaaataagaatactgctttgtttctattacccacttgatgtggctcaatatcttatgagtcttttctttatttggtcccagccacaacactgagctaaaatcttcagagaacaatgattttcaagtctgtttcttggttagtagctcctaatgcaaaaagtgcggagcatggtttctcaaaccttatcattattgacattgtggactgaatagttctttcttgtggggactgccctgtgcgtcgtaagatgtttaacagcatccctggcctccactctctagatgccagtagcacctacctgcctatttgtgatacccagaaatgttctccagaaggcataattggtcctagttgaaaaacatgcccttatttcactgccgcctgtattaaagtttggctatttccatctacctacactttagctaagaaccagtcaattcagtaaatatttgtaaacatgggtaaagttaaatatttaatacaggttgagcatccctaatctgaaaatctgaaatctaaaatgctccaaaattggaaactttttgagtgctgacatgatatcacaagtagaaaattccatacctgacacctttgctttctgatggttcaatgtataccaactttgtttcatgtacaaattaaaaatattgtataaaactatcatcaggctatgtatataaggtgtatctgaagcataaacgaatttaatgttcagacttgtgtcccatacccaagatattacgtatatgcaattattccaaactccaaaaacatccaaaatctgaagcacttcttgtcctaagcattttggataagggatactcaacctgaatagagggtatgacaaatgtcaggaaattgaaaccaggtgccaaatgtaaattattaagttttgaggcctcaagaacactgtctaacttgaaattcactaaccttacctaatctgtgtataatgttactcaaaaccttacctaatctgtgtataatcttattttatttatatggttattaagtattcacagccattcagatcacatcaatcaagcaggtaccaaatcctttctgaggtgctatgttacactctacgtgtgaccaaaaagcataagttgtgtctctcctcaagaaacgttttccattaaactacgggaatacactgtaatatattttcagactctgggctgacttttttttttttttttttttggagatggagtctcgctctgtggcccagggcggagtacagtggcatgatctcagctcactgcaacttctgcctcccaggttcaagcaattctcctgcctcagcttccagagtagctgggattacaggcacacaccaccatgtccagctaatttttgtatttttagtagagatggggtttcgccatgttggccaggctggtctcaaactcctgacctcaggtaacctgcccgcctcggcctcccaaagtgctgggaacaggggtgaggcaccacgcctggcctgggctgacaatttgaagtaaaatatttaagtttcctttgtgtgtgtgtgtaacaaaagcgtacttgaatttcttgtcattttatttaagaatttgagaaataatccagttcaaagtggaaaaaaagtttctaatgctcataaaatttgaattgttttcaaatgttgacaccttcacaagatttaatttatagatacacacacacacacagacacagacacacacacacacacacacaggaaaaatcatttaaaagcccacaagcaatcccatgtaaaaactcaagtgatctctatcaattataacaacaactgatgctttatttaatagcagtaaacctaaataaaggctaaaaagctcactaagatctcaaatgcaatgtctttcaggaaatgtctcaatattccaggtctcagcattaagcttttattcttccacatagttacataactctggcccagaatgatgtcagagaaagtcatttctctgatatgcttaatttacttatctatcaaaattatacaactggctcataagtagttgtgaaattaaactagcaggaaagaattttggagactaaataatgaaagatgtaacacacaataaactgaacaatttaaatgttcagtaagggcaatgcctaggggtttaacctgacatcaataaaatatatagtgtatacattatgcacctagtaacctcagtggagaattcaaaagaagttcattcattcattcaacaattatttattgagggcctactacatgccatgaacctagtctctggggatacagcaatggacaaaatgtataaaaagcttgccctcagactcctgccatcctacctgaatcattctcatgtaagagaggctggatctctgccctcaaggacctaatatgggcacacaaaacaaatgaaatatatgaaataagaagaaagaactacagtgtgagcgctgctcacattggaggagtttgaaggagggcttggagcaactaggaagggtcaatggaggtgagatttgagacaggtcttaaatgatggagcttgattcagacccttgcgacttaaaagtgtgatctaaacatcatcaccatgtgagagcttgttagcattgcagaatcttgggcccagtccagacatgggagataaaaatctgcgcttttgagggagcaaaagaaccctcggatttctatggacattaaaagtttaggtggcactgcaggtttccggtcaggctggcaatgttgtgagctgggttggtgggaaatcgagactagattggagcctaacattaggttagaaatagtgaagggctggacttggggaactaggagtaaggaaaatgcaattgtaccttttatcatcattaaacacaaacagaaaccatagagaaagtagtaagtttatcaccagtcagagggacctgcgtctgaattcccagctgtaccacttcttaattgcgtgacatttcggtcaaattatttaacctggttgagcctttttcttcatctgtaaaatgaggggaaatcaataagactccagaaggcccttgtacaggttcagtaaggtattaataacacatagaaagcacttagcagtccctggcacaatgaaaataatatccattaataataacgatattgataagaattatatactattctctgaaaaagatttaaaaggaagaagagaaactatcttttaccactagaggccccccaccgtgtggtgcgtagagacccataacaaatttcaaggtaaggaacttcatcttcattttaaactggcactcgactattacttttttaaaaagtaattaaccccttacgtgttcccaaaggtgccttcataatgaaattcctgttactattattaccagtgttactgtcgctactgttagagtactctcaaaagagcctgtctccctctcctggagtagaacttaaaatggggcggaggcagggagttaccaaaaccactgcagtgtatgctgatttcaataacctgtactgctaacgatccaatctcatttcccaagcctctactatcctcattaatttttctgccgatgtaccatctgttttccaatttccctctgccttacacgtgcagaacttgtggtagagagaagccctagtttggccgttctgcaagggatagcccaggaggtagggggaaccttaagttgaagtcacctgaagcatgtttggggtcagggaactcggaaagcaagagtgtggccacagatctgcccagaggcgcgacccccagctgaggagaccagatggcgggaaaaagcgggggtccaccgactccgcggctatctgtaatcctacccttggccaggccggggagccaagaaagacttccaacactccccaagtttcagctcaagtcgtctccgaggctgcgtgtgccccagcctcgcacgcctccctgcaacgtggccgcatctggggcgccctcataccctcagggtttcccaaactcttccattctcttcccaggcccagccatgtcccaggtctccgggtccccgggttctcctctccgcgtgccgggagagtctccagcttctcagactccagcaaccccagccaaacctcttcgctgcctggagccttggctcccgcgacaccgcccggctgcggggcgggggcagggccaacggcggaaccgcccccaaccgcctcccaggccaggcgagcaggcgggtggctggggcgcctccacctcctcttcctaaagcggcgaggcgcagaggagcggcatcactcgagcccaggtcccagccaccaccactcacagcgctcggcgttcaggaagaggagcagcagcggaggcggctgcttcagcggcgggcgggcgccagaaaggtagactgagtcccagggagctgcgccgctaacagcccacctcctagccccgggctacgcgccgccagcccagtaaccccacttttgtgtgtcctcccaggccccgatcgaaaagcctgggagggccgccgaactacccccggagggaggagccagtccgaacccaaggcgccaccgccgcagaagcggagcgaggcagcattcgcctccatggcccactcgccggtggctgtccaagtgcctgggatgcaggtgaggaagcgcaggccgcccccgccgcccacgtgactgcttgggagcccggtgcgccctcggtgctgggcaccggcgacaagggacggccccagggctcccctgagggcagggccggtcactatggccaggtgacctgggagtagggctggaggtgtttcctggtgtgtaggctaggtagtgctcttcgctgggaaggcgaggcgggactggagcgcgcaactaggtggagattgagggcggttgggggtataaaaataggccagagccacagacacctgcgcctgctgagcttggcacggttggggatgggggggcggaacttaacctgggagagatggaagtgccttggaatttgtggggtataacgcgagtagtgagtgccctacaccccccaccccaaacacacactcaagttggggcggggcaacaccaggggtggcggcggcggcggcttgaattgggctcttcctgtgtgcgtagggctaagagagaggtgacctctttctccctttcggtactgctgcttaagggcaaagttgtagcttgctccccgacctagcccagcccatagtgtggcgtgagaaatgctggttctgttcagagtcactgaggtgatgacttctcagccccctccgtgcctttcccacaagatgactgttacatgtggttaaaggaagcttt

SEQ ID NO: 1368 - DNA, 6000 bp, Homo sapiens
tggaatacctgggcggtggttcagcactggatcttgtaagtattttaaaatagttacacacagatgcaaatgtgtgcatatgcacataccttaattttttaaattgaagattaatggcttttgagcacgctaagtggttgctttagttaatatgttcaaattaaattcttttttcatgacctctaccttatgtaggtacagatgtattgtacgtttgaacatgttgctggcattctaagactatataagaaatgcaaatagcttaataaaataaagtctcccaaattagaaggggatgtgtgtatccattgctgtcaaagtttgacttttgcaagcttatccctgaaaaaactgagttttcttagatttttaaaaaatatgtaattgagataactgtcactaaaagtgttttttatgaactgaatgtttgtgtccccccaaaattcatatgtggaaatcctaacccccaatgtgatggtattaggcggtggggaccttgggacctaattaagtcatgaaggtgagttctcatgaatgagattcgcacccttacaaaagaggccccagagagctctctgactttctttccaccacgagagggtgcagtgagaagaaggccttctggaaaccaggaagagtgcctttaccagactcgaatctgccagccccttgatcttggacttctttcccagtctccagaactgtgagaaatattgtttaagccacccagtctgtggtattctgctatagcacctgaattgactaagatagtggtactagggttctaaacaaggttggcctacagatccagttcttcacagagttctctctgcccctctataggttatttggaaatgtgatggcatttgggttgtcacaatgacttagaagtgctcctgccatttttgtggtcatggatcagaatgctaaaatcctgcagtgtgcaggaaaattcaacccaatgaagatgcatttacacacagaatgcctttgagaaacactggttgttccccaattcagtgtgatcctatcaatgttgagtttctttcccttccttaaaaatctttattaatatgatactatgttttaaaattcagtatgacttatgagaggcaacttagtgtagtagaatgaccactgggctggcctggggtgtttgaggttataggtctggctctgtgcctgtgaaccagacacaaacttcctggacgtaggtgttctataaaacaaagaagttgcactaagttatttctaagttcccttccatctttaatattatattttttttatttgcgtgtttctgccttagaaattatagagtatgctgtttctaagaaagtgttttgattaaaataatcaagtaatattttaattcttatttttttaggtggagatgagttttcctaactgaaagtgattaaatatttttaaaaggctttaaccttgactgccagtaactcaaagcttcaaataattttatgaacagaaatgactataagagattttctttcctttaggcagaaccatatttaaaccattttaaagaaatggtaattaaacttgatggagagcctcatctactactaggaattcatgtcagtttaatcagttgctgaatttggtaatctttccttgtgtctaatctaattcttatatcctaaagcctgagttcattttttttctctcgtctctagtgagagaacaccactgatgtttctttgtgtaataatccttcatgcatatggagtcaggcttcattctcctcttgaagttaaatgatctcatttctatttgtcttgtcacagagtcatattattcaatagttttttcattagctctacaagaagcctctcaattgtttcatgatcctccttccattttttgaatattaagagccctttccaaatttatcagttgtcttatctggttcctcagggtgctcaccatatctcttccccattttggaagcactggcaaagctaggccactctgttcaacaggatcactgatagcaatgttaaacagtgaacactggcctaaccccaaccaatgacccaaatctgtgtcccctattagtagtttggtcagttttatgaaatctccaagttaaatgattgtgagatcttaatctcatcctgctattctgaactctacttaataaaacaaatagccattaataacagtttcaatgaatgaaaaatgttgttagtactgtattggttaagaatcaaaaggcctaggtcataaacccagtgctaacactgactgcctggcaaatattgggcggccctttagcctccttgtgtcttaatttattcacatgttaaatgaagaaattgaatcagtaatctctaattttgtgttcttagctctaaaattcaataatattgtgatttaattataaaactcatttaactagactttacagggagagcagataatgagaaaatgtgctattcctttttcatgtatattcctgtacaaataaatgctatcatttgggggaatctaagacaggattaggtgtagaggaaggctctgctactaagaacaagaggaaataagagggatgtttagcagagagtgtttctcacattaaactggtgcctggtacctaactaatggaataacataagattacaacttgtcatttatgttaacattatacagtgtctaccttgagtcactcccattcttgaaaaacaatttattgtatgtgagcagactttgagtatattgcacatcattttattgagtttattatgctccacttctttccaaaaagaatcgtggtggcttgcaacaaaaacacatataataagatgactagaataaaacatgagccccaagaaaaaagaaacaatatgctaaccataagagagggcataaaatagcagactgcattagggactggctggaagttaaattgtgacaaagatccatgagctcacaaatgtacagtcttcgaaagagtcaaggtccctctcttgcatattcttacttgacaacagaggcaaattacacaaggcaagtacactgccctgggacagagatattatctgttagagacatggcaagttcttcagttatcggagaaaagttcaaatggagaagtctccctgccacagagtctttcttcccatcctcctctagcacccagttaattgagatttcacttttattgaattttaacatgaacctaaaatatagcagataagctcatgaatctttgggatcccctttttgttgtttttacttaaatatttttaaaaacttctgtattaggtaatatactggcttatttatgttacttttacatgtccttcagaatgatagctagtaggtcgtacattaatcttgcccaatcactgaaataaccaaggatatacctcccctggtcttgccaatgtcctgtgatcagatgatactaattactgatcttaagtagtgtgacatttgtcctttagttattttgtagtacctcagaagttcattgccagccatcaacaaaatagtatgccattttcaacctttctagaagactttagaaactattttaatcactactgtttgaatagaaactttggggtggaagttgatagatttgaaagtaagtagataatgttacctaggaaagggacctattgaattacagatatccctggagtatactatatacccagaccacagttaatattagatggtgagaccaaagtatgagttctattttaagctgttaaatttcaacatgaaagtgccctttattcagcataaatatggcattcatgaaagatgaaatacacaaggtgccaaagagctgtggatccctcccagtgtgaggcagagtgggcaatgtttgattttcaccacctcttccctccttccagaagcaaacagaactctacctctgctctgactttagattcccaccctttcctgtaataatattgtacagtccactgtttgtgctttatgaggtaccagaattttaaaataaccatttattttaaagagggattttcagatattccattacaagttctcctgaaacctaatcattgctttccttgtattccagttggaactattggctttggtacagggatggggaaataaagggatatgtgttacatttatttgaaaaacattatccctccatgatttaatttttttttaccatcatagtctgaatagtttaattattatattcttggctaaatttacaatttgagtctcaaaaaggctattctttgcaatattattaaaatacataaatgctgactgatatgatcaaatagttgctgtggaaatcttatggattctctgacctaaaaatcagtttcgtgtcaatatgtagtaactttttcacagcaattgcctgaatttaagtagctgatttctctttttttccatctaaagaacagatagttggttctgtcattacgtaagcatatttgtttcatctttgatgtaaatattcaggaacctcagaatttgaagcctagtatataggtaaaagggctcgtattatctttcattaaattgaatcattaaaaaacctgttcagccctttgactgaactcttttgctttcttccttcacattttacatttttccttccttgtttagatattggtttgataaacagaacggcatcatgtgtctaagtgatttcttcatttcaaaggtaccaattttgaattttatgtttccaaacttttacacatatgtgtatgtgtgtgtgtgtttttccccttaagcttcgagctggtccatttgatgagttccagattgctaccatgctaaaggaaattttaaaaggtctggactatctgcattcagaaaagaaaattcaccgagacataaaaggtatacaaaagtctaatatgaacctgagaaaaatagaagcattctgagcaagctgagtttttttttgcttttctttttttcctcctagctgccaatgtcttgctctcagaacaaggagatgttaaacttgctgattttggagttgctggtcagctgacagatacacagattaaaagaaatacctttgtgggaactccattttggatggctcctgaagttattcaacagtcagcttatgactcaaaagtaaagtattacctgtacaaactgttttgggcttgttaataaattatatatggcacactatcctagttaatacactgccttatttttccttgtttcacaagtgtttcttaagctagagttatgtcatattttgctgcttaatcataaattccctcacagctaactaatatttggaccctattcacttcaatggcttttcatcccacgtggaataaaatcctaagtcctttctgtgacatataaagctctacacaatctggccattatctgcctttccagtcttatctcctaccactctcttctagattattcatccacagtggcctcatggttgttcctcaaacatagcaagtacaccctggcctcaggacctttgcatgcccttccctctgtctgaaaaaaccttcttcccacaatcaggtctttgcttaaatatcacctacgcagggaagtcttccctggccatcttatgtaaatttgcaacacccttccccccatgattcattattctcttactatgctttgttattttcttcacagaagttagcaccgtctggcaccatattatttatttatttattgtctttcttattagaatgtaaaccccttaagagcagggatttttgtctggcttatacactactgaaatcctccattccgagaagggtacctggcacaaagtatggaattcattatgttttacataaatgaattctactaataaaaatttattaacaccacattttcttgagagacaagtactgtatagccattaggttccacagactattttgtggtagtatattggaatggagtttcaaggtgatatacatacatacacatatatatatatatatatatatatatatatatatatatatatta

SEQ ID NO: 1369 - DNA, 6000 bp, Homo sapiens
ttttagatcccacaaataagtgaggacatgtgatgtttgtctttctgtacctggcttatttcacttaacataatgatctctagttccatccatgttgttgcaaatgactgattctcattcttctttatggctgaatagtactccattgtgtatacataccacattttctttatccattcatttgttggtggacagttaggttgcttccaaatcttagctatttgtgaacagtactgcaacaaacataggagcgccgttatctcttccatatactgatttcctttcttttgggtaacatacccagcagtgggattgctggatcatatggtagctcaattttcagtttttcgaggcacctccaaactgtccataatggttgtattaatttacgttcccaccagcagtgtatgagggttcccttttctccacatcctctccagcatttgttattgcctgtccaaaagtttttaattttgatgaagtcaaattcatctcttttgttgcttgtgcttttggtgtcatatctaagaaactcataatcaaatgtcttgaagaatttttttcctgttttctcctaagaataatatagttttacttcttacattaaggtctttgatctattttgagttaatttttgtatatggtaggaggtacgggtccaaattcattcttttgcatatgcacatccagttgtttcagtaacatttgttgaaaagacaacattagccaattcctccattgaactgattaatgtagctacgtagtaagttttaaaagcgggtccttcaactttgttcttcattttcaaaatcactttggccattctggatccctcgcatgtccatatgaattttaggatcagcttgtcaatttctacaaaaaaggccagctgagattttgatagtgattgtgttcaatctatagattgctttggagagtgttgccatcttaataatattaaatgtttgaatccatgaacatgggatgtatttccacttatttgtcttatgggatgtatttccacttatttgtctttagtttcattcagcaatattatgtacttttcagtgtacatgtcttatacctgcttggttcaatttattccaaaggattttattatttttggtgttataaaaaaataggattgttttcttgatttggtatttaaattgttcactgcaagtgtatagaaatataattatttttttgagacaaggtcttactctgttgcccaggctggagtgcagtggtgtgattacagctcactgcagtctcaaactcctgggctcaggtgattgtcctacctcagccacctgagtagctgtgaccacaggtgtggagcaccatgcttggctaatttttgtattttttatagatacagggtttcacaatgtagcccaggctggtctcgagctcctgagctcaagtgatccacctgtctttggcctcccaaagtgctgggattacaggtgtgagccacggtgcctgccctattgattttttaatattcatcttgtattcttcacttccaagaacttattcattagtttgaatagttttttagtggattcccatatggttttcttatacaagagtatgccattggtgaatagagatagttttacttcttcctttacaatctggatgccttttatttcattttcttccctaatttttctggctggaacctctggtacaatgtttaatagaagtgatgagagcagacagtctttcaccattgagtacgatgttagatgtgggtttttggtaaatggcctttatcagattgaggtttctttatattctgagtttgttataagtgttttgttttgttttttatcatgaaaagagttggattttgtcaaatgctttttctacgtctgttaaaatgatcactggtttttgtttgttattatatttgtatgctgtattacatcaattgattttcatatattaaatcaatcttgcattcctgggataaaacccagtagatcatgttatatatgcacatagaaatttgtgcacatcagtgattattcttgaaggatctttcttcacagaaatgggattactgtgtaaaattgtgatagataatgtcaaattgcccttcaaaaatgttataccaagttacactctcagcaatagtgtaaacagtgtcttcttcctgtccctggcaacactggatattatttgtctttaatgtttgctaaactgatggatgaaaatggcatttcatttattgctgtaatttgtatttcatgattactaatgagtttggacatcctcttatccctttatagtctatttgtatttcctttttgtgaaccaaatatatctttcttactttcttacagaatggagaaggcagggaaaatactcaggtcccaagtgaagtttccagaatatatggaagaatcctcctgtctaggtagagggtcactgatgtctctcaacaacacaagttctagcaatggcagttttatttttgtgttgcccctgaagttgctgagagttggggacacctacaattcttccgatcagtcaagaatggcctgggtagtacctctttgattgcattgtcctggctacaactacatgaccgactggtctctgaaagctctaaacctatggttttcctgttagccaaccctttcctctgccttatccccagaaggtaatctgcctttgtcctcttccaccattactaccaacccattgccagggacaccctaccatctcctattctgctcctgagccaagtttattatttatttatttatttttatttatttttgagatggagtctcgctctgtcacccagctggagtgcagtggcgtgatctaggctcactgcagcctccacctcccgggttaaagtgattcttgtgcctcagcctcccaagtagctgggattacaggtgcccgccatcatgccccgcaaatttttgtatttttagtagagacagggtttcgccctgttggccaggctggtctcgaattcctgacctcaagtgatccacctgcatctgcctcccaaagtgctgggattataggcaggagccaccgcacccagccccaagtttatttttttttaaagatattttattctggaaggatttcactgaatgtatatgagattcaattagtacttatttcactttctttcttcctccttccctctcttcctcctctctttccccctctcttactctctctccctctctttctccccctctctctttctttctttccagtaccagctggtagcagtatgtttttttctctgcccccaccccctcattccctcctgtctccctgagtcactccatctgccttgtcaccggaacagcaggggtgccctccccaaagtgaggcttgtgggatggacgatttgccatttcccaggggctgctctgcagggaagcagttctgaaagtaaggcagctctactaatgatcatgagtcaagactaaatatctagcagcgcggtgcctcctgggaggagttaggcacaaggcccggcctaaccactacaattaccagtagttgtaacgggtatcagcagatcttgcttcaagccctgaccctgccacttgtgtgaagtcaggatctcctttcccaggcctcagttgagtcatctgtaaaatgaggagactagagtaggggttgggtaatgtctaatggttgtaatgtctgtttttaacttgcccatttccatcagtttccgctaggcaaagctttgcatatttagctgctcagttggaactagtaggaagaccaaagaggattttggcaagttcttttcttctgttgtgcaaatctgacatgcttaatggaatttccaagagttacattaaatgtcacccatgagtctggctatcctaatgttttacagattgcatcgtatttctgtaaaaattagacattgaataagattttaaatatttcccatctatcatgaacattttcgttctctctcaaagagactatttgatttggggcctgttatcagagaggccgggaagggcatctaggatagttggaggaagggtggtatgtgaagggcctctggagagccaacgcttctcgggtgtctcagcggctcaccatagagtttgggggttctgagttgcatctgggggtgagggaggaagcaggccaccagaaagggctagtccatgagtccgggaatcccgcccgaagctctggcagtgacccgcaacatgccaggcaccggcagccctcgggtaggggctgaagcgggcggcagcagcatgcgcagtgtggccgccgcgggtacaccgcggcttttgctgctgccacagctaccagggctgctgctgctgctgctgctgctgctgctgctctgcctgcgccgctgtcacttccagttcctacttctgcgatccaggtccgggtcactgcttacccgctgctggcccagtgcctccaggccgctttccctccgctgctcggctccggctgcgggcaggaggggaccggcgcgggtagctgagcgtggtctggagaagcttcgcgggctggctcccccggcagtcgctcccctccactcgccaccccgcgcaccctcgcccggctcgcagccagcgcacccagcggggcgcgcctccggcacccccagttcggccccgcgatcctccgcccgccgagcggcacggctatggcaacaagaacttgaggacaagactctgacttccctttagattaaaaaacaatccctgggctggagaggttgcgggcgcggcacagagtttggagacgggcgccccctcctcgcccgcgtccaggcgcaaagttgcagccgcccctccccgctggggcgagcctagcccagctctccagtttcgccctggtggcggccgcgctcagggcagggtcccagctccggctgggttgatctgttcccgcagccttggcacaggcttgcccgcccgctcgccggccccgtgactcgggagggcgaacggcttccaggaggcggcggcggcgcggctggagtgagggagcagctggaggacaggcgggcagcggccgagccaggtgacctgcctgggggcaaaagggtcaggggaaggggagcgcgcgagggcccgggggtgggtgccgaaggaccccctttggagaggaaccgcccttcttccccactgccgtggctcgcagccccagctgcggggtccgttctctgccagggcctcacagttcgctgagatccagggtgccgggaagggggagatgagggccaaggacgcagagcgaggacgcgccaaacttaggggcgagttgtccagctctggccgcaaggtttgcatccgactggattctttccttcccccagaaccagagcaggagtcaacagtaccatttttaatactactgtgatgccctcccaaccccgagcatccatacatttggagatgttttctgcattaagtacagagatctgtcgcaggaatggtttgtagatggaaaagacctgtattctacaaggtgttccaaagtgcctgtagttaattacaagttttcattttccagtcatttaggaacccaacaggtatttgagctatttcgtttcttagctctgcagcggagagccctcaagtttatctctgcctcttcaaaggtcttatattttcatttttgatttgttattgtttttggatagaggggtaactcacatgatatttttcccttttcttaatgtgtagtgggagtaaaaatacagtaaatgaatatattttcctctgcaattatgtatattttggtcaataaaaactttgcataacccccccccaaaaaaaacctcacaaaataggataaatttcagtttatgctctgtaaagtattaataattttaaaggcaagattcaaaggttcaaactgtttttttttaaacttatatttgcctggaaaactcatagtgtccttggacttcctatcttaattttgacattgaccatggtaagaggatctctgatgaca

SEQ ID NO: 1370 - DNA, 6000 bp, Homo sapiens
atagctgttttctgtggtgttattactcggtaatgttctctgcattgttgtgtgcaaaattattcttgtaaggtatatataggagccatattgaggcactcctagaacccagaaagaagactaataaaatcaatacataaggaatgagaccgaaagctgagctggggagcacgaagcagccaagaagactcatcatcttgtctgaagcttccaggtagctggaagacagacttaaacataaatatttgcaaatgtccctggatagagtctctctcgggcccaaagtgcctggcacagtgcctggcataggacatacctaatagatttttgttgaccctataaaactgtagatgtacaaaaagcaagaagagcagggcttgactgttgcttagaacacaatattatttatctaaagaaagcataccggcttgaaattgtcagcttggaaatgcagaaaaatggagccgcagatgcagcaccgtaccgacaaattgagtactgggctctggggcatggtgacgacattaaaaaagctgttgccttctggtcctctgggtggccagtcggcttctccaagtaacccccatctgtgtgttctcatatggctacaatgtcttagggtctttagaggatcacacatttagtaactgatcaggaaagtctgctgagacatctgggaacaaagtgctctcggaagcaccccaccaccttcttgatagtgtcctttgtaacacaattttttttgttgttgttgtctgtttgtttgagacggagtcttgctctgtctcccaggctggagtgcagtggcacaatcttggctcacggcaactttggcctcttgggttcaagtgattctcatgcctcagcctcccaagtagctgggattacaggtgcctgccactatgcctggctaatttttgtatttttaagtagagacggggttttgccatattgtccagcctctcctggcctcaagtgatccacctgcctcagcctcccaaaaggctgggattacaggcgtaagccactgtgcctggcccacaaaaatttattaattagacatttttgttttttactttcaatttttgtgggtacatagcaggtgtatatatttgtggggtacatgaaatgttgtgatacaggcatgcaatgtgtaataatcccatcatggagagtggggtatccataccctcaagcatttatcctttgtgttacaaacaattcaattacactctttaagttattttaataagtacaattattattgactatagtcaccctgttgtgctatcaaatgggccttattcattctttcaattttttttgtacccattaaccattcctgcctccttccccaatatacttctcagcctctggtaacctgtcttctactctctatgcccattagttcaattgtttttatttttagatcccacaaataagtgaggacatgtgatgtttgtctttctgtacctggcttatttcacttaacataatgatctctagttccatccatgttgttgcaaatgactgattctcattcttctttatggctgaatagtactccattgtgtatacataccacattttctttatccattcatttgttggtggacagttaggttgcttccaaatcttagctatttgtgaacagtactgcaacaaacataggagcgccgttatctcttccatatactgatttcctttcttttgggtaacatacccagcagtgggattgctggatcatatggtagctcaattttcagtttttcgaggcacctccaaactgtccataatggttgtattaatttacgttcccaccagcagtgtatgagggttcccttttctccacatcctctccagcatttgttattgcctgtccaaaagtttttaattttgatgaagtcaaattcatctcttttgttgcttgtgcttttggtgtcatatctaagaaactcataatcaaatgtcttgaagaatttttttcctgttttctcctaagaataatatagttttacttcttacattaaggtctttgatctattttgagttaatttttgtatatggtaggaggtacgggtccaaattcattcttttgcatatgcacatccagttgtttcagtaacatttgttgaaaagacaacattagccaattcctccattgaactgattaatgtagctacgtagtaagttttaaaagcgggtccttcaactttgttcttcattttcaaaatcactttggccattctggatccctcgcatgtccatatgaattttaggatcagcttgtcaatttctacaaaaaaggccagctgagattttgatagtgattgtgttcaatctatagattgctttggagagtgttgccatcttaataatattaaatgtttgaatccatgaacatgggatgtatttccacttatttgtcttatgggatgtatttccacttatttgtctttagtttcattcagcaatattatgtacttttcagtgtacatgtcttatacctgcttggttcaatttattccaaaggattttattatttttggtgttataaaaaaataggattgttttcttgatttggtatttaaattgttcactgcaagtgtatagaaatataattatttttttgagacaaggtcttactctgttgcccaggctggagtgcagtggtgtgattacagctcactgcagtctcaaactcctgggctcaggtgattgtcctacctcagccacctgagtagctgtgaccacaggtgtggagcaccatgcttggctaatttttgtattttttatagatacagggtttcacaatgtagcccaggctggtctcgagctcctgagctcaagtgatccacctgtctttggcctcccaaagtgctgggattacaggtgtgagccacggtgcctgccctattgattttttaatattcatcttgtattcttcacttccaagaacttattcattagtttgaatagttttttagtggattcccatatggttttcttatacaagagtatgccattggtgaatagagatagttttacttcttcctttacaatctggatgccttttatttcattttcttccctaatttttctggctggaacctctggtacaatgtttaatagaagtgatgagagcagacagtctttcaccattgagtacgatgttagatgtgggtttttggtaaatggcctttatcagattgaggtttctttatattctgagtttgttataagtgttttgttttgttttttatcatgaaaagagttggattttgtcaaatgctttttctacgtctgttaaaatgatcactggtttttgtttgttattatatttgtatgctgtattacatcaattgattttcatatattaaatcaatcttgcattcctgggataaaacccagtagatcatgttatatatgcacatagaaatttgtgcacatcagtgattattcttgaaggatctttcttcacagaaatgggattactgtgtaaaattgtgatagataatgtcaaattgcccttcaaaaatgttataccaagttacactctcagcaatagtgtaaacagtgtcttcttcctgtccctggcaacactggatattatttgtctttaatgtttgctaaactgatggatgaaaatggcatttcatttattgctgtaatttgtatttcatgattactaatgagtttggacatcctcttatccctttatagtctatttgtatttcctttttgtgaaccaaatatatctttcttactttcttacagaatggagaaggcagggaaaatactcaggtcccaagtgaagtttccagaatatatggaagaatcctcctgtctaggtagagggtcactgatgtctctcaacaacacaagttctagcaatggcagttttatttttgtgttgcccctgaagttgctgagagttggggacacctacaattcttccgatcagtcaagaatggcctgggtagtacctctttgattgcattgtcctggctacaactacatgaccgactggtctctgaaagctctaaacctatggttttcctgttagccaaccctttcctctgccttatccccagaaggtaatctgcctttgtcctcttccaccattactaccaacccattgccagggacaccctaccatctcctattctgctcctgagccaagtttattatttatttatttatttttatttatttttgagatggagtctcgctctgtcacccagctggagtgcagtggcgtgatctaggctcactgcagcctccacctcccgggttaaagtgattcttgtgcctcagcctcccaagtagctgggattacaggtgcccgccatcatgccccgcaaatttttgtatttttagtagagacagggtttcgccctgttggccaggctggtctcgaattcctgacctcaagtgatccacctgcatctgcctcccaaagtgctgggattataggcaggagccaccgcacccagccccaagtttatttttttttaaagatattttattctggaaggatttcactgaatgtatatgagattcaattagtacttatttcactttctttcttcctccttccctctcttcctcctctctttccccctctcttactctctctccctctctttctccccctctctctttctttctttccagtaccagctggtagcagtatgtttttttctctgcccccaccccctcattccctcctgtctccctgagtcactccatctgccttgtcaccggaacagcaggggtgccctccccaaagtgaggcttgtgggatggacgatttgccatttcccaggggctgctctgcagggaagcagttctgaaagtaaggcagctctactaatgatcatgagtcaagactaaatatctagcagcgcggtgcctcctgggaggagttaggcacaaggcccggcctaaccactacaattaccagtagttgtaacgggtatcagcagatcttgcttcaagccctgaccctgccacttgtgtgaagtcaggatctcctttcccaggcctcagttgagtcatctgtaaaatgaggagactagagtaggggttgggtaatgtctaatggttgtaatgtctgtttttaacttgcccatttccatcagtttccgctaggcaaagctttgcatatttagctgctcagttggaactagtaggaagaccaaagaggattttggcaagttcttttcttctgttgtgcaaatctgacatgcttaatggaatttccaagagttacattaaatgtcacccatgagtctggctatcctaatgttttacagattgcatcgtatttctgtaaaaattagacattgaataagattttaaatatttcccatctatcatgaacattttcgttctctctcaaagagactatttgatttggggcctgttatcagagaggccgggaagggcatctaggatagttggaggaagggtggtatgtgaagggcctctggagagccaacgcttctcgggtgtctcagcggctcaccatagagtttgggggttctgagttgcatctgggggtgagggaggaagcaggccaccagaaagggctagtccatgagtccgggaatcccgcccgaagctctggcagtgacccgcaacatgccaggcaccggcagccctcgggtaggggctgaagcgggcggcagcagcatgcgcagtgtggccgccgcgggtacaccgcggcttttgctgctgccacagctaccagggctgctgctgctgctgctgctgctgctgctgctctgcctgcgccgctgtcacttccagttcctacttctgcgatccaggtccgggtcactgcttacccgctgctggcccagtgcctccaggccgctttccctccgctgctcggctccggctgcgggcaggaggggaccggcgcgggtagctgagcgtggtctggagaagcttcgcgggctggctcccccggcagtcgctcccctccactcgcca

SEQ ID NO: 1371 - DNA, 6000 bp, Homo sapiens
aaatcataccctgcttgtgggaatgtaaatttgtataatcattttagaaaaaaaaagatttgcagatacctatgaggtcaaggaattgtagtgggagtaacaagcaagctggaaagatggtaggttgtttagaaaatataatgttgggtcgggcacagtggctcatgcctgtgatcccagcactttgggaggctgagtcgggtggatcacaaagtcaggagttcgagaccagcttgaccaacacggtgaaaccccgtctctaccaaaaaggcaaaaaaaattggccaggcctggtggtgcgcgcctgtggtcccagctgctcaggaggctggggcaggagaatcgcttgaacctgggaggtggaggttgcagtgagccaagatggcgccactgcactccagcctgggtgacagagcgagactctgtctcgaaaaaaaaaaaaaaaaaaaaaactaatgttggaattcatgacttaggagacagagaaatttgtgtgataaaaaagtacaaggtgtaaccttccaagaggttagctaaagtggagaggaagtatacatttaagataacaaggtgtatcagttggtgtccaatcagaacatagacactacatagtatttttttttttttcttgagatggagtctggctcttgtcgcccaggctggagtgcaatggcacgatctcagctcactgcaaactctgactcccaggttcaagcgattctcctgcctcagcctccagagtagctgggattacagatgcccgccaccatgcctggctaatttttgtatttttattagagactgggtttcaccatgttggccagactggtctcaaactcctgacctcaggtgatttgcccaccttggcctcccaaagtactgggattacaggtgtgaaccaccgtgcccagcctactacatagtaattttaacaagaagagtttaacataaagaattaacaataacaggggattggagtgttgaagaattggttagtaataaataaaggaaactctaaaaagtatgggatagcagatataaatagcagacaatataaaaataatatgtaatggccgatacctctagagctgtgataaccctcctctccacccacggtcgagatccaggccttattggagaagttgctctggtgctgagttggtggaacttgttggatgtacattctctggaacttgctgaaatatacccctctacggtgctggttcacatggaaggtgtctgtctcatcagagattctttgctgcctaaacactcaagggtagtgcctggggaggttgctacctactgtttgttgggaaaaccagtgctgcagaaggtgggcaataggaaagctgggagctcagcaggagcttgtggagtgagcgcacagaaaacaggaagtaaaaccccttcttcctgcaatgtctctccaccactgcctactgataaaactttgtatcatgccagctggcaaagtcagaaatatttcaaggtcccaggtccatttcacagaataggcataaaggggaaatgagaggtaataaattgattacaggttgagaagttcaaggaactgagaggtcttgatgttggattgttgttcttgtggatattgaaatgacccaagtgttggcagaaattagagtggtgtagaaggttagagaccaataaactcatttctctaagtgtgaccttggtctatctgcatcagaatcaagtgggatactttgataacacaaattcctttttcccactgcagatcttctgaactggagtatctgggaagagagctcccaaatattcttttttagtaagtgccttagtagatttgaaatgaaagagaatcggttagtaacattttaaacacacaaaactaaatagtaaaacaggtaccagtgtacccagcattcagtcttaacaaatgttcacatttgccttatttcctgaagatcttttgatttttcatgaaatgttacctattttagcttaagttccactctcaccttcctttctcctttatgcctcacaggagatgatcatatgaacattgttttttgtcaattcctgctttaggcaatagagagcctttgagggtttttgaacaggggtattaacactagaggtgtttttggaaaatcaacccaaatgtgccctgttagagagttcattaggatgagaggatggaggtggaaagcccttgaagaggcaggttcagtggcccagagggtgtggtactgaggatctgaggtagggtgagagatctttgcttttttttctcatgctcttgtgtgaagcctgctctttgtgttgctgtgacccccagtctttgaattccccctcttcccctattccctcagttcatcagctcctttctagcttcatttgagtccctaaccagcctgggtttcatgggtacccatttcacctatatgcttgccactgccctggaattccttgctttgttgacattttaccacaccaactgtaacttccaatctttatacaaatagaactggttcttttgccttgaggcagtggccttgccattctgatatactttattactcatagtaatatttgctatagtgagtgtccaaaatgaggcagagttttatccagatgaccttggtgaactcaagactgttttggaggaggctgggttcacaaaacttactcaggctttgttcttcatcagaagatgtaagtgatacctcaataatactgccagattttgtttgtctgtagagtaaaattttgatgagcagttgtgaaaactgttcagatgacatataaaaatgtgtttaagttcgtcagatttgggaattttatttatcaacaaatgtattctgtttttatttccattacatagatttggccatgggtcaacgtcaatgaaaacttttgattgattatacttattttgcttaagtcacaagtacatcaagcaaaccttgttatagaactatggacagacacaataacatgaatgagtatgaaaatgatgatgttgagttaagaagccagaaaaaagatagtaccatactgtgtacttccatttatataagattcttgaaaatgcaaactaatctatagacactgaaaatagattggtggttgcctggcatttggaggcaaagaggaaagaaagaattgaaagggcacgaggacaattttgggggtgatggaaaggcttatctggattgcatttgtgtgattgtatcaaagatgtatgtatatgtcaaaattcattaaatcatatatatgcagttccttatgtgtcaattacagcttaataaaatggtaaaaatcattaacaagaaaaaatgtttgttttaagccatttaaaccaaccaacaaacaaaaaatccttgctataatcagttactgtctatatcagggacaccatctgaatacattcatttattcattcagcattttttaacatctactgtgtatacctggcagtctgctggtaacacagtgttaaataaaaaaaaacaagaccccgagtttaggaagtttacattcttgtggaggagtcagatcatcagatcaacaagtgataatagtaaagtgtgacaagtgtcctgacagagcaagaaagggcagctttgaaaatgtttagtagggttatctaagctgattctttggtagtagatgcctgaagctgtgttgaaaagaattctgaggcttagtaggaaagagctatacatgatctgatgtctcccatgcacgaggagaggtaatcatggtaagtgccacacatttgccaacatagggttatactattaaagttggccttatcataaatttcccaatagtatgcctatttcaagtggttctgaaaatgtttgagaatgatgaagatctcttgttatagacagtttttttttcagagcagtattttaagtgcaaagtgtttttttgttgttgttgttgttgggaaaataagaatcttccatattgtagtgtagacagaggacaagtgctcttttgttctcaaacattctattttttcaagtgtattttacccacttatgtgactgagtctgagcctttgctaagggtactgcagctggattatgtagtggaaccaggtccagaaaaagaattgctaaagaatgcaagtaaacaggatgtcagatgttatccttagcctatttccctaaacatagctttttggctgcaaagtaaaatgccattcttctagcttctgcttatacacagtgatggctgacagcaggcataatcttcgtttgcttggcacgttgtcaccatgcaactcaacgtgttttgcaaggaatgatcgtgacacaccatctctgggagatactatgaggacatccggctatttcttggaagaattttctgtctaccttctttgagccctgttgtgccagcacatctccccatgaggctcagatctgtctgacctaagagccagttggcatcgtcctcctaacagaagccagattttcactggggctagactatttattgacagtgttttcccagactggcccatgagtgtctcatttccaaggtcccctgaagtgctggctcacctctgtttcccaaagcacttgcttgcttgtctctcctccctccccagcatccttttcactttcttcccttataacttcttgcactctgtgtgcgtgtgtgtgtatgcgtgtgtgcatgtgcgtttcttctttttttttatcctaacgaatttgttttgcaggttttgaaaaggaaaaaccagcgttatccaggattgttaaattaattcttatctgtttccacatcttggaccgtgatctctgtggttttaaaatcccatattttgagtgggttccgctgttgtttaagaaaagttgctttaaacctttgctctgcaagcacccgaagagaactcataaaaaggaagacaacagcagatgcaatcgcggatgtggcttagtccttgcagctgccccagagtgctgtttggagtgtaccgtcctcagtaatgaatccagaagaacaaatcgtgacatggcttatatctttgggagttttagagtcccctaaaaagaccatctgtgatccggaggagtttttaaagtcctcgctgaaaaatggggtagttctgtgcaaactgatcaacagactcatgcctggctctgtggaaaaggtaagggaaatttgcagtctctttgggattgcttatcaccagagagcagcaatcatgtaactcttgagatttttctatttcccaggccatgggaatctcctactttaatatttttctaagagttagacattctttcttactgtttttgtagtttgaaaatgtaagaaaatgaaacgttattctttagtaattggcccccaaattgtagtatagggaaaacctgtgacaccactggcaacaagggacaaggagaacactcatatcacaagcttgctctatcatggagatgcatgttacatctccttgtgtaccgaggacatgttttgaacttggggtacttatgagtctgtggaaaaatagaatgatttataacagatcttggtggtgtttattggcagtttgattaaaatcagtgtagatttccttttagaaaaatccattgaaggagagactatatagcaactaggaaaaaaataattcaaaatgtcacataaagtttgtaaaagcaatagaaaccagatatatgtttcgaatgcaatgtgcgttcaaagtgaaactaactttactctctttaaaacaattcaagatttttaatagctggaaatccacgatcacgagaatagataatttctaaagtaggcactttaagtaagcttaaaggtacaattttacatttactttcttaaggtcatcatggactgtgagcatagcacttttgccttcatgagccagtttgtatttttattgagcaaataaatttacttataatttcttaaacttgagaaagagtgattaaatagtgataaaatgtaaagaagtgtggtcaaatgtagaggggaaat

SEQ ID NO: 1372 - DNA, 6000 bp, Homo sapiens
cgaagctgcatattaggcttggaaacccaaattctacatttattttacgcaacagtgagataaagtattttatttttaaaaatcaagaccctctgttctttaaaatacacataaaatgaaaaacaaagatataagaagatatttgcaaacacacataaatgacataaatttcgtatctataatatataacaaactttcacaaaccaataacaaaaagacaaacaacccaatagaaaaatgggcagtaggaaggagtatctcacagaagaggaaacatatatggccaataagcatattaaatgctcaacctcattagtaatcatagaaatataaatttcatacccatgaaataacaaaattttaagtctgaaatatcaagtcttacctatgacatggagcaatggaaaatcataccctgcttgtgggaatgtaaatttgtataatcattttagaaaaaaaaagatttgcagatacctatgaggtcaaggaattgtagtgggagtaacaagcaagctggaaagatggtaggttgtttagaaaatataatgttgggtcgggcacagtggctcatgcctgtgatcccagcactttgggaggctgagtcgggtggatcacaaagtcaggagttcgagaccagcttgaccaacacggtgaaaccccgtctctaccaaaaaggcaaaaaaaattggccaggcctggtggtgcgcgcctgtggtcccagctgctcaggaggctggggcaggagaatcgcttgaacctgggaggtggaggttgcagtgagccaagatggcgccactgcactccagcctgggtgacagagcgagactctgtctcgaaaaaaaaaaaaaaaaaaaaaactaatgttggaattcatgacttaggagacagagaaatttgtgtgataaaaaagtacaaggtgtaaccttccaagaggttagctaaagtggagaggaagtatacatttaagataacaaggtgtatcagttggtgtccaatcagaacatagacactacatagtatttttttttttttcttgagatggagtctggctcttgtcgcccaggctggagtgcaatggcacgatctcagctcactgcaaactctgactcccaggttcaagcgattctcctgcctcagcctccagagtagctgggattacagatgcccgccaccatgcctggctaatttttgtatttttattagagactgggtttcaccatgttggccagactggtctcaaactcctgacctcaggtgatttgcccaccttggcctcccaaagtactgggattacaggtgtgaaccaccgtgcccagcctactacatagtaattttaacaagaagagtttaacataaagaattaacaataacaggggattggagtgttgaagaattggttagtaataaataaaggaaactctaaaaagtatgggatagcagatataaatagcagacaatataaaaataatatgtaatggccgatacctctagagctgtgataaccctcctctccacccacggtcgagatccaggccttattggagaagttgctctggtgctgagttggtggaacttgttggatgtacattctctggaacttgctgaaatatacccctctacggtgctggttcacatggaaggtgtctgtctcatcagagattctttgctgcctaaacactcaagggtagtgcctggggaggttgctacctactgtttgttgggaaaaccagtgctgcagaaggtgggcaataggaaagctgggagctcagcaggagcttgtggagtgagcgcacagaaaacaggaagtaaaaccccttcttcctgcaatgtctctccaccactgcctactgataaaactttgtatcatgccagctggcaaagtcagaaatatttcaaggtcccaggtccatttcacagaataggcataaaggggaaatgagaggtaataaattgattacaggttgagaagttcaaggaactgagaggtcttgatgttggattgttgttcttgtggatattgaaatgacccaagtgttggcagaaattagagtggtgtagaaggttagagaccaataaactcatttctctaagtgtgaccttggtctatctgcatcagaatcaagtgggatactttgataacacaaattcctttttcccactgcagatcttctgaactggagtatctgggaagagagctcccaaatattcttttttagtaagtgccttagtagatttgaaatgaaagagaatcggttagtaacattttaaacacacaaaactaaatagtaaaacaggtaccagtgtacccagcattcagtcttaacaaatgttcacatttgccttatttcctgaagatcttttgatttttcatgaaatgttacctattttagcttaagttccactctcaccttcctttctcctttatgcctcacaggagatgatcatatgaacattgttttttgtcaattcctgctttaggcaatagagagcctttgagggtttttgaacaggggtattaacactagaggtgtttttggaaaatcaacccaaatgtgccctgttagagagttcattaggatgagaggatggaggtggaaagcccttgaagaggcaggttcagtggcccagagggtgtggtactgaggatctgaggtagggtgagagatctttgcttttttttctcatgctcttgtgtgaagcctgctctttgtgttgctgtgacccccagtctttgaattccccctcttcccctattccctcagttcatcagctcctttctagcttcatttgagtccctaaccagcctgggtttcatgggtacccatttcacctatatgcttgccactgccctggaattccttgctttgttgacattttaccacaccaactgtaacttccaatctttatacaaatagaactggttcttttgccttgaggcagtggccttgccattctgatatactttattactcatagtaatatttgctatagtgagtgtccaaaatgaggcagagttttatccagatgaccttggtgaactcaagactgttttggaggaggctgggttcacaaaacttactcaggctttgttcttcatcagaagatgtaagtgatacctcaataatactgccagattttgtttgtctgtagagtaaaattttgatgagcagttgtgaaaactgttcagatgacatataaaaatgtgtttaagttcgtcagatttgggaattttatttatcaacaaatgtattctgtttttatttccattacatagatttggccatgggtcaacgtcaatgaaaacttttgattgattatacttattttgcttaagtcacaagtacatcaagcaaaccttgttatagaactatggacagacacaataacatgaatgagtatgaaaatgatgatgttgagttaagaagccagaaaaaagatagtaccatactgtgtacttccatttatataagattcttgaaaatgcaaactaatctatagacactgaaaatagattggtggttgcctggcatttggaggcaaagaggaaagaaagaattgaaagggcacgaggacaattttgggggtgatggaaaggcttatctggattgcatttgtgtgattgtatcaaagatgtatgtatatgtcaaaattcattaaatcatatatatgcagttccttatgtgtcaattacagcttaataaaatggtaaaaatcattaacaagaaaaaatgtttgttttaagccatttaaaccaaccaacaaacaaaaaatccttgctataatcagttactgtctatatcagggacaccatctgaatacattcatttattcattcagcattttttaacatctactgtgtatacctggcagtctgctggtaacacagtgttaaataaaaaaaaacaagaccccgagtttaggaagtttacattcttgtggaggagtcagatcatcagatcaacaagtgataatagtaaagtgtgacaagtgtcctgacagagcaagaaagggcagctttgaaaatgtttagtagggttatctaagctgattctttggtagtagatgcctgaagctgtgttgaaaagaattctgaggcttagtaggaaagagctatacatgatctgatgtctcccatgcacgaggagaggtaatcatggtaagtgccacacatttgccaacatagggttatactattaaagttggccttatcataaatttcccaatagtatgcctatttcaagtggttctgaaaatgtttgagaatgatgaagatctcttgttatagacagtttttttttcagagcagtattttaagtgcaaagtgtttttttgttgttgttgttgttgggaaaataagaatcttccatattgtagtgtagacagaggacaagtgctcttttgttctcaaacattctattttttcaagtgtattttacccacttatgtgactgagtctgagcctttgctaagggtactgcagctggattatgtagtggaaccaggtccagaaaaagaattgctaaagaatgcaagtaaacaggatgtcagatgttatccttagcctatttccctaaacatagctttttggctgcaaagtaaaatgccattcttctagcttctgcttatacacagtgatggctgacagcaggcataatcttcgtttgcttggcacgttgtcaccatgcaactcaacgtgttttgcaaggaatgatcgtgacacaccatctctgggagatactatgaggacatccggctatttcttggaagaattttctgtctaccttctttgagccctgttgtgccagcacatctccccatgaggctcagatctgtctgacctaagagccagttggcatcgtcctcctaacagaagccagattttcactggggctagactatttattgacagtgttttcccagactggcccatgagtgtctcatttccaaggtcccctgaagtgctggctcacctctgtttcccaaagcacttgcttgcttgtctctcctccctccccagcatccttttcactttcttcccttataacttcttgcactctgtgtgcgtgtgtgtgtatgcgtgtgtgcatgtgcgtttcttctttttttttatcctaacgaatttgttttgcaggttttgaaaaggaaaaaccagcgttatccaggattgttaaattaattcttatctgtttccacatcttggaccgtgatctctgtggttttaaaatcccatattttgagtgggttccgctgttgtttaagaaaagttgctttaaacctttgctctgcaagcacccgaagagaactcataaaaaggaagacaacagcagatgcaatcgcggatgtggcttagtccttgcagctgccccagagtgctgtttggagtgtaccgtcctcagtaatgaatccagaagaacaaatcgtgacatggcttatatctttgggagttttagagtcccctaaaaagaccatctgtgatccggaggagtttttaaagtcctcgctgaaaaatggggtagttctgtgcaaactgatcaacagactcatgcctggctctgtggaaaaggtaagggaaatttgcagtctctttgggattgcttatcaccagagagcagcaatcatgtaactcttgagatttttctatttcccaggccatgggaatctcctactttaatatttttctaagagttagacattctttcttactgtttttgtagtttgaaaatgtaagaaaatgaaacgttattctttagtaattggcccccaaattgtagtatagggaaaacctgtgacaccactggcaacaagggacaaggagaacactcatatcacaagcttgctctatcatggagatgcatgttacatctccttgtgtaccgaggacatgttttgaacttggggtacttatgagtctgtggaaaaatagaatgatttataacagatcttggtggtgtttattggcagtttgattaaaatcagtgtagatttccttttagaaaaatc

SEQ ID NO: 1373 - DNA, 6000 bp, Homo sapiens
aggtgtaagggggtataagggactggctgatgtcacagtgcggctcccgtcccctctccactccctctctagtcaccttgtttctgtcctctgctgagcccatttctttgggctccctgccagccccctcctcctggctcggagagatcatccatcagctctaatttccccccctaaactaagcaaagagcagcgcaggacagcaaaaggcagtgctcttgggctgagtgcagtagctcacacctgcaatcccagcactttgagaggctgaggtgggaggattgcctgagcccaggagttggagaccagcctggccaacacggcgagatgctgtctctaccaaaaataattaaaaaaaaaaattagccaggtgtggtggcacacacctgtagtcccagctactcgggaggctgaggtgggaggatcgcgggagccctggagtttgaagctgcagtgatggcgccactgcaccccagcctgggcagcacagtgaaaccctgtctcttggttctgaaaaactcggttcaacagtctgggcctatttacgccctctttcccctcaactttcccacacttccttttggtgagaaatttgcatggcattttcccactgaaaccaggaggatgcgctcctgagctgggccctacaggactcgccccagtggatgtccccactgctgagcctggaccttgctccctcagcagtgggtaggcctcccctgtccttctgtcccccttcctgcactggccaccactatgtcaggacaccagcaggtggggaaagggacagccgcagggaagaggtggcagcagcagtcagacaggcgggggagatgggaggtgttgggaagtgctcccagcaaggtagccaaggggttgtgaatttctgggctcagtccaggggcacgcaccccagccttgcctccccacagccgtctgatgacagctgcctagcctgccactgtttgccaagtgctttcacgtctctgcatttgattctccccacatcccactgcatgtgtattcacgtgcccactgtacacagaacactgaagcccagggaggcaaagtgacctgcccaagcccatacagcctgatggtggcaaccagtgtgggaatttggaccacactggcagagctgccagaagaaccacattcttgtaaatgatgcttagacttatcaagagagctttactttgttctcaaacaagagatcgtgtgcatgtgcgtttcaataagcctcctcgcggcaatcccagaaaggacagaatactctgctatgtgccctccagccagtcagctgcttctgccctgatctgagcctaggccagtgtccacggggacatcagccagtgggactgccatgggccacatgctacccgagggtcctctcaccccacacagctttccagccgaggcctatgcagacaggccgtgaatgcacaccgggccctcctgccctggccaacaaaccctcttggccaacgtgctacttcctgaagctagcccttcaaagaaccagtaatctctctacttcctgaagctagcccggacgaaggccttcaaagaaccagtgatctctcttctgcccccgccacccaggtcggcctgcacagctgagctccctgcaagcccgatctcccattcctgaagcaagcaccctggcaatccagactcgtgctgggagctggcaggggtgccagccaaggctgacaatgtagctgcggggaatgtgccaagcgcctcgcccaaggctgcagctgcttgccaaggccctgcagcccagcatgcgggagaagaggagagggaagccagggtggtggctgaagtccaggggccttttctctgaatctgcagtctggcccacacccgggatgcccctctccgtggaattcggggacaagcctgcttctctgctggtgcacagccagtgagacaaggtcccagggcaagaggccacctgacccagggagcacacacaggccttcgggggatggatgccattgtgcccctcctcccaagaagcactggggaaccgaaactgagtcgcagagagcagggcccaaggcagctgcaaccccaggcacgaggaaggggaggggctgaggcgagataaagggagcattgacctggagtaacctttcccagcgcctgtctggcccgccggccccggcccaccagggagccaggagacagacagggttggaaggacagccacgccaggagcaggaagtgtgtcccgccgcagtggcggcctgggcccggcatctctggtctgggggcccgggaaggcagctgagccagttggtagccaggcaggcctgtgggctcaggcgggggtggccttgaccccaagtcccactgctgtgctgggcgctgctcattaacctccgcttgggctgagtcatgcccataatgccggcctgcctggccagccagctctgctggacgccggccttcaaagggcccaagggcccaggaggggctaggcagcaggctgcgtccctcggtccccgctcatgaatggcaggcgtctcctcctggctggctgcaggagtggggcgggcaggagctctcgaggctcaaaccgctaggatcgcagctctaaggccaggacaacctccttgaggaggagaggaagcagaagtggcctcgagcgtgcaggcaaccagcacaggacagtccccacccagccttcctgcctctccactgccgcgcctgagtccacggctgcccaaaggccctgcccaccccagcccggctctcccatggcctgcccacacctttggcatcagccccggcccgccccagactgtccccaccgctcacggctgcctgcccccgggcctccctgccacacgcttccctccgtgcccggcaccccaacctgccccacctcatggcccccatagaaggcgatctcctccgagttggccaccacacgcgagtgcatgtagcgcagctcccccttccgccgcgcctcctctgccaccagctccccgaacttgggcgagaaggcccgcagcacgttggccgtgaggaacaccacgaggccggcgatggccgagggccaggctgtgccggctccacgggagcgggccgcccgaagcagggtgtaggaagtcacagccacgtccaggagtggcttggtcaggttggagtagaggtgggccacagaggccgcaaaggccaccacgtcctccgtcagagactggtcagggttgcgaagccgcccgtccatgttgctgacccggtagtaggtctgctgggagaagtagaggcggtaggcgtgggccaccagacggctgcggaacgacagggccagttggccctccaggtaacggatggcactgttgacgaaggtagcagggagggcgatgaggagccactgcagcagctgccagccaaaagcccgcgggtccttgcggacgatgcagcgggccagccttccgtccaggcgggccacatacaccgacaggaaggtgcggctcaccaaggcggccgagtgcagggccagcagccccgtctcccggcacaggacccgggggaacagcagccgcaggagccacaggagccgctgcaggaatacccggttcatgccagctttggccgccgcgaccccggaggcctcctgcgtgggctccccggcgggcgcctgaagacccctggccggggccaggcactggcgcaccaaggggtagactttgtgggctccataggccgcgagggccaggagcacggccgtgcgcttcagcgtgttcccccgccagggccggggcctggagagcaccggcatgtcacctgggctggctgccgcgtagggactggggctggtgcctggggcagcagttgaggcaggtggctggaaggattgttgctctgaccctgggcctgttgtctaggcaactggaaaccttgcgatggcccctgagactgtcgctttaggcccccggggtggtgctggggcccctggtgcggtgggctcagggccctccagggtcgcggcctcttcgggcagcccaagtggaggaacttggctctcctgtcctgtcagtgccctggcccctgaggtcagggccttgagaggtctcgggcagagggggcgtctcttcctctccaccttctcctcctcctcctcccccggtggcgcccctccccggggcaccaggcgcgtccgtccgctccgcagcctggctgaagcgacagtgactcctccaccggcccagaatccccacccactcttccccaggggcgagtcgggggaaggggaggaggcggaggaggggcgaggggcggagtccgggcgcgggagccccaccctgttctcgcccctcggcggggcccgcccacacccccacctcccgttctcgcccctcggcggggcccctcccgcaccacagagacgtgggacggccgcgcggactagagaagcggccctcgccggcccgacaaagccccgccccgccccgcccgcgtgctcgctccaccccgccctgctcgcccggagcccgaggcgcctcttcctctcccgctcggagcgccggccctccgctccggggcggggtgggaagcggaggtgggcggagcctccggggcctcgcgagggctggtgggcggtgcccggcgggcgcttccggtttccggccgcggtatgaggggcggggccggggctgctgtgggagagttctgttgctgcggcggggcctgcacgttgactgtgggaaactcggtgagcgggctccgcgcgccgggctgggctccgggaccgcggaggctccccggcccatcgacgagggagagaggcgagcggcgcggggaggcccgggggccggggaatctcggggcccgcagcctacctgcgtgtgagaggcaggggcgaggggaaaccgggcggcgcctctagaagctggtctcgggggcggggcggggggcggtgaagccccacctggaggagcggccgggatgggcctccgggacggtgtgccaggccggggccaagtcggaggcccctcgctctgggtgggcgctggggcccgcgagggctactgtaaggacccctggcttctgaggatactgcgtctagaactttctccgtatggggccttgaggtgcttggtcgagacctgcctttgcgcttggtcccgaatcctgccctctaggagtcgctcttgcgggcctccagcccaccggaggcgaagcggccccgggcggaaggccgctggatcctcgagggaggtgccggtttctctccgcgggcgccgtggggacggtgggaggcgggggcgtcggcagcgcttggactaggtgcggccttgggcctgcctggtagcggggatttgggcccgcagagcgcccgcctctgcggctgagttctgcctggcggggaagggagcgcccgatgggtgccgaggcgtcctcctcttggtgccctggcactgctcttcccgaagaacgcctttcagttaaacgggcgtcggaaatctcgggcttcctggggcagggatcgtcgggagaggccgctctggacgtgttgacacacgtgctggagggggcaggtaattgaccagcgaacggaagtttgtggggcctgtgaacgctgctggccaagaggccctgccgagtggagccctgcttccgccagcgcatcagagactttgaagcaaagtgcagggggtcagggtggagagtggcggccccagcctcgcagggtaactgaactggatgttcttggctgcccagcgcttacaagtcccgtaccttttgtgccctgccaggaaacaagctcacatcttcctgtgggaaaccttctagcaacaggatgagtctgcagtggactgcagttgccaccttcctctatgcggaggtctttgttgtgttgcttctctgcattcccttcatttctcctaaaaggtatggcctatggagcaagcaggcgagttaggcaggagggtgcctgtgccctagccctgggactggtgtgtgcagctggtggaccctgga

SEQ ID NO: 1374 - DNA, 6000 bp, Homo sapiens
tccacacatacttcatgaggaactgctccagcataacataccacaggcgttccagaaggatgaggttgatctgcgaggccaggtcctggtaggagcgctgtagcagggccagctccacctgcggggggtgacagacacagagaggcttcctggccatgcacaggggcagctcccgtgggggcgatggtcagggtctcccagtgccactcacacacgctgtgccatggtggccatcagaaggccgagagccagaggttacgattgggtggggccaggtctcaaactcaaggtgtaagggggtataagggactggctgatgtcacagtgcggctcccgtcccctctccactccctctctagtcaccttgtttctgtcctctgctgagcccatttctttgggctccctgccagccccctcctcctggctcggagagatcatccatcagctctaatttccccccctaaactaagcaaagagcagcgcaggacagcaaaaggcagtgctcttgggctgagtgcagtagctcacacctgcaatcccagcactttgagaggctgaggtgggaggattgcctgagcccaggagttggagaccagcctggccaacacggcgagatgctgtctctaccaaaaataattaaaaaaaaaaattagccaggtgtggtggcacacacctgtagtcccagctactcgggaggctgaggtgggaggatcgcgggagccctggagtttgaagctgcagtgatggcgccactgcaccccagcctgggcagcacagtgaaaccctgtctcttggttctgaaaaactcggttcaacagtctgggcctatttacgccctctttcccctcaactttcccacacttccttttggtgagaaatttgcatggcattttcccactgaaaccaggaggatgcgctcctgagctgggccctacaggactcgccccagtggatgtccccactgctgagcctggaccttgctccctcagcagtgggtaggcctcccctgtccttctgtcccccttcctgcactggccaccactatgtcaggacaccagcaggtggggaaagggacagccgcagggaagaggtggcagcagcagtcagacaggcgggggagatgggaggtgttgggaagtgctcccagcaaggtagccaaggggttgtgaatttctgggctcagtccaggggcacgcaccccagccttgcctccccacagccgtctgatgacagctgcctagcctgccactgtttgccaagtgctttcacgtctctgcatttgattctccccacatcccactgcatgtgtattcacgtgcccactgtacacagaacactgaagcccagggaggcaaagtgacctgcccaagcccatacagcctgatggtggcaaccagtgtgggaatttggaccacactggcagagctgccagaagaaccacattcttgtaaatgatgcttagacttatcaagagagctttactttgttctcaaacaagagatcgtgtgcatgtgcgtttcaataagcctcctcgcggcaatcccagaaaggacagaatactctgctatgtgccctccagccagtcagctgcttctgccctgatctgagcctaggccagtgtccacggggacatcagccagtgggactgccatgggccacatgctacccgagggtcctctcaccccacacagctttccagccgaggcctatgcagacaggccgtgaatgcacaccgggccctcctgccctggccaacaaaccctcttggccaacgtgctacttcctgaagctagcccttcaaagaaccagtaatctctctacttcctgaagctagcccggacgaaggccttcaaagaaccagtgatctctcttctgcccccgccacccaggtcggcctgcacagctgagctccctgcaagcccgatctcccattcctgaagcaagcaccctggcaatccagactcgtgctgggagctggcaggggtgccagccaaggctgacaatgtagctgcggggaatgtgccaagcgcctcgcccaaggctgcagctgcttgccaaggccctgcagcccagcatgcgggagaagaggagagggaagccagggtggtggctgaagtccaggggccttttctctgaatctgcagtctggcccacacccgggatgcccctctccgtggaattcggggacaagcctgcttctctgctggtgcacagccagtgagacaaggtcccagggcaagaggccacctgacccagggagcacacacaggccttcgggggatggatgccattgtgcccctcctcccaagaagcactggggaaccgaaactgagtcgcagagagcagggcccaaggcagctgcaaccccaggcacgaggaaggggaggggctgaggcgagataaagggagcattgacctggagtaacctttcccagcgcctgtctggcccgccggccccggcccaccagggagccaggagacagacagggttggaaggacagccacgccaggagcaggaagtgtgtcccgccgcagtggcggcctgggcccggcatctctggtctgggggcccgggaaggcagctgagccagttggtagccaggcaggcctgtgggctcaggcgggggtggccttgaccccaagtcccactgctgtgctgggcgctgctcattaacctccgcttgggctgagtcatgcccataatgccggcctgcctggccagccagctctgctggacgccggccttcaaagggcccaagggcccaggaggggctaggcagcaggctgcgtccctcggtccccgctcatgaatggcaggcgtctcctcctggctggctgcaggagtggggcgggcaggagctctcgaggctcaaaccgctaggatcgcagctctaaggccaggacaacctccttgaggaggagaggaagcagaagtggcctcgagcgtgcaggcaaccagcacaggacagtccccacccagccttcctgcctctccactgccgcgcctgagtccacggctgcccaaaggccctgcccaccccagcccggctctcccatggcctgcccacacctttggcatcagccccggcccgccccagactgtccccaccgctcacggctgcctgcccccgggcctccctgccacacgcttccctccgtgcccggcaccccaacctgccccacctcatggcccccatagaaggcgatctcctccgagttggccaccacacgcgagtgcatgtagcgcagctcccccttccgccgcgcctcctctgccaccagctccccgaacttgggcgagaaggcccgcagcacgttggccgtgaggaacaccacgaggccggcgatggccgagggccaggctgtgccggctccacgggagcgggccgcccgaagcagggtgtaggaagtcacagccacgtccaggagtggcttggtcaggttggagtagaggtgggccacagaggccgcaaaggccaccacgtcctccgtcagagactggtcagggttgcgaagccgcccgtccatgttgctgacccggtagtaggtctgctgggagaagtagaggcggtaggcgtgggccaccagacggctgcggaacgacagggccagttggccctccaggtaacggatggcactgttgacgaaggtagcagggagggcgatgaggagccactgcagcagctgccagccaaaagcccgcgggtccttgcggacgatgcagcgggccagccttccgtccaggcgggccacatacaccgacaggaaggtgcggctcaccaaggcggccgagtgcagggccagcagccccgtctcccggcacaggacccgggggaacagcagccgcaggagccacaggagccgctgcaggaatacccggttcatgccagctttggccgccgcgaccccggaggcctcctgcgtgggctccccggcgggcgcctgaagacccctggccggggccaggcactggcgcaccaaggggtagactttgtgggctccataggccgcgagggccaggagcacggccgtgcgcttcagcgtgttcccccgccagggccggggcctggagagcaccggcatgtcacctgggctggctgccgcgtagggactggggctggtgcctggggcagcagttgaggcaggtggctggaaggattgttgctctgaccctgggcctgttgtctaggcaactggaaaccttgcgatggcccctgagactgtcgctttaggcccccggggtggtgctggggcccctggtgcggtgggctcagggccctccagggtcgcggcctcttcgggcagcccaagtggaggaacttggctctcctgtcctgtcagtgccctggcccctgaggtcagggccttgagaggtctcgggcagagggggcgtctcttcctctccaccttctcctcctcctcctcccccggtggcgcccctccccggggcaccaggcgcgtccgtccgctccgcagcctggctgaagcgacagtgactcctccaccggcccagaatccccacccactcttccccaggggcgagtcgggggaaggggaggaggcggaggaggggcgaggggcggagtccgggcgcgggagccccaccctgttctcgcccctcggcggggcccgcccacacccccacctcccgttctcgcccctcggcggggcccctcccgcaccacagagacgtgggacggccgcgcggactagagaagcggccctcgccggcccgacaaagccccgccccgccccgcccgcgtgctcgctccaccccgccctgctcgcccggagcccgaggcgcctcttcctctcccgctcggagcgccggccctccgctccggggcggggtgggaagcggaggtgggcggagcctccggggcctcgcgagggctggtgggcggtgcccggcgggcgcttccggtttccggccgcggtatgaggggcggggccggggctgctgtgggagagttctgttgctgcggcggggcctgcacgttgactgtgggaaactcggtgagcgggctccgcgcgccgggctgggctccgggaccgcggaggctccccggcccatcgacgagggagagaggcgagcggcgcggggaggcccgggggccggggaatctcggggcccgcagcctacctgcgtgtgagaggcaggggcgaggggaaaccgggcggcgcctctagaagctggtctcgggggcggggcggggggcggtgaagccccacctggaggagcggccgggatgggcctccgggacggtgtgccaggccggggccaagtcggaggcccctcgctctgggtgggcgctggggcccgcgagggctactgtaaggacccctggcttctgaggatactgcgtctagaactttctccgtatggggccttgaggtgcttggtcgagacctgcctttgcgcttggtcccgaatcctgccctctaggagtcgctcttgcgggcctccagcccaccggaggcgaagcggccccgggcggaaggccgctggatcctcgagggaggtgccggtttctctccgcgggcgccgtggggacggtgggaggcgggggcgtcggcagcgcttggactaggtgcggccttgggcctgcctggtagcggggatttgggcccgcagagcgcccgcctctgcggctgagttctgcctggcggggaagggagcgcccgatgggtgccgaggcgtcctcctcttggtgccctggcactgctcttcccgaagaacgcctttcagttaaacgggcgtcggaaatctcgggcttcctggggcagggatcgtcgggagaggccgctctggacgtgttgacacacgtgctggagggggcaggtaattgaccagcgaacggaagtttgtggggcctgtgaacgctgctggccaagaggccctgccgagtggagccctgcttccgccagcgcatcagagactttgaagcaaagtgcagggggtcagggtggagagtggcggccccagcctcgcagggtaac

SEQ ID NO: 1375 - DNA, 6000 bp, Homo sapiens
cagaactacagagctggaacgacctgggaaaacctcaagtctagcccagatgcagagaggtctaggatctctccccaagatatgctgccacacatctctgtgttctcctcctactactacagggaatggcaggacttcactgtgtgcttggttgctcagtcccccattagaggccctgctccaggcaattctgctgtttaagtgactggtgagcagcactactcagaccaaggtcacaggccagttagcttctcttggcttcagttctagagtgacctgaggagcagcctcagaaaccttaggcgtccctccttccaaggtcttgaaaaaaagcaatgtaaggtggccgtcataagctgcatacaaactgcttggtataagcccacgcccactgctagaggggcctcttttttttttttttgagatggagtctccctcttgttgcccaggctggagtgcaatggtgcgatttaggctcactgcaacctctgcctcgtgggttcaagcaattctcctgcctcagtctcccaagtagctgggattacaggtgcccgccaccacgcccagctaattttgtatttttcgtagagatggggtttcaccacgttggccaggctgatctcgaactcctcatctcaggtgatccaccgacctcagcctcccaaagtgctgggattacaggcatgagccaccatgtacggcctagaggggcctcaaagtgaagaaccgactagcggtcagcagcatgggcaaagggagcctcttccctccctcaagagaaagacacagcatttcattggtctgtctcctagcagccaaaactggatgctacacatcaaaagtggcaaagggttttgcagcagagaccagggtctaggtcaggtagctgccctcagccatagctcactcaccgatgaccaacagcacaaggatgacaatgagaaccacaaagaaggtgttgccataggacactaacaactccaccagccgggacttgaaaatcttctgccatctgtgaagaagacaaaaaggacaggagttgaagagaaagcacacacacgagctctagggccctgagcaaaatggaaatccagctttgtactcttctccaatggccgaatagcccatgcaaagtcagcctcagtggcttgcaattctctaatttgacatccattcaagactattggaaaaaaggccaggtgcaatggctcacacctgtaatctcagcactttgggagaccaaggtgggtggatcacttgaggtcaggagtgcaagaccaaactggccaacatggcgaaaccctgtctctactaaaagtacgaaaattagccaggcgtggtggtgggcacctgtaatcccagctactcaggagggtgaggcaggagaatcacttgaacctgggaggcggaagttgcagtgagccgagatcgcgccactgcactccagcctgggtgacagagcgagaccttgtctcaaaaaaaaaaaaaaaaaaagatgctggtccacgtatagatcaaaatgtctggaaaactaatcttttttttttttttttgagacagagtcttgctctgttgcccaggctggagtgcagaggtgtaagccaccgcgcccagcctggaaaactaatcttaaacgtgggcagttggctgggcgcactggctcacgtctgtaaacccagcactttgggaggctgagatgggcagatcacctgaggtcagaagttcaagaccggcctggccaacatggtgaactcccatctctactaaaaatatatatataaaaaaaaattagctgggcatgttggcaggcacctgtagtcccagctactcgtgaggctgaggcaggagaattgcttgaacccgggaggtggaggctgctgtcagccgagcaccacaccactgcactccagcctgggtgacagagcaagactctgtctcaaaataaaaacaaaaacaaacaaaaaaaccacaacaacaaaaagaaaacatactggtagtctctgaaaagggaaacttacttttcattgtactcccctttgtaatattcaaatgtttgccccatacacgttatttctttaaactgtctttccacatgataaaccttggtttgtctatatcccccgaccctgttatgatgagatggaccccagacctcacatcatttccatccacaaatgctttgggatgcagctctaagaagagacttcagaagtgtttacatattgttcaaatcaacaagaagccctcatcatcagggctagagttgaatatgccaatcactgaaggcaatgatatttgtttgaatccggacccaacaaggtaccgatttggcattcggtagataaacgtcttaaatccagcttattctggaagctcccccttccctctccctctttcatttgcttttccagtttcctttgtgtagaaatcagattgtctgtcctctaaagcttcccagattaaagctccccggggccctctatctctgcacgtcttgtcaactgtacgaaggtgtggttttctacaagaatcctcctcagacagcactgcatactttctatggtatcacatcaaagataatttttcacgaaaaaacggcttttaaaaatacctgtggagatttggccttatttgtaatatcgtaatttaaatagggatgtgttcaggtattatacataattaaaattaatctccaattcacttttaacaggtcctctgttcattaaaagggaatatggcttcatcctccacaggctgagtaatgttcatgcagccactgcgcaataccagtgagactagttaggaggacaagagtcaccaaatcagcaacaacgtgacccagtggtgcaagtcttccgaatcccacgctaccatcccagcaccccgtggaccaagagtgggtgggagggcatcatttccagaactgtaacatagatcttcctgcctctcgggggcattctgaagaccagaaggcaggggacacaggaaaaggaactgagcaagtcatgacgaagcagaaccctgggaagggttggcaataacaaacacaacccctgccacccccaccccagacaggttctacctgttccatcgggtcccaattccagggtccaccagctgcacacaccagtcccagggctagggcacaggcaccctcctgcctaactcgcctgcttgctccataggccataccttttaggagaaatgaagggaatgcagagaagcaacacaacaaagacctccgcatagaggaaggtggcaactgcagtccactgcagactcatcctgttgctagaaggtttcccacaggaagatgtgagcttgtttcctggcagggcacaaaaggtacgggacttgtaagcgctgggcagccaagaacatccagttcagttaccctgcgaggctggggccgccactctccaccctgaccccctgcactttgcttcaaagtctctgatgcgctggcggaagcagggctccactcggcagggcctcttggccagcagcgttcacaggccccacaaacttccgttcgctggtcaattacctgccccctccagcacgtgtgtcaacacgtccagagcggcctctcccgacgatccctgccccaggaagcccgagatttccgacgcccgtttaactgaaaggcgttcttcgggaagagcagtgccagggcaccaagaggaggacgcctcggcacccatcgggcgctcccttccccgccaggcagaactcagccgcagaggcgggcgctctgcgggcccaaatccccgctaccaggcaggcccaaggccgcacctagtccaagcgctgccgacgcccccgcctcccaccgtccccacggcgcccgcggagagaaaccggcacctccctcgaggatccagcggccttccgcccggggccgcttcgcctccggtgggctggaggcccgcaagagcgactcctagagggcaggattcgggaccaagcgcaaaggcaggtctcgaccaagcacctcaaggccccatacggagaaagttctagacgcagtatcctcagaagccaggggtccttacagtagccctcgcgggccccagcgcccacccagagcgaggggcctccgacttggccccggcctggcacaccgtcccggaggcccatcccggccgctcctccaggtggggcttcaccgccccccgccccgcccccgagaccagcttctagaggcgccgcccggtttcccctcgcccctgcctctcacacgcaggtaggctgcgggccccgagattccccggcccccgggcctccccgcgccgctcgcctctctccctcgtcgatgggccggggagcctccgcggtcccggagcccagcccggcgcgcggagcccgctcaccgagtttcccacagtcaacgtgcaggccccgccgcagcaacagaactctcccacagcagccccggccccgcccctcataccgcggccggaaaccggaagcgcccgccgggcaccgcccaccagccctcgcgaggccccggaggctccgcccacctccgcttcccaccccgccccggagcggagggccggcgctccgagcgggagaggaagaggcgcctcgggctccgggcgagcagggcggggtggagcgagcacgcgggcggggcggggcggggctttgtcgggccggcgagggccgcttctctagtccgcgcggccgtcccacgtctctgtggtgcgggaggggccccgccgaggggcgagaacgggaggtgggggtgtgggcgggccccgccgaggggcgagaacagggtggggctcccgcgcccggactccgcccctcgcccctcctccgcctcctccccttcccccgactcgcccctggggaagagtgggtggggattctgggccggtggaggagtcactgtcgcttcagccaggctgcggagcggacggacgcgcctggtgccccggggaggggcgccaccgggggaggaggaggaggagaaggtggagaggaagagacgccccctctgcccgagacctctcaaggccctgacctcaggggccagggcactgacaggacaggagagccaagttcctccacttgggctgcccgaagaggccgcgaccctggagggccctgagcccaccgcaccaggggccccagcaccaccccgggggcctaaagcgacagtctcaggggccatcgcaaggtttccagttgcctagacaacaggcccagggtcagagcaacaatccttccagccacctgcctcaactgctgccccaggcaccagccccagtccctacgcggcagccagcccaggtgacatgccggtgctctccaggccccggccctggcgggggaacacgctgaagcgcacggccgtgctcctggccctcgcggcctatggagcccacaaagtctaccccttggtgcgccagtgcctggccccggccaggggtcttcaggcgcccgccggggagcccacgcaggaggcctccggggtcgcggcggccaaagctggcatgaaccgggtattcctgcagcggctcctgtggctcctgcggctgctgttcccccgggtcctgtgccgggagacggggctgctggccctgcactcggccgccttggtgagccgcaccttcctgtcggtgtatgtggcccgcctggacggaaggctggcccgctgcatcgtccgcaaggacccgcgggcttttggctggcagctgctgcagtggctcctcatcgccctccctgctaccttcgtcaacagtgccatccgttacctggagggccaactggccctgtcgttccgcagccgtctggtggcccacgcctaccgcctctacttctcccagcagacctactaccgggtcagcaacatggacgggcggcttcgcaaccctgaccagtctctgacggaggacgtggtggcctttgcggcctctgtggcccacctctactccaacctgaccaagccactcctggacgtggctgtgacttcctacaccctgcttcggg

SEQ ID NO: 1376 - DNA, 6000 bp, Homo sapiens
caggatcactactgggccacaagcatgtctgtcttgcctgatatacagacagaagagccccgagattcaagcctgtgccagccctccatccctgacccagaagacataaacgcatctcctgcgttccaggagaaaacctgaaaattcaattcagtagaaccaagggacgacagaagtaccatgtagccacatttgtgagacgtgacctcaagtgcttacattagcaaaaaagagtggttcaaaaataaggagctaagcattccacttaagaagtgagaaaaagggccagatgcggtggctcacacctgtaatcccagcactttgggaggctgaggcaggcagatcacctgaagtcaggagttcaagaccagccaatgtggcaaaaccccatctctattaaaaatacaaaaattagccaggtgtggtggcaggcacctgtaatcccagttactcaggaggctgaggcaggagaatcacttgaatccgggaggcagaggttgcagtgagccgagatcgtgccactgcactccagcctgggtgacaagagtgagacttcatctccaaaaaaaaagtgagaaaaagatagaactgcaagccaaattaccaggaagaaaataggaaataatgacaagtaaaattaataaaattaaaagctaacccaaagaaaagatgaacaaagctggaaattggtgtttgaaaaagacgaatagaaacagacaaccccctggcatggttgcttttttaaaagggcataggccgggcacagtggcttactcctgtaatcccagcactttgagaggccgaggcaggcggatcaagaggtcaggagatcgagaccatcctggctgacacggtgaaaccccgcctctaccaaaaatacaaaaaattagccaggcgtggtggcgggtgtctgtagtcccagctactcggaaggctgaggtaggagaatcacttgaacccgggagatggaggttgcagtgagccaagattgcaccattgcaccccagcctgggcgacaagagtgaaactccgtctcaaaaaacaaaaaacaaaaaaacaactaaacagctggacgcggtggctcaagcctataatcccagcactttggaaggccgaggcggatggattacctgagttcgggagttcaagaccagcctgaccaacatggagaaaccgtttctactaaaaatacaaaattggctgggcatggtggcccatgcctgtaatcccagctactcaggaggctgaggcaggagaatcgcttgaacctgggaggcggaggttgcagtgagccaagatcaagccactgcactccagcctgggctacaaaagcgaaactccgtctcaaacaaacaaaaaacagagcaatggacctgagaggggacagtggccacaaatcttcctacagaaacaaccccctggcatagagagtgttgccagtgggttctaccaaaatgcaagcacaagagaattccagcctgaagcaaactcttcctgcagaaggaagaaaggggaacacttcccaagccaccttatggggcctacagagccttggtacggaaacctgatgagaaaggcacatgggaaaacccatacgcctcattcacacacacatgcagatgcagaaatcccacacgaaatatcagcaggccgggcacaactcacacaccccagcactttgggagaccaaggtgggaggaagattgcttgaaatcaggaggttttttttttttttttttttaaagacatggtctcactctgtcacctaggctggagtgcagtggcacgatctcagttcactgcaacctctgcctctgggctcaagcaatcctcccacctcagcctctggagtagctgggactacaggtacatgccaacacacccagctaattttttgtattttttgtagagacagggtttccccatgttgtccaggctgctcttgaactcctgggctcaagtgatctgcccgcctcagcctcccaaagtgttgggattacaggcgtgagccacgacgacccactgaccctgtctctttaaaaaaaaagaagaaaacatcagcaaaccaaatcctgcaatgttaaaaacggtaggttttttatttacagaataaatacatctgtaaataaaaagttggtttgatattaacagaaaaaaatcattgaaattcaccatattaagagattaaaaaaaacctctaagaactctctgcctactgctatgttttgattttttaaatctagcaatcttgctcaacccaacagatgtagatcaagtgtttcagaaatcacctattcacgctaaaactcttagcagagggggaatgcaagggaacttcactaacttgataaagggcatctataaaacaccattctggctgggcgtggtggctcaagcctgtaatcccagcactttgggaggccgaggcggggaatcgcttgaggtcaggagtttgagaccagcctgaccaacatggtgaaaccccatttctactaaaaatacaaaacttagctgaacatggtggtgtatgcctgtaatcccagctattcaggagactgaggcaggagaatcgcttgaaccaggaggcagagactggagtgagccgagatcacaccactgtagcctgagcaacagagctagacgtcgtctcaaaaaaaaaaaccaccaccaaaaaacaaagaacaaaaaaacccccaaaccatcatccttacaaatactacaaatatcacacttataggaaatgctgaaatattaatcatccctttaagcaatcaggaacaagaaaagtgcagtaaggcaagaaaatgaaaatggctgaagttgagctgtgaggtggtgcgggtgctccctctgatcaagtgaaacacacacctatcctgtgacctggccgttccaccccaagagaaatgaaagtgcaagtccacacaaagacctgcacacgaatggtcacagcagccttggttcatagcggccccaaactggaaacaagtcaaacacttgaattaacatgtgacccggcaaactgtgcattcatacaacggatactactcagcaacactgggaaatctcagcatcagagatgcaacccattgtgacagaaatcagatcagcggttgcctggagcagggcagattggctgggaatgggtacccaggaactttctggggagatgacgatggcctttattgtgatgagggtgtacagccaattgtacagttaagatttgcgcaccaacaaaagacggcgagaaaaccaacaatggagcggagggtggggagtgggtcagaaatgaccctttgagggccagtgactgtgagagccccaggtgagggggcttcctgggtgcagagcatattctgtttcttgatctaggagcagtttctgtggctgtgctgagtttgtgaaaagtcatcaacaagctagacctgcaccatctgtgttcttcatgacatgtatttctttttttttttgagacggagtctcactctgtcggccaggctggagtgcagtggcgtgatcttggctcactgaaatctccacctcctgggttcaagccattctcctgcctcagcctcctgagtagctgggactccaggcacctgccaccacgcccggctaatttttgtatttttactagagatggggtttcgccatgttggccaggctggcctcaaactcctgaccttgtgatccacctgccgtggcctcccaaagtgctggcattacaggcgtgagccaccgtggccggcccatgacatatatttcaataaaacatggtaaaaactaatagtctgggcgtggtggctcatgcctgtaaccccagcactttgggaggctgaggagggtggatcacctgaggtcaggagttcgagaccagcctggcaaacatggtgaaaccccgtctctactaaaaatacaggccaggcgcggtggctcatgcctgtaatcctagcactttgggaggttgaggtgggtggatcacgaggtcaggagattgagaccatcctggccaacatggtgagaccccgtttctactaaaatacaaaaaattagctggatgtggtggtgcgcgcctgtagtcccagctactcgggaggctgaggcaggggaattgcttgaacctcgcaggtggagattgcagtgagccaagattgcgccactgtactccagcctggtgaaagagcaagactccatctcaaaaaaaagaaaaaacaaaaattagctggatgtggtggcaggcacctggaatcccagctactcaggaggctaaggcaggagaatcacttgaatccaggagacggaggttgcagtgagccaagattgcgccaccaaactccagcctgggtgacagcaagactccatgtcacgaaaaaaaaaaaaaaaaaaacacatgctcttcgaagcaatcaggcactgcaaccatggatgggtccatttctacaaaccattacagaatgggggccatgccaccaggtcaaacgccctcacccagagccaggcagttaggaagccaccacagggcttccaggagggcaactgctatggtgtgggtgccttgtgtgcttgcgctcttcaggggccctgctccacttctgatgctcctcaggtgagctcggtgccaggactacagcgacacggacctctcactgctgcacccttcaaagtccagcagacaacccctcgccctggggtaggagctcctctactcagctcctcacagcacctgccatcagtggggctggggaggggaacgttgcccatgtcacatcaactcacggctggccccacacagaaagggtcagcttactgggaactaactggaccctgaaataaacggaaagaaccacagcctgcaaatacctctaagcctcactcaaagcaggtcatgtttgctcatgaccaaattccggaagactgggaggcatcgggacagactccagaaaggtactggtggcaggggactggtctgctgagtcacagcaaccccacgctccaggccgtttgttcctgctgctccctttgggattaactagagattgaaccggctcaccttgtttcagctcaggccctgcaaccgaccgaccgtctgctgggctccaagtcacctgagaggcgaggtgaggtaagacggacagtaggggtggggtaaggcaggccgctctctcccatggtgacagggagctaagctgagctgagccggactgagctgctctcctcaggactcaggggtagccctgccctcccagctggctgcgatgctctagtgggactttctggaggaacaaacatgggaagacatcgggaaacctgacagcttggtcaagagtctactcgtgccatgtgggtgggggcaattcaaggggtccttagtgaaaagcagttgggagcttctcatcttccccacgccctcctctttcctgaggaccacagcaggggagggatctgcccaaggacacaaggtgacttagtagaagcagggcatgatgaagatctctagccaccaacatctggctaggccagggcaaagggacctgggccatgacctgtctgttttataaaccgaaatcgctgcagcccttgtcttggcatgagggtttcatggtagagcacgatgcctgctggagggccagcgggggtgggccatcccatccccaagggtcactggggttaaggacctgcccagactccctgggtggagccctgggccttggcaggggcccagctggttcctggccactggggccagagaacctgggggctgctgagttagttcagctgaaaaaccaacaaaagggcctccctgctatacccgggggctcatgagtcaccggggctttgggggagtgccaacatcatcatgacacagcaagaatcttatcagaccaatggggaagtcagcccagaaatgttctgaggaaaggggaggcgggggccgctgggtcatccctcccacaggcccatcattgggatgcgtcctgaacgcccatcaagcccatggcc

SEQ ID NO: 1377 - DNA, 6000 bp, Homo sapiens
caccattgcaccccagcctgggcgacaagagtgaaactccgtctcaaaaaacaaaaaacaaaaaaacaactaaacagctggacgcggtggctcaagcctataatcccagcactttggaaggccgaggcggatggattacctgagttcgggagttcaagaccagcctgaccaacatggagaaaccgtttctactaaaaatacaaaattggctgggcatggtggcccatgcctgtaatcccagctactcaggaggctgaggcaggagaatcgcttgaacctgggaggcggaggttgcagtgagccaagatcaagccactgcactccagcctgggctacaaaagcgaaactccgtctcaaacaaacaaaaaacagagcaatggacctgagaggggacagtggccacaaatcttcctacagaaacaaccccctggcatagagagtgttgccagtgggttctaccaaaatgcaagcacaagagaattccagcctgaagcaaactcttcctgcagaaggaagaaaggggaacacttcccaagccaccttatggggcctacagagccttggtacggaaacctgatgagaaaggcacatgggaaaacccatacgcctcattcacacacacatgcagatgcagaaatcccacacgaaatatcagcaggccgggcacaactcacacaccccagcactttgggagaccaaggtgggaggaagattgcttgaaatcaggaggttttttttttttttttttttaaagacatggtctcactctgtcacctaggctggagtgcagtggcacgatctcagttcactgcaacctctgcctctgggctcaagcaatcctcccacctcagcctctggagtagctgggactacaggtacatgccaacacacccagctaattttttgtattttttgtagagacagggtttccccatgttgtccaggctgctcttgaactcctgggctcaagtgatctgcccgcctcagcctcccaaagtgttgggattacaggcgtgagccacgacgacccactgaccctgtctctttaaaaaaaaagaagaaaacatcagcaaaccaaatcctgcaatgttaaaaacggtaggttttttatttacagaataaatacatctgtaaataaaaagttggtttgatattaacagaaaaaaatcattgaaattcaccatattaagagattaaaaaaaacctctaagaactctctgcctactgctatgttttgattttttaaatctagcaatcttgctcaacccaacagatgtagatcaagtgtttcagaaatcacctattcacgctaaaactcttagcagagggggaatgcaagggaacttcactaacttgataaagggcatctataaaacaccattctggctgggcgtggtggctcaagcctgtaatcccagcactttgggaggccgaggcggggaatcgcttgaggtcaggagtttgagaccagcctgaccaacatggtgaaaccccatttctactaaaaatacaaaacttagctgaacatggtggtgtatgcctgtaatcccagctattcaggagactgaggcaggagaatcgcttgaaccaggaggcagagactggagtgagccgagatcacaccactgtagcctgagcaacagagctagacgtcgtctcaaaaaaaaaaaccaccaccaaaaaacaaagaacaaaaaaacccccaaaccatcatccttacaaatactacaaatatcacacttataggaaatgctgaaatattaatcatccctttaagcaatcaggaacaagaaaagtgcagtaaggcaagaaaatgaaaatggctgaagttgagctgtgaggtggtgcgggtgctccctctgatcaagtgaaacacacacctatcctgtgacctggccgttccaccccaagagaaatgaaagtgcaagtccacacaaagacctgcacacgaatggtcacagcagccttggttcatagcggccccaaactggaaacaagtcaaacacttgaattaacatgtgacccggcaaactgtgcattcatacaacggatactactcagcaacactgggaaatctcagcatcagagatgcaacccattgtgacagaaatcagatcagcggttgcctggagcagggcagattggctgggaatgggtacccaggaactttctggggagatgacgatggcctttattgtgatgagggtgtacagccaattgtacagttaagatttgcgcaccaacaaaagacggcgagaaaaccaacaatggagcggagggtggggagtgggtcagaaatgaccctttgagggccagtgactgtgagagccccaggtgagggggcttcctgggtgcagagcatattctgtttcttgatctaggagcagtttctgtggctgtgctgagtttgtgaaaagtcatcaacaagctagacctgcaccatctgtgttcttcatgacatgtatttctttttttttttgagacggagtctcactctgtcggccaggctggagtgcagtggcgtgatcttggctcactgaaatctccacctcctgggttcaagccattctcctgcctcagcctcctgagtagctgggactccaggcacctgccaccacgcccggctaatttttgtatttttactagagatggggtttcgccatgttggccaggctggcctcaaactcctgaccttgtgatccacctgccgtggcctcccaaagtgctggcattacaggcgtgagccaccgtggccggcccatgacatatatttcaataaaacatggtaaaaactaatagtctgggcgtggtggctcatgcctgtaaccccagcactttgggaggctgaggagggtggatcacctgaggtcaggagttcgagaccagcctggcaaacatggtgaaaccccgtctctactaaaaatacaggccaggcgcggtggctcatgcctgtaatcctagcactttgggaggttgaggtgggtggatcacgaggtcaggagattgagaccatcctggccaacatggtgagaccccgtttctactaaaatacaaaaaattagctggatgtggtggtgcgcgcctgtagtcccagctactcgggaggctgaggcaggggaattgcttgaacctcgcaggtggagattgcagtgagccaagattgcgccactgtactccagcctggtgaaagagcaagactccatctcaaaaaaaagaaaaaacaaaaattagctggatgtggtggcaggcacctggaatcccagctactcaggaggctaaggcaggagaatcacttgaatccaggagacggaggttgcagtgagccaagattgcgccaccaaactccagcctgggtgacagcaagactccatgtcacgaaaaaaaaaaaaaaaaaaacacatgctcttcgaagcaatcaggcactgcaaccatggatgggtccatttctacaaaccattacagaatgggggccatgccaccaggtcaaacgccctcacccagagccaggcagttaggaagccaccacagggcttccaggagggcaactgctatggtgtgggtgccttgtgtgcttgcgctcttcaggggccctgctccacttctgatgctcctcaggtgagctcggtgccaggactacagcgacacggacctctcactgctgcacccttcaaagtccagcagacaacccctcgccctggggtaggagctcctctactcagctcctcacagcacctgccatcagtggggctggggaggggaacgttgcccatgtcacatcaactcacggctggccccacacagaaagggtcagcttactgggaactaactggaccctgaaataaacggaaagaaccacagcctgcaaatacctctaagcctcactcaaagcaggtcatgtttgctcatgaccaaattccggaagactgggaggcatcgggacagactccagaaaggtactggtggcaggggactggtctgctgagtcacagcaaccccacgctccaggccgtttgttcctgctgctccctttgggattaactagagattgaaccggctcaccttgtttcagctcaggccctgcaaccgaccgaccgtctgctgggctccaagtcacctgagaggcgaggtgaggtaagacggacagtaggggtggggtaaggcaggccgctctctcccatggtgacagggagctaagctgagctgagccggactgagctgctctcctcaggactcaggggtagccctgccctcccagctggctgcgatgctctagtgggactttctggaggaacaaacatgggaagacatcgggaaacctgacagcttggtcaagagtctactcgtgccatgtgggtgggggcaattcaaggggtccttagtgaaaagcagttgggagcttctcatcttccccacgccctcctctttcctgaggaccacagcaggggagggatctgcccaaggacacaaggtgacttagtagaagcagggcatgatgaagatctctagccaccaacatctggctaggccagggcaaagggacctgggccatgacctgtctgttttataaaccgaaatcgctgcagcccttgtcttggcatgagggtttcatggtagagcacgatgcctgctggagggccagcgggggtgggccatcccatccccaagggtcactggggttaaggacctgcccagactccctgggtggagccctgggccttggcaggggcccagctggttcctggccactggggccagagaacctgggggctgctgagttagttcagctgaaaaaccaacaaaagggcctccctgctatacccgggggctcatgagtcaccggggctttgggggagtgccaacatcatcatgacacagcaagaatcttatcagaccaatggggaagtcagcccagaaatgttctgaggaaaggggaggcgggggccgctgggtcatccctcccacaggcccatcattgggatgcgtcctgaacgcccatcaagcccatggcccttgtgatccaggtggggaaactaaggcccagagaagtgaggaccccgcagactatcaatcccagtctcttcccctcactccctgtgaagctctccagcatcatcgaggtcccatcaggtggggaaagatgctgttccaggcgcacactagtctacaaggccagagctttctggaagggggcagtaagtacctcggctccctttctggtaggggtgggagtcctgagaaggcaggaagtggcccacttggtaactctgaggtgccatcagggcccccaggaaggaagctgggtgtgtgggcaagtgtgaggtaagctggccagggaggaggaagggacagaggaaggccacgtgggtccagcctgccccagggtgtcctgcttgcccaggctgtgggtctgccagccacttgcctgctttcagtttctaggtcatgctgagcttgttcccaactcggggctccgggcatttgctcttccttctgtgtttgtgctctcccggccctctttgtgggatctatgcgctttgggggactggggacacagggcccatgtgtatcttctgaaacacacgtcagcctgaactcttgctggtctgcttacttgccgtggttccctggccgcaatagcacataggtcccatgaggagggcagggactggctgctgtggcccagaagtacccaatcgctgtctgctcaatgaacggagaatgggctgctttcctggaacagcagattctaggatcacgtgccctcaagtgccaccctgcctacctcccgcaccgagtgaggcatcaggcgtggaagaagcccgggagccggagctgttccaggtgctgcctgagcacgccacctcccatctcccccccagcaggaagaggaaaaaacaaaccacgaggctcttcagagagaggaccccttgtcccctacccacagtgctggagctggcacttcctatttctgctttgaaagcctcaggttgtcactctcag

SEQ ID NO: 1378 - DNA, 6000 bp, Homo sapiens
cgcctgtaatcccagcactttgggaggccgacacgggtggatcatgaggtcaggagattgagaccatcctggctaacacagtgaaaccctgtctctactaaaaatacaaaaaattagccaggcatggtagcgggcgcctgtagccccagctacccaggaggctgaggcaggagaatggcgtgaacccgggaggcaggagaatggcgtgaacccgggatcgcgccactgcactccagcctgggcaacagagcgagactccatctcaaaaaaaaaaaatacaaaaaattagcagagtgtggtgacacgcgcctgtagtcccagctactcgggaggccgaagcaagagaatcgcttgaacccaggaggcggacgttgcagtgagctgagattgtgccactgcactccacccttggctttcagaacagccccttctcctggtttcctccctatcttgctggctactcctgcccaggcactctcactgggttcccatccttcatgttgggctgccccagggctctgtcctaggacatcttcttctctgtaacttcattcactcccacaggaattctgtccagtctcatgccttgaactccaatcttgatgcttaattagacctcttttctaaactccacattcatttatcaaactcgacatttctacttggttatctagtagccttctcaaaacgaacctctctaagacctccgacagtccccaaaacccagatctacccaaggccttctttgttatcagctgatggcgaatccatcctccagctgtcaaaagtcttttttgattctctctctctctctcacacacacacacacacatacacacacacacacacacacacacaagagcacatctaatccatcaagaaatcctgttaaaatgtatcccccaaccgatctgatcacactgagcaattaacattaactattttaggtgtcataatgatattgtggttgtttttcagagtcctgtcttagagagaggcacacttaaatgtttaaagatgatgtctgaattcacctccaaataatgggaaaactcctaggtatataccggagagaaatgaaaacacatgtgtccacatgaatgcttgtagcagcattactcatagcagccagagagtggaaacaacccaaatgtccatcaactatgaataaacaaaatctagtacatccacatgctataacatgaacaaatcttgaaaatatgctgagaaataaacaagtcacaaaagattaaacattgtatgagtctatttatataagatgtctacaacaggcaaatccacagagacataaagtggattaaagattgctggggagtgccacttagggctgaggggaagataagctgagctaaagggtatggggtttctttgaggggtgacgaaaatgtcctgtgaatatacatacaacaaaccattgaattgtacactttaaatggatgaactgtgtgacatgctaatgatatctcaagctgttattgaaaataatagtggtggccaggcatggtggttcacacctgtaatcccagcactttgggaggtcatggcaagtggatcacttgaggtcaggaattcaagaccagcctggccaacatgacaaaaccctgtatttaccaaaaatacaaaaaaaaaaaaaatagctgggagtgatggtgcatgcctgtaatcccagctatttgggaagctgaggcaggagaatcgctcaaacctgggagatggaggttgcggtgagccaagatcgtgccactgcactccattctgggcgacagagtgagactgggtctcaaaaaaagaggccgggcgcggtggctcatgcctgtaatcccagcactttgggaggccgaggcgggcggatgacaaggtcaagagatcaagaccatcctggccaacatgatgaaaccccatctctactaaaaatacaaaaattagctgggcgtggtggtgcacaactgtagtcccagcggctgaggcagaagaatcgcttgaatccaggaggcggaagttgcagtgggtggagatcacaccactgcactccagcctggtgacagagcgagattctgtctcaaaaaaaaaaaaaaaagaaagaaagaaagaaaaagaaataaaataataatgggagaggattgcgagggatataaacaaaattagtcagaagttgataccttcaattgttgaagttggtagctgtgaatgtaagatttactatactggccgagcgcagtggctcacacctgtaatcccagcactttgggagtctgaggcaggcagatcacctgaggtcaggagttcaagaccagactggccaacatatagtgaaaccccgtctctactaaaaatacaaaaattagctgggcgtagtggcgcacgcctgcagtcccagctacctgggaagctgaggcaggagaatcgcttgaacccaggaggaggaggttagagtgagctgagatcatgccactgcactccagcctgggcgacagagcgagactccatctctcaaaaacaaacaaaccaaaaagatttactatactcatttttctactttcgtacatttttgaaatttccaataataaaatgctcaaagcactgtctctgagctggattactgcaattacctcttaccacgccacccttcttttacccttgcccactatggtctgttctccccaccactgctagaacgatcagtgtaagacgtaattccgatcacattcctcctctactgagaaccctaccatggatccccgttgccttctgcgtaaaagccaatctccctacaacggcctacaaggccctgtaccatcgggttccccatcccttcctctccaactgtgctcccctccctcactctgctccagctatagtgacctccgtgctattcctctaatgtgccaggagagcccattcattctcagatcacagaaacagtatgacgataggcagatgttgtcttgcaaaacgagcaaacaggcatatgaaatcagatacctagctgccaaactatatgtgaggcatttccgaagaatttaacgacctcgatagagcgcagtcaagtttggtgaacagaatatgtctctgaactagaggagtcctcacacaaggagtagggtcagaccccgcagtggaggaggagggaggagtagaaacagtccagctcgccgcccaagtaacctgggtcctgaatcggcccgccttggccagtgctccagaagcgcggagcaggaacgggctggggcccaaaaaagaggggggagcctgaacgtccgggggaagtttcggaggcggcggaacgcccacggatggaaccctgtctttggggaaaaggaccacacctgtcagcagagtccgtcagacgtgagaagggtgggagcggcggactgtgaacgctggtagggccccggcgctccgagaaagtcccagtttcgcggtcgcccttccctaccacgcttccggcttccggtgtcatagctgtgggatccggaagtaaaaacacaagccccgcccccgagaactcgggaagccggcgagaagtgtgaggccgcggtagggccgcatcccgctccggagagaagtctgagtccgccaggctctgcaggcccgcggaagctcggtaatgataagcacgccggccactttgcagggcgtcaccgcctacacgccccctcgtctctcggacggcggcgtctagcctcggggcgctcggccgccccgccctctccgggggaggaatcaagaagagactgcccaatagggccggcttgacccgcgaacaggcgagggttcccgggggagtggcgcggcagaaggccccgcccaggagccgagggacagcccagaggaggcgtggccacgctgccggcggaagtggagccctccgcgagcgcgcgaggccgccggggcaggcggggaaaccggacagtaggggcggggcctggccggcgatggggattcgggagcactacgcggagctgcacccgtgcccgccggaattggggatgcagagcagcggcagcgggtatggcaggcagccggcgggccggcctccagcgcaggtgcccgagaggcaggggctggcctgggatgcgcgcgcacctgccctcgccccgccccgcccgcacgaggggtggtggccgaggccccgccccgcacgcctcgcctgaggcgggtccgctcagcccaggcgcccgcccccgcccccgccgattaaatgggccggcggggctcagcccccggaaacggtcgtacacttcggggctgcgagcgcggagggcgacgacgacgaagcgcaggtaaccggccgggcgggcgccgcgcaggcggaggagcgtactgtcccgcgctgcgccgcgcggcggtaaaatacacgctgtttgttgtgcttgagaaccgagcagaatcgagagggtcttaaccaatccctttataccccgcacctcctctcttgagcccctgagaccccgagagcgaaggggacttgccgaccggggtcacccagcttggcaaggggagggctggagctgaactccagcatctgcaccatctcccatgctccaggtcattgtggagttcccgctacagtcgggaatgagatggtcctgggcacgcagttccatgccccacaaggattttactcggttgtccagaattgatgctgtagtcggaatacaccaatgctttgagtaattttgtaatgtacaccctgaatgaaggctgcctaggagagagtggctggagcccagagccagcagtttctaacccatcaaccactccccaatgcccagccgttcacaaggagtgatttgggcaatcaggtgtcaccctggtgtgagaccccagaggaactctcaagaaaggggctaacttctcaatgctctcctgttcttctgccttgttaacgagcctttcttccaccagacagcgtcatggcagagcaggtggccctgagccggacccaggtgtgcgggatcctgcgggaagagcttttccagggcgatgccttccatcagtcggatacacacatattcatcatcatgggtgcatcggtgagtatctcccaggccccaatcttaaaagccaggaagtgcctgctccatgcctcagcttttccaactaattgttgcagggccccacaggctctgctaagttgagctcctcctcccgctcctgctagtgcgccaggatcatcccggctctacctggtgtgcatatgcacttgcaagacttttttttttttttttttttggagacggagttttgctctggtcgcccaggatggggtgcagtggcgccatcttggctcactgcaacctcggcctcctgggttcaagcgattctcctgcctcagccccccaagtagctgagattacaggcatgcaccaccacacccggctaatttttgtattgttagtagagacggagtttcaccatgttgaccaggctggtctcaaactcctgacctcaagtgatccgcccgcctcggcctcccaaagtgctgggatgacaggcatgagccaccacgcccggctgcaggacgtttctgaaccctgtgcctagccgctgaatgtagcccttaatcctggagttgcaggctctttagggactgtctagatggacttcttggggaaaacagggaatgctattcattctgtagttttttcagacctgttcatgccttaacaaatgagttccaaaggcaggatctgaggcctgatctctgcctcttcactaacacttcaagttccgtcgatacaaacacttagcttttctttgaacactgtctctttgcctcaatttcgaaagcctaccaaggagctctgcctcaccccacctggccccaattgtccagcttgtagaaccgccattctgcactcataggaaagacaaaagaatagtatagcatgaggatttccatgggaggggagggaggggtggtcctaggacagccatcgcccgagactagagcaccctcccctgtgtcccatgggg

SEQ ID NO: 1379 - DNA, 6000 bp, Homo sapiens
tcactggggttaaggacctgcccagactccctgggtggagccctgggccttggcaggggcccagctggttcctggccactggggccagagaacctgggggctgctgagttagttcagctgaaaaaccaacaaaagggcctccctgctatacccgggggctcatgagtcaccggggctttgggggagtgccaacatcatcatgacacagcaagaatcttatcagaccaatggggaagtcagcccagaaatgttctgaggaaaggggaggcgggggccgctgggtcatccctcccacaggcccatcattgggatgcgtcctgaacgcccatcaagcccatggcccttgtgatccaggtggggaaactaaggcccagagaagtgaggaccccgcagactatcaatcccagtctcttcccctcactccctgtgaagctctccagcatcatcgaggtcccatcaggtggggaaagatgctgttccaggcgcacactagtctacaaggccagagctttctggaagggggcagtaagtacctcggctccctttctggtaggggtgggagtcctgagaaggcaggaagtggcccacttggtaactctgaggtgccatcagggcccccaggaaggaagctgggtgtgtgggcaagtgtgaggtaagctggccagggaggaggaagggacagaggaaggccacgtgggtccagcctgccccagggtgtcctgcttgcccaggctgtgggtctgccagccacttgcctgctttcagtttctaggtcatgctgagcttgttcccaactcggggctccgggcatttgctcttccttctgtgtttgtgctctcccggccctctttgtgggatctatgcgctttgggggactggggacacagggcccatgtgtatcttctgaaacacacgtcagcctgaactcttgctggtctgcttacttgccgtggttccctggccgcaatagcacataggtcccatgaggagggcagggactggctgctgtggcccagaagtacccaatcgctgtctgctcaatgaacggagaatgggctgctttcctggaacagcagattctaggatcacgtgccctcaagtgccaccctgcctacctcccgcaccgagtgaggcatcaggcgtggaagaagcccgggagccggagctgttccaggtgctgcctgagcacgccacctcccatctcccccccagcaggaagaggaaaaaacaaaccacgaggctcttcagagagaggaccccttgtcccctacccacagtgctggagctggcacttcctatttctgctttgaaagcctcaggttgtcactctcagaacagaggagagcaaaggggaaccctactgatttcaacaaaacaaagttgcccaacccgaagctggccacaggcggaggcagtgaaatgacaaaatcagcttggaaaagcctaaggaccctgggccctcgtttcaaaagctgtcatttgctacacgaaatgctgaggttcaggaaaaggaagacacttgctccaactcacacagcaagcttggatgctctcaatgaggtgtctaataagagctgaaggccaggagtcataagctatcattgtggcctgggttgctctgttgcagtgccttgtgacagcatggggtggggatggagaaagcaacctcagttaccttctcctccagtctgcttcttggactaagggtttaacggtcagagtcctggctgttaaggtttgtggctgatgcaggtatggctctttttatttttatttttttgagatggagtctcactcactccgtcacccaggatggagtgcaatggtgccatctcagctcactgcaacctccacctcctgggttcaagcgattttcctgcctcagcctcccaagtagctgggattacagatgggtgccactacacctaactaatttttgttattttttttttttttttgagatggagtctcactctgtcacccaggctggaatgcagtgttgcgatttctgctcactgcaagctccgcctcccgagttcacgcctttctcctgcctcagcctcctgagtagctggactacaggtgcccacaccaggcctggctaattttttatttagtagagacgggatttcaccatgttagccaggatggtctcaatctcctgacctcatgatccacccgcttcagcctcccaaagtgctgggattacagacgtgagccactgcgcccggcctttttgttttgttttgttttgagacagagtctcgctctgtcgccaggctggagtgcagtggcgcgatctcagctcactgcaacctctgactccctgattcaagcgattctactgcctcagcctactgagtagctgggactacaggcacgcaccaccacgcccagctaatttttgtatttttagtagagatggggtttcaccatgttggccaggatggtctcgatctcttgaccttgtgatctgcccaccttggccccccaaagtgctgggattacagatgtgagccactgcgcccagccaatttttgtattttaagtagagactgggtttcgccatgttggccaggctggtgtcaaactcctgacctcaggcgatccacctgcctcggcctcccaaagtgctgggaatacaggcgtgagccaccgtgcccggccaggtatggctcttctgaggggaccaggctggggctggggctgaggccaagcccaatctactgtgggctccacctggtacctctcctgggtctcaggcttatggggagtcagaggacaatggcccctccttactctgccactggcagagcccttctccctcggctgcctcctcattcccttttggctctccttttctaagttctgatcagaagtacaaaggtgtcaaggagtaggtttgacaaagtgtgacagcgcgttgttctatgtgaacaaagaaccactgagctcagccagcactgaggggcgcacgatgtggaagaactaactagttttgatagagctcctgctcaaggttacaaggtaagttaatggcaaagatggtcatacagtaatgagcagagagattcttgagtgcatccagggttaaaagtgaaaactgagaccacgtgtaatttgagatgaagcccttgttccaccagcccctgcacagtctcactgccccatgggacacaggggagggtgctctagtctcgggcgatggctgtcctaggaccacccctccctcccctcccatggaaatcctcatgctatactattcttttgtctttcctatgagtgcagaatggcggttctacaagctggacaattggggccaggtggggtgaggcagagctccttggtaggctttcgaaattgaggcaaagagacagtgttcaaagaaaagctaagtgtttgtatcgacggaacttgaagtgttagtgaagaggcagagatcaggcctcagatcctgcctttggaactcatttgttaaggcatgaacaggtctgaaaaaactacagaatgaatagcattccctgttttccccaagaagtccatctagacagtccctaaagagcctgcaactccaggattaagggctacattcagcggctaggcacagggttcagaaacgtcctgcagccgggcgtggtggctcatgcctgtcatcccagcactttgggaggccgaggcgggcggatcacttgaggtcaggagtttgagaccagcctggtcaacatggtgaaactccgtctctactaacaatacaaaaattagccgggtgtggtggtgcatgcctgtaatctcagctacttggggggctgaggcaggagaatcgcttgaacccaggaggccgaggttgcagtgagccaagatggcgccactgcaccccatcctgggcgaccagagcaaaactccgtctccaaaaaaaaaaaaaaaaaaaagtcttgcaagtgcatatgcacaccaggtagagccgggatgatcctggcgcactagcaggagcgggaggaggagctcaacttagcagagcctgtggggccctgcaacaattagttggaaaagctgaggcatggagcaggcacttcctggcttttaagattggggcctgggagatactcaccgatgcacccatgatgatgaatatgtgtgtatccgactgatggaaggcatcgccctggaaaagctcttcccgcaggatcccgcacacctgggtccggctcagggccacctgctctgccatgacgctgtctggtggaagaaaggctcgttaacaaggcagaagaacaggagagcattgagaagttagcccctttcttgagagttcctctggggtctcacaccagggtgacacctgattgcccaaatcactccttgtgaacggctgggcattggggagtggttgatgggttagaaactgctggctctgggctccagccactctctcctaggcagccttcattcagggtgtacattacaaaattactcaaagcattggtgtattccgactacagcatcaattctggacaaccgagtaaaatccttgtggggcatggaactgcgtgcccaggaccatctcattcccgactgtagcgggaactccacaatgacctggagcatgggagatggtgcagatgctggagttcagctccagccctccccttgccaagctgggtgaccccggtcggcaagtccccttcgctctcggggtctcaggggctcaagagaggaggtgcggggtataaagggattggttaagaccctctcgattctgctcggttctcaagcacaacaaacagcgtgtattttaccgccgcgcggcgcagcgcgggacagtacgctcctccgcctgcgcggcgcccgcccggccggttacctgcgcttcgtcgtcgtcgccctccgcgctcgcagccccgaagtgtacgaccgtttccgggggctgagccccgccggcccatttaatcggcgggggcgggggcgggcgcctgggctgagcggacccgcctcaggcgaggcgtgcggggcggggcctcggccaccacccctcgtgcgggcggggcggggcgagggcaggtgcgcgcgcatcccaggccagcccctgcctctcgggcacctgcgctggaggccggcccgccggctgcctgccatacccgctgccgctgctctgcatccccaattccggcgggcacgggtgcagctccgcgtagtgctcccgaatccccatcgccggccaggccccgcccctactgtccggtttccccgcctgccccggcggcctcgcgcgctcgcggagggctccacttccgccggcagcgtggccacgcctcctctgggctgtccctcggctcctgggcggggccttctgccgcgccactcccccgggaaccctcgcctgttcgcgggtcaagccggccctattgggcagtctcttcttgattcctcccccggagagggcggggcggccgagcgccccgaggctagacgccgccgtccgagagacgagggggcgtgtaggcggtgacgccctgcaaagtggccggcgtgcttatcattaccgagcttccgcgggcctgcagagcctggcggactcagacttctctccggagcgggatgcggccctaccgcggcctcacacttctcgccggcttcccgagttctcgggggcggggcttgtgtttttacttccggatcccacagctatgacaccggaagccggaagcgtggtagggaagggcgaccgcgaaactgggactttctcggagcgccggggccctaccagcgttcacagtccgccgctcccacccttctcacgtctgacggactctgctgacaggtgtggtccttttccccaaagacagggttccatccgtgggcgttccgccgcctccgaaacttcccccggacgttcaggctcccccctcttttttgggccccagcccgttcctgctccgcgcttctggagcactggccaaggcgggccgattcaggacccaggttacttgggcggcgagctgg

SEQ ID NO: 1380 - DNA, 6000 bp, Homo sapiens
catgtgggacttgaaaaggcctagctccaggctggaaatagaagaatttcaccagagatgggagagtcgggacaagactgtttgtggagggagatgtcagtatgctgggaatcctgatcccctacacacctccaagcaggagaagtggagggtaccggcccctcatccagtgtagtgggctgaatggtagccccccgaaaagatatgcccatgttctaacccctgaaacatatgtgattcgggaaaagggtctttgcagatgtaggatctcaagatgagatcattctgggtgacgtgggtgggccctaaatccaacaacgtgtctttatgagagacagaagagagaagccagagggagacgcaaggggaggaggccatgtcgggactgcctcggagactggagtgaggcagccacaagcccaggaataaatggggcagaagcttgggagaggcaagggaggattgccctcttagagcctttgagggtgtgtgcttgctaaccctttggttttggacttctagtctccagaactgtgagattaaaatgtctggccgggcgcagtggctcacacctgtaatcccagcactttgggaggccgaggcgggccaatcatgaggtcaggagatcgagaccagcctggctaacacggtgaaaccctgcctctactaaaaaaaaaaaaaaaaattgccggtcacggtggctcacgcctgtaatcccagcactttgggaggccgacacgggtggatcatgaggtcaggagattgagaccatcctggctaacacagtgaaaccctgtctctactaaaaatacaaaaaattagccaggcatggtagcgggcgcctgtagccccagctacccaggaggctgaggcaggagaatggcgtgaacccgggaggcaggagaatggcgtgaacccgggatcgcgccactgcactccagcctgggcaacagagcgagactccatctcaaaaaaaaaaaatacaaaaaattagcagagtgtggtgacacgcgcctgtagtcccagctactcgggaggccgaagcaagagaatcgcttgaacccaggaggcggacgttgcagtgagctgagattgtgccactgcactccacccttggctttcagaacagccccttctcctggtttcctccctatcttgctggctactcctgcccaggcactctcactgggttcccatccttcatgttgggctgccccagggctctgtcctaggacatcttcttctctgtaacttcattcactcccacaggaattctgtccagtctcatgccttgaactccaatcttgatgcttaattagacctcttttctaaactccacattcatttatcaaactcgacatttctacttggttatctagtagccttctcaaaacgaacctctctaagacctccgacagtccccaaaacccagatctacccaaggccttctttgttatcagctgatggcgaatccatcctccagctgtcaaaagtcttttttgattctctctctctctctcacacacacacacacacatacacacacacacacacacacacacaagagcacatctaatccatcaagaaatcctgttaaaatgtatcccccaaccgatctgatcacactgagcaattaacattaactattttaggtgtcataatgatattgtggttgtttttcagagtcctgtcttagagagaggcacacttaaatgtttaaagatgatgtctgaattcacctccaaataatgggaaaactcctaggtatataccggagagaaatgaaaacacatgtgtccacatgaatgcttgtagcagcattactcatagcagccagagagtggaaacaacccaaatgtccatcaactatgaataaacaaaatctagtacatccacatgctataacatgaacaaatcttgaaaatatgctgagaaataaacaagtcacaaaagattaaacattgtatgagtctatttatataagatgtctacaacaggcaaatccacagagacataaagtggattaaagattgctggggagtgccacttagggctgaggggaagataagctgagctaaagggtatggggtttctttgaggggtgacgaaaatgtcctgtgaatatacatacaacaaaccattgaattgtacactttaaatggatgaactgtgtgacatgctaatgatatctcaagctgttattgaaaataatagtggtggccaggcatggtggttcacacctgtaatcccagcactttgggaggtcatggcaagtggatcacttgaggtcaggaattcaagaccagcctggccaacatgacaaaaccctgtatttaccaaaaatacaaaaaaaaaaaaaatagctgggagtgatggtgcatgcctgtaatcccagctatttgggaagctgaggcaggagaatcgctcaaacctgggagatggaggttgcggtgagccaagatcgtgccactgcactccattctgggcgacagagtgagactgggtctcaaaaaaagaggccgggcgcggtggctcatgcctgtaatcccagcactttgggaggccgaggcgggcggatgacaaggtcaagagatcaagaccatcctggccaacatgatgaaaccccatctctactaaaaatacaaaaattagctgggcgtggtggtgcacaactgtagtcccagcggctgaggcagaagaatcgcttgaatccaggaggcggaagttgcagtgggtggagatcacaccactgcactccagcctggtgacagagcgagattctgtctcaaaaaaaaaaaaaaaagaaagaaagaaagaaaaagaaataaaataataatgggagaggattgcgagggatataaacaaaattagtcagaagttgataccttcaattgttgaagttggtagctgtgaatgtaagatttactatactggccgagcgcagtggctcacacctgtaatcccagcactttgggagtctgaggcaggcagatcacctgaggtcaggagttcaagaccagactggccaacatatagtgaaaccccgtctctactaaaaatacaaaaattagctgggcgtagtggcgcacgcctgcagtcccagctacctgggaagctgaggcaggagaatcgcttgaacccaggaggaggaggttagagtgagctgagatcatgccactgcactccagcctgggcgacagagcgagactccatctctcaaaaacaaacaaaccaaaaagatttactatactcatttttctactttcgtacatttttgaaatttccaataataaaatgctcaaagcactgtctctgagctggattactgcaattacctcttaccacgccacccttcttttacccttgcccactatggtctgttctccccaccactgctagaacgatcagtgtaagacgtaattccgatcacattcctcctctactgagaaccctaccatggatccccgttgccttctgcgtaaaagccaatctccctacaacggcctacaaggccctgtaccatcgggttccccatcccttcctctccaactgtgctcccctccctcactctgctccagctatagtgacctccgtgctattcctctaatgtgccaggagagcccattcattctcagatcacagaaacagtatgacgataggcagatgttgtcttgcaaaacgagcaaacaggcatatgaaatcagatacctagctgccaaactatatgtgaggcatttccgaagaatttaacgacctcgatagagcgcagtcaagtttggtgaacagaatatgtctctgaactagaggagtcctcacacaaggagtagggtcagaccccgcagtggaggaggagggaggagtagaaacagtccagctcgccgcccaagtaacctgggtcctgaatcggcccgccttggccagtgctccagaagcgcggagcaggaacgggctggggcccaaaaaagaggggggagcctgaacgtccgggggaagtttcggaggcggcggaacgcccacggatggaaccctgtctttggggaaaaggaccacacctgtcagcagagtccgtcagacgtgagaagggtgggagcggcggactgtgaacgctggtagggccccggcgctccgagaaagtcccagtttcgcggtcgcccttccctaccacgcttccggcttccggtgtcatagctgtgggatccggaagtaaaaacacaagccccgcccccgagaactcgggaagccggcgagaagtgtgaggccgcggtagggccgcatcccgctccggagagaagtctgagtccgccaggctctgcaggcccgcggaagctcggtaatgataagcacgccggccactttgcagggcgtcaccgcctacacgccccctcgtctctcggacggcggcgtctagcctcggggcgctcggccgccccgccctctccgggggaggaatcaagaagagactgcccaatagggccggcttgacccgcgaacaggcgagggttcccgggggagtggcgcggcagaaggccccgcccaggagccgagggacagcccagaggaggcgtggccacgctgccggcggaagtggagccctccgcgagcgcgcgaggccgccggggcaggcggggaaaccggacagtaggggcggggcctggccggcgatggggattcgggagcactacgcggagctgcacccgtgcccgccggaattggggatgcagagcagcggcagcgggtatggcaggcagccggcgggccggcctccagcgcaggtgcccgagaggcaggggctggcctgggatgcgcgcgcacctgccctcgccccgccccgcccgcacgaggggtggtggccgaggccccgccccgcacgcctcgcctgaggcgggtccgctcagcccaggcgcccgcccccgcccccgccgattaaatgggccggcggggctcagcccccggaaacggtcgtacacttcggggctgcgagcgcggagggcgacgacgacgaagcgcaggtaaccggccgggcgggcgccgcgcaggcggaggagcgtactgtcccgcgctgcgccgcgcggcggtaaaatacacgctgtttgttgtgcttgagaaccgagcagaatcgagagggtcttaaccaatccctttataccccgcacctcctctcttgagcccctgagaccccgagagcgaaggggacttgccgaccggggtcacccagcttggcaaggggagggctggagctgaactccagcatctgcaccatctcccatgctccaggtcattgtggagttcccgctacagtcgggaatgagatggtcctgggcacgcagttccatgccccacaaggattttactcggttgtccagaattgatgctgtagtcggaatacaccaatgctttgagtaattttgtaatgtacaccctgaatgaaggctgcctaggagagagtggctggagcccagagccagcagtttctaacccatcaaccactccccaatgcccagccgttcacaaggagtgatttgggcaatcaggtgtcaccctggtgtgagaccccagaggaactctcaagaaaggggctaacttctcaatgctctcctgttcttctgccttgttaacgagcctttcttccaccagacagcgtcatggcagagcaggtggccctgagccggacccaggtgtgcgggatcctgcgggaagagcttttccagggcgatgccttccatcagtcggatacacacatattcatcatcatgggtgcatcggtgagtatctcccaggccccaatcttaaaagccaggaagtgcctgctccatgcctcagcttttccaactaattgttgcagggccccacaggctctgctaagttgagctcctcctcccgctcctgctagtgcgccaggatcatcccggctctacctggtgtgcatatgcacttgcaagacttttttttttttttttttttggagacggagttttgctctggtcgcccaggatggggtgc

SEQ ID NO: 1381 - DNA, 6000 bp, Homo sapiens
acttgccgtggttccctggccgcaatagcacataggtcccatgaggagggcagggactggctgctgtggcccagaagtacccaatcgctgtctgctcaatgaacggagaatgggctgctttcctggaacagcagattctaggatcacgtgccctcaagtgccaccctgcctacctcccgcaccgagtgaggcatcaggcgtggaagaagcccgggagccggagctgttccaggtgctgcctgagcacgccacctcccatctcccccccagcaggaagaggaaaaaacaaaccacgaggctcttcagagagaggaccccttgtcccctacccacagtgctggagctggcacttcctatttctgctttgaaagcctcaggttgtcactctcagaacagaggagagcaaaggggaaccctactgatttcaacaaaacaaagttgcccaacccgaagctggccacaggcggaggcagtgaaatgacaaaatcagcttggaaaagcctaaggaccctgggccctcgtttcaaaagctgtcatttgctacacgaaatgctgaggttcaggaaaaggaagacacttgctccaactcacacagcaagcttggatgctctcaatgaggtgtctaataagagctgaaggccaggagtcataagctatcattgtggcctgggttgctctgttgcagtgccttgtgacagcatggggtggggatggagaaagcaacctcagttaccttctcctccagtctgcttcttggactaagggtttaacggtcagagtcctggctgttaaggtttgtggctgatgcaggtatggctctttttatttttatttttttgagatggagtctcactcactccgtcacccaggatggagtgcaatggtgccatctcagctcactgcaacctccacctcctgggttcaagcgattttcctgcctcagcctcccaagtagctgggattacagatgggtgccactacacctaactaatttttgttattttttttttttttttgagatggagtctcactctgtcacccaggctggaatgcagtgttgcgatttctgctcactgcaagctccgcctcccgagttcacgcctttctcctgcctcagcctcctgagtagctggactacaggtgcccacaccaggcctggctaattttttatttagtagagacgggatttcaccatgttagccaggatggtctcaatctcctgacctcatgatccacccgcttcagcctcccaaagtgctgggattacagacgtgagccactgcgcccggcctttttgttttgttttgttttgagacagagtctcgctctgtcgccaggctggagtgcagtggcgcgatctcagctcactgcaacctctgactccctgattcaagcgattctactgcctcagcctactgagtagctgggactacaggcacgcaccaccacgcccagctaatttttgtatttttagtagagatggggtttcaccatgttggccaggatggtctcgatctcttgaccttgtgatctgcccaccttggccccccaaagtgctgggattacagatgtgagccactgcgcccagccaatttttgtattttaagtagagactgggtttcgccatgttggccaggctggtgtcaaactcctgacctcaggcgatccacctgcctcggcctcccaaagtgctgggaatacaggcgtgagccaccgtgcccggccaggtatggctcttctgaggggaccaggctggggctggggctgaggccaagcccaatctactgtgggctccacctggtacctctcctgggtctcaggcttatggggagtcagaggacaatggcccctccttactctgccactggcagagcccttctccctcggctgcctcctcattcccttttggctctccttttctaagttctgatcagaagtacaaaggtgtcaaggagtaggtttgacaaagtgtgacagcgcgttgttctatgtgaacaaagaaccactgagctcagccagcactgaggggcgcacgatgtggaagaactaactagttttgatagagctcctgctcaaggttacaaggtaagttaatggcaaagatggtcatacagtaatgagcagagagattcttgagtgcatccagggttaaaagtgaaaactgagaccacgtgtaatttgagatgaagcccttgttccaccagcccctgcacagtctcactgccccatgggacacaggggagggtgctctagtctcgggcgatggctgtcctaggaccacccctccctcccctcccatggaaatcctcatgctatactattcttttgtctttcctatgagtgcagaatggcggttctacaagctggacaattggggccaggtggggtgaggcagagctccttggtaggctttcgaaattgaggcaaagagacagtgttcaaagaaaagctaagtgtttgtatcgacggaacttgaagtgttagtgaagaggcagagatcaggcctcagatcctgcctttggaactcatttgttaaggcatgaacaggtctgaaaaaactacagaatgaatagcattccctgttttccccaagaagtccatctagacagtccctaaagagcctgcaactccaggattaagggctacattcagcggctaggcacagggttcagaaacgtcctgcagccgggcgtggtggctcatgcctgtcatcccagcactttgggaggccgaggcgggcggatcacttgaggtcaggagtttgagaccagcctggtcaacatggtgaaactccgtctctactaacaatacaaaaattagccgggtgtggtggtgcatgcctgtaatctcagctacttggggggctgaggcaggagaatcgcttgaacccaggaggccgaggttgcagtgagccaagatggcgccactgcaccccatcctgggcgaccagagcaaaactccgtctccaaaaaaaaaaaaaaaaaaaagtcttgcaagtgcatatgcacaccaggtagagccgggatgatcctggcgcactagcaggagcgggaggaggagctcaacttagcagagcctgtggggccctgcaacaattagttggaaaagctgaggcatggagcaggcacttcctggcttttaagattggggcctgggagatactcaccgatgcacccatgatgatgaatatgtgtgtatccgactgatggaaggcatcgccctggaaaagctcttcccgcaggatcccgcacacctgggtccggctcagggccacctgctctgccatgacgctgtctggtggaagaaaggctcgttaacaaggcagaagaacaggagagcattgagaagttagcccctttcttgagagttcctctggggtctcacaccagggtgacacctgattgcccaaatcactccttgtgaacggctgggcattggggagtggttgatgggttagaaactgctggctctgggctccagccactctctcctaggcagccttcattcagggtgtacattacaaaattactcaaagcattggtgtattccgactacagcatcaattctggacaaccgagtaaaatccttgtggggcatggaactgcgtgcccaggaccatctcattcccgactgtagcgggaactccacaatgacctggagcatgggagatggtgcagatgctggagttcagctccagccctccccttgccaagctgggtgaccccggtcggcaagtccccttcgctctcggggtctcaggggctcaagagaggaggtgcggggtataaagggattggttaagaccctctcgattctgctcggttctcaagcacaacaaacagcgtgtattttaccgccgcgcggcgcagcgcgggacagtacgctcctccgcctgcgcggcgcccgcccggccggttacctgcgcttcgtcgtcgtcgccctccgcgctcgcagccccgaagtgtacgaccgtttccgggggctgagccccgccggcccatttaatcggcgggggcgggggcgggcgcctgggctgagcggacccgcctcaggcgaggcgtgcggggcggggcctcggccaccacccctcgtgcgggcggggcggggcgagggcaggtgcgcgcgcatcccaggccagcccctgcctctcgggcacctgcgctggaggccggcccgccggctgcctgccatacccgctgccgctgctctgcatccccaattccggcgggcacgggtgcagctccgcgtagtgctcccgaatccccatcgccggccaggccccgcccctactgtccggtttccccgcctgccccggcggcctcgcgcgctcgcggagggctccacttccgccggcagcgtggccacgcctcctctgggctgtccctcggctcctgggcggggccttctgccgcgccactcccccgggaaccctcgcctgttcgcgggtcaagccggccctattgggcagtctcttcttgattcctcccccggagagggcggggcggccgagcgccccgaggctagacgccgccgtccgagagacgagggggcgtgtaggcggtgacgccctgcaaagtggccggcgtgcttatcattaccgagcttccgcgggcctgcagagcctggcggactcagacttctctccggagcgggatgcggccctaccgcggcctcacacttctcgccggcttcccgagttctcgggggcggggcttgtgtttttacttccggatcccacagctatgacaccggaagccggaagcgtggtagggaagggcgaccgcgaaactgggactttctcggagcgccggggccctaccagcgttcacagtccgccgctcccacccttctcacgtctgacggactctgctgacaggtgtggtccttttccccaaagacagggttccatccgtgggcgttccgccgcctccgaaacttcccccggacgttcaggctcccccctcttttttgggccccagcccgttcctgctccgcgcttctggagcactggccaaggcgggccgattcaggacccaggttacttgggcggcgagctggactgtttctactcctccctcctcctccactgcggggtctgaccctactccttgtgtgaggactcctctagttcagagacatattctgttcaccaaacttgactgcgctctatcgaggtcgttaaattcttcggaaatgcctcacatatagtttggcagctaggtatctgatttcatatgcctgtttgctcgttttgcaagacaacatctgcctatcgtcatactgtttctgtgatctgagaatgaatgggctctcctggcacattagaggaatagcacggaggtcactatagctggagcagagtgagggaggggagcacagttggagaggaagggatggggaacccgatggtacagggccttgtaggccgttgtagggagattggcttttacgcagaaggcaacggggatccatggtagggttctcagtagaggaggaatgtgatcggaattacgtcttacactgatcgttctagcagtggtggggagaacagaccatagtgggcaagggtaaaagaagggtggcgtggtaagaggtaattgcagtaatccagctcagagacagtgctttgagcattttattattggaaatttcaaaaatgtacgaaagtagaaaaatgagtatagtaaatctttttggtttgtttgtttttgagagatggagtctcgctctgtcgcccaggctggagtgcagtggcatgatctcagctcactctaacctcctcctcctgggttcaagcgattctcctgcctcagcttcccaggtagctgggactgcaggcgtgcgccactacgcccagctaatttttgtatttttagtagagacggggtttcactatatgttggccagtctggtcttgaactcctgacctcaggtgatctgcctgcctcagactcccaaagtgctgggattacaggtgtgagccactgcgctcggccagta

SEQ ID NO: 1382 - DNA, 6000 bp, Homo sapiens
cttgccaaatgcttctggaatggatggatggaaccccatctctactaaaaatacaaaaatcaggcgtggtggtgcacacttgctatcccagctacttgggaggctgaggcagaagacatgcttgaacctgggaggcagggattgcagcgagccgagatcacgccactgcactccagcctgggccacagagcaagactccgtctcaataaacacacaaacaaaaaaacccacatctacttctattattaacccacctacttttctgagccccaaggggctttctggacagattccagcagagcggctgctggtcaggcagcagtgatctctaaagctacgcaggtaattttatcagatgctggcagagaaggggttctcatgggtgggtacctggcaggcggatcggggctcattcctttcttcttggtccttggaggggcagggcagtgagagacacagctctacccccactacccagcagctgttgtctctcccacttccaattcctgggtgtgaggcccacctgatcctcctttcccaaggaggctgtgtggccccaaaggcctcccaggtcatgccctagtcaggcatagcaactgtgttgttccctcccagatacgaggggcaaaggagttagtgtccaaggctaagtcccacgtgcagcactctgtatggaaaaacagccccaattagcaattcattcatccatccatccatccatccattcatccatccatccatctattcatccatccatcatccattcattccagaagcatttgctgagtgagcacatccatctatccatgcatccatccacccacccattacccatccaattatccatccattccagaagcatttgccgatcgagcgcatccatccatccatccacccatccattccagaatcatttaccaagcaaacacatccatctatccatccatccacccactcattgattatccatctatccatccattatccatccatccatcccagaagcatttgccaacagagtgcatccatccatccacccacccacccattcattatccatccatccattcattctagaatcatttgccaagcaaacatatccatctatccatctgtccatccacccattcattatccatccacccactcattatccatccatcccagaagcatccattattcatccatccacccattatccatcatccatccacccattatccatccatccatccatcatccatccatctatacattatccatccatctatccattatccatccatccatccattatccatccatccatccattatccatccacccacccattacccatccaattatccatccattccagaagcatttgccgatcgagcacatccatccatccacccacccattcattatccatccatccatcatccatccatccatccatctatccattatccatctatccattatccatccatccgttatccactcacccatccatccatccatcccagaagcatttgccaagcacatcctgggagccaggcccaagcaggcgggcatcctcctggctctgagaggagcttgagcagagcccacagacagcaccaccctgctggcgggtcaccaagccaccaagccagtgcaggctgaaggctgagcacacagagcaccggtctcagtgtctggacatggttagccgtccccacccgcatggaaggaaacttcttctctcccctaagacaggctttgcagacttggaaagggaacgccgtgttgcagggctcaggcctggagccccggccagagcagatgcgagccagcctcatctggaaatagcagctctggtcccggcctcgctgaggcactgaaaaccagcaccagggccccgtccagcccggcctcgctgaggctgggaaacaaacacaggtctgtaaggcgcagctccccagcaaactccccacccctgcccagcacccacagcgctcctggcctctgtcctctattccaggacccctgtagcgagcctggcttggtcctgggtcctcaggggacactgtccacccccgctgccctggcagagcctcaggaatgtgcttggtctccacagccctccccacagcaatgtcccaaggttagacctacccatgcctcagtgacttctgagacacccgtcccgccgcccagcagccactccagcctccagagctggccccaacctccagccccaggctgagccgccctccccagaggtcaggaaaagcctcaggcagggctcacagctgcacccaggagtcacccagggtgaccccgctctctggggcgggtcactcctgcccacccacagccggggactgtcattttctcagtacacaaaggagagaaaggaaaaacaagagcgagaaagacacagggagagaaaaggaagagagaaggaaagaaaaaagaaagacacagggaaagaagaggaaagaaaagaagggaggaaggagggagagtgggaggagagggaaagaaagggagagacagggaaaggcaggaaagggagagatggggaaaggcaggaaagagagaggcagggaaaggcaggaaagaaagggagagacagggaaaggcaggaaacgcaaggaagcaatgggaagggaaagaagtgaaaaggaaggcggggagggagggacgggagaaagggaggaaaagagcaaaggagacagggagacaggaaagaaaaaggggagggaggcaaacggggaacgggagaaaaagaaaggaagggagagggaatgatggagaaaaacaggagggagggaggagagaagaaaaaggaaaaggagggaggagagaggaaagaggcagggaggtaggatagaaaaagacggaggagagaagaaaaaagaaaaggaggcgggacgcagtggcgcacgactgtaatccagcactttgggaggccgaggtgggcggatcacctgaggtcaggagttcaagaccagcctggccaacatggtgaaacgccatctgtccttaaaaaaaaaaatagccgggtggggtggctggcacctgtaatcccagctacttgggaagttgaggcacaagaatctctagaacctgagaggcagaggttgcagtgagctgagatcacgccactgcactccagcctcggtgacagaacaagtctccatctcaaaaaaaaaaaaggaaaacagggagaaagggagaaacagagaggaaggaaagaacaagacaggaaagaataaaaggaagaagaaaaagagaggcaaagggagagaggaaaaatgaaaaaaaaattaaaaaatggaaaagagacagctaggcgtggtggctcacacacctgtcatcccagcactttgggaagccgaagtgggcggatcccctgaagtccggagttcgagaccagcctgaccaacatggcgaaaccccgtctctactaaaaatataaaattagctgggcgcggtggcgcatgcctgtcattccagctacttgggaggctgaggcaggagaatcgcttgaacccgggaggcggagcttgcactccagcttgggcaacaagagcgaaactctgtctcaaaagaaaaaaaaaacggaaaagagagaggggagaaagggacgagaggaagggagacaggaaataaagaggaaaaggaaaagagagggaaggagggaaaggcagaaaagggaggaagggaaggaaagaggaaaagggaaggagagacggaaagagggagaaaaaagagggagggagcaaagaaaaaacagaggaagggcggagggagaaaagcagaaaaaggaaggaaaaaaatgaaaaagagggaagaaacgtagcaagaaaggaaggagaaagggagagagaaatgaaagaaaaagggagggagggaaacgaaggcagagacggaaagacggagaaaaaggagggaggcgggaaagcagcaaaaagcaaaggcaagcagggaaggaagagacggggagaaaagggcgggcgggagagagccgggaagggagaggaggcgggaggagggaggagggaggcgggagggagggaggagggaggcgggagggagggagggagggagggaggaagggcggagtgggaggtcgcgaaggaggaccccggccgcagcccccgccgggcagacacgggcacagacacggggaaataggggagcccgggcgggtgggcgcggcccacggaacccccagccccggcgcggagggcaccgcggggtcaaagaacggaggcccagagagatcccccccccaccaacctaggccgggcgcggagggcggcgcggagtcacggatcggcagcgggactgagccgcgcccacgtggaagccgccgcaggcttcgcgcggggccccccgggtgcacgcgggcaggggccggggtctcccgacgcacgaccccggagagtgttgaaagggtcggagctgcccggaggtcaagggtcaagggtcgggggtcggggcaccacatgtcgcacatcccggcggggtcgccgcggcctccgggagaaagcggacgacgcactcggagcgaactgggcatcagggtgggcttctgactccgcagctgccctcccgcccgctcgggtactggcagcggcctgaccttcacaaggtcaaggctgccgcggaacccccagcggcccctacggcgcatgggcggggcctggctcccggcatacctaggggtgcggggcgggacgtctccggggagcgcagccaatgggcgcggttcgctggagtgcggggcgggacgcagcgggattcccggcagccctcagaggcgaggcacgcaggctggtgtggggcggggcctggcggcgcagccaatgagcgcggcgcgaggaggcgcgggggcggagagtgggcgtggcgtcggcgtcttagcggctgcgcggtggctgctccgtcctttcggtccaggcggcggcagggctgagccagcgacgccctccattcactctccgcgcccgttctccggctgtcctcccgttccgctgcccgccctgccaccatgacggaacaggccatctccttcgccaaagacttcttggccggaggcatcgccgccgccatctccaagacggccgtggctccgatcgagcgggtcaagctgctgctgcaggtggggacgcgggcgcggccgctccggggactaggggacgggaaccgagtggccgggtcgggcggggacgtgggcagcagagccttgcaggcgggcgccggaagtggaaggccgcgatcgctttgtccacgcgccgccggcttccgggggccgcgtcacgtgaccgctgctgcagggcgtggcgacgtccacgcgtgcgcactgggcccggcgggcggggggaaatgcggcacggattggagggcgcatgcgcgctgagcagggcccatggacggaccctgcggctggcgggccttgaccttgagctcaatcctgcgggtcccccggctgggaccaacccttccggtggatgcctggcaggtgtctgctcttgctccctccaccgtgaagggtaattctaaggccaatagggcaacgagcctgcccgcaggtgtcctggaataaccaggatatggttattggtggttcttacccccttcttagctcatttgtgcaattctgatccagagcaatgcattttttgtcttttgggagaggcttatagaaagtagcatgatgcctaggaacattgccgccaggacgtccttgctaacgttgtactccgagtgacagctcggtgatgggaatgaataggcttggctgcaaggacaggtcacgcccgcgatcccagcgcttttgagaggcccggggagtattgcttgaggccaggagtttgagagcagccggggccacacagcaagacctcacctcaaaaaaaattattttaacttaacgaagcaggacgtcccagtgcattgagaggcccggagaggatcgcgtgagctcaggagtttgagaccagcctgggcaacagagcaaga

SEQ ID NO: 1383 - DNA, 6000 bp, Homo sapiens
gtgtaagggaatggatgaaaggtgaatgtggagctgctccaagatcatcaaggtcaaaatgaggcaaggatctcattttaaaagcaagaaagtaaacgctgactcagttttcacattacaacttcaaattattgatataccataatagtaccaaaattaaagaaatgaggaaaatatctttttttgtttgtttgttttggagataggatttcactcttgttacccaggctggagtgcagtggcgcgatctcagcacactgcaacctccgcccaccgcaacctgcgcctcccaggctcaagcaattctcctgcctcagcctcccgagtagctggggttacacgcgcctgccaccacgcctggctcattttgtatttttagtagagacagggtttctccatattgctcaggctgttctcgaactccagacgtcaggtgatctgcccgcctcggcctcccaaagtgctgggattacaggcgtgagccaccgcgcccaacctcattttaaaaacaagaaagtaaatgctgactcagttttcacattagaacttcaaattttgatataccataatagtaccaacattaaagaaataaggaaatttgtttttgtttttgtttttgttgttttttgagacagagtctcgctctgtcgcccaggctggagtgcagtggcgcgatctcggctcactgcaagctccacctcctgggttcatgccattctcctgcctcagcctcctgagtagctgggactacaggcgcccgccaccacgcccggctagttttttgtatttttttttttagtacagacggggtttcaccgtgttagccaggctggtctcccatctcctgacctcgtgatccgcccgccccagcctcccaaagtgctgggattacaggcgtgagccaccacgcccggccccaggaaaagatctttttaaaatggaagtacgatcacggaaaatagggaaagcattttgcatttttatgcggccacttcctggctgaatatcaatgaagggatattagtagtgactacatgtgcagttatttacaagctagaggaaaaaccggtgaggaaagaccaagactgtttattaggcttccattaatcataaactacgcaaggcatttggggaagtaatggtgggtagacaaaaccaaacaaaccaacaaaaccaaaacaaaataagacatagaactttaaactgcattttatcttactacatagtaatacaattcttaaattattaggcacactcaaaataaggaatttccacataactccagcattgtttattaaggaacagaatactttactttaaagggaattatcagccgggcgcggtggctcacgcctataaccccagactttgggaggctgaagtgggcggatcacttaaggtcaggagttctagagcagcctgaccaacatggcgaaacccagtctctactaaaaatacaaaaattagccgggcatggtggcgcgtgcctgtaatcccagctacttgggaggctgaggctggagagttgcttgaatccaggaggcagaggctgcagtgagccgagatggcaccactgcatttcagcctggatgacagagtgagactccatctctaaataaataaattatactactcaaaaatagcaatttatatttgtgaagaacttctgactgtacttaagttcagagttaattctgttttgtttccttccagaagctgttatataagctaacatacaaaaataaaagtgctactaaataaatgatatgtcctgaaaaacccataaacatttcaggttacatttcctgattcactgttaaaattatgaatacgtttttttttaagttgtttaactttttctatccttcgtatttgctcttggtgaaatgtttccactaccttatattgttatcacactaaatttaaattttatttcaaactaattttaaaatgtattatccttaaatgaaaacccttcattctgtaattattgaaagcagtaccactagtattaaacatattactataacattaatttaaaatgaacccctttactgcgtcaaaatgcctaatgttaaacagcctccgacaattatataaagacttaaaataaggtcaaaggaagagaagcatcaggaaaaactttcaatgaaaacaaaaaatttttgccaatcttaaaaattacaattactcatatcattgtgcacagtatttttcttgcttccaaatgaaaagttagaagtgcttattttgtatctaacagctcttgaaacatcagtaggttgaggaaggtgttcattaaaaccgatttttttactcctgcagtttgaatactgagaatgtcgacagtttgttaacacaattgacagatgtaacaatacatagtaacccttataaaatctagagtcatgagaagataaactttctaatattgaaaaaccttcactttgctttaagtaacaagtataaataacaattaacatttaatgagtgcttgtctagtaagcactgatctttacccttactttctatcatagtaatctataattattttttttttttgtctttctccccaactaatccagaagctccatggggataggaactttgtcttgttccttactgcatgcctagcacctagtatgcttaacacatagtaggaggcactgacacatagtaggcatattatgcagaacaacacatgcttcataacttagtattctcaatgtcgcaaacagtcatgacctagaggcttatgaaaatgcaacagaatagaaagcagagtttattacatttagtagaataaaaattcttcagtgaaacttatagtttatatgtacacatatgtcccatataaaatttatttcttactataggtaaacattttaagaagtcttaaaatcactgctttatggggattatttcatttgctccccacaataaccctatggacaattccataacttccattataacagaatcgaaatttctagatgttatatatgctgtccaagttgacagcgccatctaaaagtacagacattaagtccaacagagcttaaaggaaaataaatacagacattatttgtacagatacttgctcatatggtaatgtggtaagaaaatctaaattaataaggttttgataatagtaattatggcttgattagtaaatacaaacataggctttgaaggcaagcctgataatacctggctctgcaactaaccagctgtgtgggctctggcctgtaattcaacctctctgagcttcgctttccccatgtgtaaaatattcacacgattggtgtaagctgcagatgatttactgtatgtaaatagcctaaatcaattaaaagggggctcttgtgattaaaataattattagtgtttccccccactgatcccataaatcacattcaatccactgtgccataatttaaatgtgtaaaaactgtgaatcagacttttattggattaaatagcaacgtatgggaactgaacaaaaatggcatagagctatccaagagtttctgctgtcgccggttgagaaagatgccaagttaagatcaaggagttgattgaggtaactacgggaatctgaggaaacatcgttgcttaactgtaaaaactaaatcaaactatttcatcctcctcaagaccacagcaacatccatcttgctcctctgtagcgtggacggggcagaacccaggtgttaggaaacgcacctggtctgctcccgcccactaggccctgggcacctcggggctagggacagaggtttggagcaactcaccccggagactccgttgatactgccccagaatctcctccagggtagagttctccggggacttcgccatgcacgcactctaggcccagagctgggagttacgtggggaaatgtccagctttctcccttccgagaacaacaggcctgtggccggggagcgcccgcctgcttcctgccgcggctgtcacaggggagcctagaatcccgcacagagctcttgggggctcttcccacccactggccctcgctttgcacgtcgggagttgtagtcctcacgttcagaacctgcaagctcgacaatcctcagggccttccagttacactacaattcccagaaaccactgcgctccaggcgctagcttggacggtttggctgccagagcctgctgccaagagacaggcttgcaggccccgcccttttcctccagcccagcctggtttagtcccgcctccatcccactcttcagctgcctggaccacccaaatgacagaaagggctcactgaaggccttgacgcttcgaaatttgctaatatgcagcagttgatccccaggctactcaaggacgcagatagtaaactctgaaccctgcttcagttgcgagattttttaaaacggtcgaataaatcttcaagaaatagaagctctaaatcttccaaacagcctagattgtaaaggcggccgacactacaactcctagcatgcccagcaaccggaccttcacttggagttggcgctctgcccgctgggaactgtagtccttgttggttgcggtcccacctaacgccgaggtcctcttcattgttcaagctggtctttcggggcacgcctgcgcagtgggcaagctggaaaagcgtgtgggtgagaccctcgcacaaccccttttcattgtctgtgtgtggcgcctgcgcagtaagggatcgttggaactgggcaggaggggatagggtccggctcctcgccctttcccgaggcgcctgcgcactaggcagtcggtctttgccgttaccgctatgtgtggggcgtgtgtggaataacgttattgcccagcggagctgagggccccggagctcgaccgcagcggcagcgacgacaacagcggcgacgacgacgacgacgaggtggggggaggacggcgtgcgagagactcacgggacgcgacgcgccccgcctcccccgtccggtccctctctccacggtaaggggtaagtgatgcgatcggctgctcggtgtaggcgccgcagccgcagccaccgccgcggctgctttccacatcctgctcctcgggtttgcggcgaggactcgggcgccgcccgccgcggggcgggggtgcggggctggaccgcgaagggggcgcttcccgggtgctccgcgcggcgccgccacccccaccctctgcccgcctgggacccggggcttgacgggaccacccttcccatcccccacccgccgccccccggagctccagtcctgcggccccccggctttcccgagccccttgctgccgcctccgcatcccctaagtgcattgaatcattttcagctttcgactggctttgtgcagccctcccccctccgccgtagcagtttgcgaggggtgcgggcggagcattggagggaatggctgcgctgccgctggggaagggatttttcccccattggagcagctccccgggccaatcccttttgtgtgattggttttggggtgtgaggcggttggcgaggtcaggcgagcaaccttttggacgcgttgggagggcgtggaagacgcggtgtcatgcaccctgcctggcgactgcaccccgtggaggctctggctctgtagtaaacccgggggaggagagagtggcttcctgtcggcttcattgtcctaggattcagatgtagggttttggtacgtttcgcttccattttatgcaagcgatgaaaaaataacatttgcagctgcctaacacagggcgggaagacgtgggatttgtatactaagtcacagaatctctgttcggtggtgtttcgtagagttttatttatttatttatttatttatttatttattttgaggaatgtaaggaagacagggactatgcctgctggagtccaagcactgccaaggtgatcaatataaaattactaggtgacgttggagcctgggctagagagggcctgacaacgaagctgttgtgtcagggaaatgaacaagcagaattgtt

SEQ ID NO: 1384 - DNA, 6000 bp, Homo sapiens
aaggtggctaggaatgaggtgaataggtgagtcatgtatacaggtgttgttgataaaattgttatctattcccaacgctgcagcaagagatgagacatgattctgttattaaggctaaaatactgcatttctagcaatttttctcctttctgatatccccttacactcaagtgtgcagtacttaaaatagagcctggattgcctataattgtggcttttttcaccctttcttggctatgaaatagttcatttcatacctcttggctttatacaacgatgtattgaatttagagaaggcgcatgtgctatcttgcccacttacaaatgtagttctcggccattctgtggttgttgaattataactacccatagagtaaatgaacacctaaccttactgccaagagacctcccaaatcacttccagttctagattaaattctgtggttcccaggatacccaggacacatacacttttaaccacactggaaactttcagaccatttactatgtaggaataatacaacagatctgtgggggcaacaaagccttccggtttttctgccagaactctcgttttgaagaagaatcattaaatgtctccaatttcttgtaaaagggcataggcgacccaaagcaagagatatctttagagaagtcaaacagcaaatccactgaaaagtgtaagggaatggatgaaaggtgaatgtggagctgctccaagatcatcaaggtcaaaatgaggcaaggatctcattttaaaagcaagaaagtaaacgctgactcagttttcacattacaacttcaaattattgatataccataatagtaccaaaattaaagaaatgaggaaaatatctttttttgtttgtttgttttggagataggatttcactcttgttacccaggctggagtgcagtggcgcgatctcagcacactgcaacctccgcccaccgcaacctgcgcctcccaggctcaagcaattctcctgcctcagcctcccgagtagctggggttacacgcgcctgccaccacgcctggctcattttgtatttttagtagagacagggtttctccatattgctcaggctgttctcgaactccagacgtcaggtgatctgcccgcctcggcctcccaaagtgctgggattacaggcgtgagccaccgcgcccaacctcattttaaaaacaagaaagtaaatgctgactcagttttcacattagaacttcaaattttgatataccataatagtaccaacattaaagaaataaggaaatttgtttttgtttttgtttttgttgttttttgagacagagtctcgctctgtcgcccaggctggagtgcagtggcgcgatctcggctcactgcaagctccacctcctgggttcatgccattctcctgcctcagcctcctgagtagctgggactacaggcgcccgccaccacgcccggctagttttttgtatttttttttttagtacagacggggtttcaccgtgttagccaggctggtctcccatctcctgacctcgtgatccgcccgccccagcctcccaaagtgctgggattacaggcgtgagccaccacgcccggccccaggaaaagatctttttaaaatggaagtacgatcacggaaaatagggaaagcattttgcatttttatgcggccacttcctggctgaatatcaatgaagggatattagtagtgactacatgtgcagttatttacaagctagaggaaaaaccggtgaggaaagaccaagactgtttattaggcttccattaatcataaactacgcaaggcatttggggaagtaatggtgggtagacaaaaccaaacaaaccaacaaaaccaaaacaaaataagacatagaactttaaactgcattttatcttactacatagtaatacaattcttaaattattaggcacactcaaaataaggaatttccacataactccagcattgtttattaaggaacagaatactttactttaaagggaattatcagccgggcgcggtggctcacgcctataaccccagactttgggaggctgaagtgggcggatcacttaaggtcaggagttctagagcagcctgaccaacatggcgaaacccagtctctactaaaaatacaaaaattagccgggcatggtggcgcgtgcctgtaatcccagctacttgggaggctgaggctggagagttgcttgaatccaggaggcagaggctgcagtgagccgagatggcaccactgcatttcagcctggatgacagagtgagactccatctctaaataaataaattatactactcaaaaatagcaatttatatttgtgaagaacttctgactgtacttaagttcagagttaattctgttttgtttccttccagaagctgttatataagctaacatacaaaaataaaagtgctactaaataaatgatatgtcctgaaaaacccataaacatttcaggttacatttcctgattcactgttaaaattatgaatacgtttttttttaagttgtttaactttttctatccttcgtatttgctcttggtgaaatgtttccactaccttatattgttatcacactaaatttaaattttatttcaaactaattttaaaatgtattatccttaaatgaaaacccttcattctgtaattattgaaagcagtaccactagtattaaacatattactataacattaatttaaaatgaacccctttactgcgtcaaaatgcctaatgttaaacagcctccgacaattatataaagacttaaaataaggtcaaaggaagagaagcatcaggaaaaactttcaatgaaaacaaaaaatttttgccaatcttaaaaattacaattactcatatcattgtgcacagtatttttcttgcttccaaatgaaaagttagaagtgcttattttgtatctaacagctcttgaaacatcagtaggttgaggaaggtgttcattaaaaccgatttttttactcctgcagtttgaatactgagaatgtcgacagtttgttaacacaattgacagatgtaacaatacatagtaacccttataaaatctagagtcatgagaagataaactttctaatattgaaaaaccttcactttgctttaagtaacaagtataaataacaattaacatttaatgagtgcttgtctagtaagcactgatctttacccttactttctatcatagtaatctataattattttttttttttgtctttctccccaactaatccagaagctccatggggataggaactttgtcttgttccttactgcatgcctagcacctagtatgcttaacacatagtaggaggcactgacacatagtaggcatattatgcagaacaacacatgcttcataacttagtattctcaatgtcgcaaacagtcatgacctagaggcttatgaaaatgcaacagaatagaaagcagagtttattacatttagtagaataaaaattcttcagtgaaacttatagtttatatgtacacatatgtcccatataaaatttatttcttactataggtaaacattttaagaagtcttaaaatcactgctttatggggattatttcatttgctccccacaataaccctatggacaattccataacttccattataacagaatcgaaatttctagatgttatatatgctgtccaagttgacagcgccatctaaaagtacagacattaagtccaacagagcttaaaggaaaataaatacagacattatttgtacagatacttgctcatatggtaatgtggtaagaaaatctaaattaataaggttttgataatagtaattatggcttgattagtaaatacaaacataggctttgaaggcaagcctgataatacctggctctgcaactaaccagctgtgtgggctctggcctgtaattcaacctctctgagcttcgctttccccatgtgtaaaatattcacacgattggtgtaagctgcagatgatttactgtatgtaaatagcctaaatcaattaaaagggggctcttgtgattaaaataattattagtgtttccccccactgatcccataaatcacattcaatccactgtgccataatttaaatgtgtaaaaactgtgaatcagacttttattggattaaatagcaacgtatgggaactgaacaaaaatggcatagagctatccaagagtttctgctgtcgccggttgagaaagatgccaagttaagatcaaggagttgattgaggtaactacgggaatctgaggaaacatcgttgcttaactgtaaaaactaaatcaaactatttcatcctcctcaagaccacagcaacatccatcttgctcctctgtagcgtggacggggcagaacccaggtgttaggaaacgcacctggtctgctcccgcccactaggccctgggcacctcggggctagggacagaggtttggagcaactcaccccggagactccgttgatactgccccagaatctcctccagggtagagttctccggggacttcgccatgcacgcactctaggcccagagctgggagttacgtggggaaatgtccagctttctcccttccgagaacaacaggcctgtggccggggagcgcccgcctgcttcctgccgcggctgtcacaggggagcctagaatcccgcacagagctcttgggggctcttcccacccactggccctcgctttgcacgtcgggagttgtagtcctcacgttcagaacctgcaagctcgacaatcctcagggccttccagttacactacaattcccagaaaccactgcgctccaggcgctagcttggacggtttggctgccagagcctgctgccaagagacaggcttgcaggccccgcccttttcctccagcccagcctggtttagtcccgcctccatcccactcttcagctgcctggaccacccaaatgacagaaagggctcactgaaggccttgacgcttcgaaatttgctaatatgcagcagttgatccccaggctactcaaggacgcagatagtaaactctgaaccctgcttcagttgcgagattttttaaaacggtcgaataaatcttcaagaaatagaagctctaaatcttccaaacagcctagattgtaaaggcggccgacactacaactcctagcatgcccagcaaccggaccttcacttggagttggcgctctgcccgctgggaactgtagtccttgttggttgcggtcccacctaacgccgaggtcctcttcattgttcaagctggtctttcggggcacgcctgcgcagtgggcaagctggaaaagcgtgtgggtgagaccctcgcacaaccccttttcattgtctgtgtgtggcgcctgcgcagtaagggatcgttggaactgggcaggaggggatagggtccggctcctcgccctttcccgaggcgcctgcgcactaggcagtcggtctttgccgttaccgctatgtgtggggcgtgtgtggaataacgttattgcccagcggagctgagggccccggagctcgaccgcagcggcagcgacgacaacagcggcgacgacgacgacgacgaggtggggggaggacggcgtgcgagagactcacgggacgcgacgcgccccgcctcccccgtccggtccctctctccacggtaaggggtaagtgatgcgatcggctgctcggtgtaggcgccgcagccgcagccaccgccgcggctgctttccacatcctgctcctcgggtttgcggcgaggactcgggcgccgcccgccgcggggcgggggtgcggggctggaccgcgaagggggcgcttcccgggtgctccgcgcggcgccgccacccccaccctctgcccgcctgggacccggggcttgacgggaccacccttcccatcccccacccgccgccccccggagctccagtcctgcggccccccggctttcccgagccccttgctgccgcctccgcatcccctaagtgcattga

SEQ ID NO: 1385 - DNA, 6000 bp, Homo sapiens
cctattacactttttggaagctaaacaggctttcctatgcccagggaagggtttgtggagaagttggacccaataacatctcagagatattagtagtgggtgatacattgtatgagctgacttctaaagttcccttgaattctaaaattttatgaaccagagtaaggaaataagtggtaccctttaacttactaaaaaagatgagtagaaagaattttggctttagccaaaaagacaaaggttcaattataggccctatcacttaggaatgtgtaacgcagaggcaaagttattcactaactctatgcttcaaattttttcaatgtgtaaaaataataccttaatttagaagtttgttgcagaaattaaatacacacacaccacacacacataaacttcctggcacctaggaaatgttcaaaatttggtaggtattattcaacgattcaataaatattgtgtttcaaagggtaatattttctatatcatttattacttatggatatacttaaaaaatgacttgttctctgctatgtgtcatttgtttttcagacctcaacaatgcatgcttgggattcttttccacttctatactttctgcaattcctgtttgtatgtaagtagattttatgaggttttctttaactttgcttttgctgttttgtttttccacctttatttgatataaaagtgggctttaacagcaacacacattggctatgtcactggctttggctaaaacatttctgctaaactggacaatatatccagtttaatcaaccacactaccagacagatgttttttatctctcacaatggctaactcactgctgaacactcctttatgaaatttttgagtaagtaaataaaaacctagggtatctgattagaaattttggttattaatgaaataaagatatttcttcccatcaaaagtatcccatttcttaatgaaacagatcaacactgaatgctccagtcaatactatctactcaccaagcattcttcaaatggcacgtaactgctcttttgttatacttccagaataatttgcaactgtacagatactttagttagcaattaaatatcaggttgtctgtcagatacttagttgaagagtacactgcttaacatcccagtgtttgggacagataagaaagaaaagtctttacctattaattagtatagaaaaaatatttttcaggaatacaattttgtggaataaaaaacattttgacaaaaaagcttaagcatatacaatatttagtactagatgagcattatctaattgcaatcagatacaataataaaactagttctttttttcagtagataaaaaggaacaagaaactgatacttggaacaaatcaaataaatcacgaagcacagaattttaaaaagtaccataacagcattaatatgcagaatgtatgctaaggtttacagtataaatttcactattctaatgttaaaatagggaacaggcagattatttccatacaaaataatctcagaacacaatgaaatttaccagtaaaatacatttaaagcatgattgaatataatcccacatactgaaatttagttacagatttttaaagttgaaatttaagataaataataaatcctttaaagaagtctattaaaatgcaacgtaaaattaaacgattaaaattataagggaagaaaaaagcactttatggcaaaatcaacccaataaaaaacataaagttaatatatcttaaaatgtaaattctagtttaagttaaaagtaatcactaataactcattaatgattacaactcattaactgtggcaaaataaacatcataggttcttgttatgcggaaattttatttttaacacagcctatagagttgatcatcatactattataaaatactattgattttcaagaaataatattaaaacctaccgttaagtagctaccattaggtagtagggaaaacactgcaacacttcgtttttatgaaaagcacatgttaggacatctttcctcatgtagtaagttactttatgaaagtaaaggtccattttaggaggattactacttttacatcacaaaggcaagaactagattaatcacggtgagaatcaagttcagtgatagtcacagcctactcagggagcacatagagaagctttccatacattttcacaaggtaaaagggctagggggacacaggaaagatcactctgcagaatggaccttgagtttcgtttggctctgccttcgattaactgtctggcttgggcagacaagtcagttaactttctgagttttagtgtcttcctctgtcaagtgcacttgggctcttccgtgttatctacaaagttaggaagagctaaaggcagccctagttttactttttaaaaaataataacagaaaaatacataagttgctattcatcagtgtactgtttccagagctgaattcctaagtctctgaagcatacccagttagggttataccagtgaagatccagatactatagtcataatgtcactctctcctctcccattattcctccacctgctcctccccatcctgctttattctctcttctggtgtgttttaagaagcaacgccagcaaacggctgcatacattgtaagcttaaggattaaatcattttaaaatatgcattttcaatcaaatgtatcatctgcttcgccaaattcctcccaaatggctgaattttcattaagagaataaaaatgagttaacaacttcggtaacagaaatgtactgggccagttgttttgtttgttttacttgcttaaaaaataaacggaaagatgtatccattccctcaggaacataaatgcattacctgcccaatgaaaaaacaattctgcttgttcatttccctgacacaacagcttcgttgtcaggccctctctagcccaggctccaacgtcacctagtaattttatattgatcaccttggcagtgcttggactccagcaggcatagtccctgtcttccttacattcctcaaaataaataaataaataaataaataaataaataaaactctacgaaacaccaccgaacagagattctgtgacttagtatacaaatcccacgtcttcccgccctgtgttaggcagctgcaaatgttattttttcatcgcttgcataaaatggaagcgaaacgtaccaaaaccctacatctgaatcctaggacaatgaagccgacaggaagccactctctcctcccccgggtttactacagagccagagcctccacggggtgcagtcgccaggcagggtgcatgacaccgcgtcttccacgccctcccaacgcgtccaaaaggttgctcgcctgacctcgccaaccgcctcacaccccaaaaccaatcacacaaaagggattggcccggggagctgctccaatgggggaaaaatcccttccccagcggcagcgcagccattccctccaatgctccgcccgcacccctcgcaaactgctacggcggaggggggagggctgcacaaagccagtcgaaagctgaaaatgattcaatgcacttaggggatgcggaggcggcagcaaggggctcgggaaagccggggggccgcaggactggagctccggggggcggcgggtgggggatgggaagggtggtcccgtcaagccccgggtcccaggcgggcagagggtgggggtggcggcgccgcgcggagcacccgggaagcgcccccttcgcggtccagccccgcacccccgccccgcggcgggcggcgcccgagtcctcgccgcaaacccgaggagcaggatgtggaaagcagccgcggcggtggctgcggctgcggcgcctacaccgagcagccgatcgcatcacttaccccttaccgtggagagagggaccggacgggggaggcggggcgcgtcgcgtcccgtgagtctctcgcacgccgtcctccccccacctcgtcgtcgtcgtcgtcgccgctgttgtcgtcgctgccgctgcggtcgagctccggggccctcagctccgctgggcaataacgttattccacacacgccccacacatagcggtaacggcaaagaccgactgcctagtgcgcaggcgcctcgggaaagggcgaggagccggaccctatcccctcctgcccagttccaacgatcccttactgcgcaggcgccacacacagacaatgaaaaggggttgtgcgagggtctcacccacacgcttttccagcttgcccactgcgcaggcgtgccccgaaagaccagcttgaacaatgaagaggacctcggcgttaggtgggaccgcaaccaacaaggactacagttcccagcgggcagagcgccaactccaagtgaaggtccggttgctgggcatgctaggagttgtagtgtcggccgcctttacaatctaggctgtttggaagatttagagcttctatttcttgaagatttattcgaccgttttaaaaaatctcgcaactgaagcagggttcagagtttactatctgcgtccttgagtagcctggggatcaactgctgcatattagcaaatttcgaagcgtcaaggccttcagtgagccctttctgtcatttgggtggtccaggcagctgaagagtgggatggaggcgggactaaaccaggctgggctggaggaaaagggcggggcctgcaagcctgtctcttggcagcaggctctggcagccaaaccgtccaagctagcgcctggagcgcagtggtttctgggaattgtagtgtaactggaaggccctgaggattgtcgagcttgcaggttctgaacgtgaggactacaactcccgacgtgcaaagcgagggccagtgggtgggaagagcccccaagagctctgtgcgggattctaggctcccctgtgacagccgcggcaggaagcaggcgggcgctccccggccacaggcctgttgttctcggaagggagaaagctggacatttccccacgtaactcccagctctgggcctagagtgcgtgcatggcgaagtccccggagaactctaccctggaggagattctggggcagtatcaacggagtctccggggtgagttgctccaaacctctgtccctagccccgaggtgcccagggcctagtgggcgggagcagaccaggtgcgtttcctaacacctgggttctgccccgtccacgctacagaggagcaagatggatgttgctgtggtcttgaggaggatgaaatagtttgatttagtttttacagttaagcaacgatgtttcctcagattcccgtagttacctcaatcaactccttgatcttaacttggcatctttctcaaccggcgacagcagaaactcttggatagctctatgccatttttgttcagttcccatacgttgctatttaatccaataaaagtctgattcacagtttttacacatttaaattatggcacagtggattgaatgtgatttatgggatcagtggggggaaacactaataattattttaatcacaagagcccccttttaattgatttaggctatttacatacagtaaatcatctgcagcttacaccaatcgtgtgaatattttacacatggggaaagcgaagctcagagaggttgaattacaggccagagcccacacagctggttagttgcagagccaggtattatcaggcttgccttcaaagcctatgtttgtatttactaatcaagccataattactattatcaaaaccttattaatttagattttcttaccacattaccatatgagcaagtatctgtacaaataatgtctgtatttattttcctttaagctctgttggacttaatgtctgtacttttagatggcgctgtcaacttggacagcatatataacatctagaaatttcgattctgttataatggaagttatggaattgtccatagggttattgtggggagcaaatgaaataatccccataaagcagtgattttaagacttcttaaaatgtttacctatag

SEQ ID NO: 1386 - DNA, 6000 bp, Homo sapiens
acaccagtctgtggatgagatcaatgtggctcagagtgtggtttccagagtacggtcctcaaactgttactggtctgggatgaggcaagaactgaaattgagtcagaaattttcaaaacaatcaaacactgcttcctcctttttattgtactccacaaaaccattagtctacaatagattggaaattttaaaagaattaaaatcaagtctggttctcctcactgagctcattggggaatccctggcctagggatttccctcttctcccgcccccaggcctcggaaaatgaactggtgtcagctgctgcccagaaggttacccagcgtgttctctctctcagggtccttcccttaaattctcaagtttgacatggaatagaagaatgtcgggcgtttcaaaaaaggattttgagatgctgcaaagctcactggatttagagtcaagagatgtgggctctagcgccagatttactacagacaggctgcctgaccttgggcaagtcacttatactttcttggcttcaccataatgggctgaactgaatgttctctaaggtgcctctcagccctaacataatatgattcttttcatgagaagagcaggacttgatccccccatcacttgggggcatccccaaggagccccctgttcttcctctgcaggcagccaaggctaattaggaatctgagagaatgagccaggaaaggggcagtacaggacatacattctcttcattgaaggtggtaccccctccccactgcacgatcctcaggaagaattcctttattgaaaccattattgaatagggtagatttaggcacgggaaatgtaaacagcaaaccagccactaaaagtgcgttaatgtcacgcctgtaatcccagcactttgggaagctgaggtgggcggatcatgagatcaagagatcgagaccatcctggccaacgtggttaaaccccaactccactgaaaataaaaaaaattagctgagcgtggtggtgtgtgcctgtagtcccagctactcgggaggctgaggcaggagaatcatttgaacccgggaggcggaggttgcagtgggccgaggttgtgccactgcactccagcctggccacagagtgagactctgtctcaaaaaaaaaaaaaaaaaaaaagaaagtgccttaatgttctgagcaaggataatgggctagagcgtgttccggaagcctcagcacactgcttgttctcactgataggacctcgttcacgagatggaattatgtaaaatgccgcagcaatggttaagtgttggaacaaagtaatacagctttacattaacatggtttattcactagaattaatgacctagagcagtaattgcattttcaaaacttcagcttgctgactaggtgtattgctatgtaaatagctagcgatatttgaagataggaacacagtaaaatctgtaaagtaataggattgtagaaatatggagctggaggagaatgtagtcatcttctagccccgaggctggcaaactttaaaaggtcaggtaataaatattgtaggctccatggccatatgttctctgtcgcagctactcggccgttatggtgcaaaagcagccatagacaaaacgtgaatgaatgggcatggctgggtttcaatgaaagtttatttaggggcgctgcaagttgaatttcatgcagtgttcacatattatactccttttgatttttaaaaatcattttaaaatgtaaaaatcactctcaattggcagatcatacagaaacaggcagtggcctgtagtctgaagtttgccgacctcacttctagttttctcctctcatttcacatgtgaggaaactgagattcaaagtgatcacaggatttacttaagttctcatgactgacgccagagtattttaggagcagactaggagagttttcatgtagacagttggttgttttgatgatgaaaattgaagccacacaaaaattattctccagaagaactcatttcgtatgtgtgattaatactgtgaattagaatgtaccagtggttctcatgcttaagaattcatcagagtcatccaggggccttattaaaacacatgctgctgggccccaccctcagagttgatggttcaggtctggagatcttattttctccattttacaaatggagaacctgaggttgagagagatactcagtctcaggcttaaggtaaaatagctagcttgtgatgtcccccatttccaagttcagcactcataggattaggattagagctataagtaatcatcaagcagagaggcagggctgcagttttgtttagagagatccttctagtctagctgttgcggggagtatggattccagggggccgtgtggaagcacacaactctatgagaaggctgtgcaggaacctggatgtgaagtgctggcagctggacttcaagagtgaaggtcatggaatggatgggtggatggatgagtgggatggatggatgggtgggatggatggatggataggtgggatggatgggtgggtgggatggatggatgggtggatggatggatggataggtgggatggatgggtgggtgggatgggtggatgggtggatgggtgggatggatgaatgggggatggatggatggatggatggatggatggatgggtgggatggatggatggataggtgggatgggtgggatggatggatggatgggtggatggatggatggataggtgggatggatgggtgggtgggatggatgggtggatgggtgggatggatggatggatgggtggtatggatggatgggtgtgatggatggatggatgggtgggatggatggatggatgggtgggatggatggatgggtgggatggatggatggatggatgggtgggatggatgaatgggggatggatggatgggggatggatggatggatgggtgggatggatggatgggtgggatggatggatggatggatgggtgggatggatggatggatggatggatgggtggggtggatggatgggtggatggatggatgggtgggatggatggatgggtgggtgggatgggatgggatgggagaggttcagaaggcctagagggctcatctgtggaaccaggagactgagctgtggggatggtgactaggggtggtcccacccactgagagggtcacagagagaggagcattagaaggtgactccagtgtgtcaggtggtgagtttgaggtgggcttggaaatgcaagagagaggcccgaggctgagatcaagtgctcaggatccttggcctctccacttggagtcatgagtgtagattttaaaaatcatgcaggcggaacatttccagtcaggagagcactgagcccagccctgggtcacaccagcatttgaaggtctgatggaggaggaagagggaccaaaggggagtgagagacctgtacagagtctaagaaggagagtgatgagtcgcactgtgggccttgctctgtggccttggtggcttaggtaatcctggctctgccttaccttgtgtgcgcttgggcaaatgatcgcttctctgcaccttgcttctctcatgcataaaatgcagatgataaagtaacgtgtagtattgttatgaggattaaattagggaatgtaaaatgcttacaatgttgggcatttagtaaatgctcagtaaacattagaggaggccactgggaggagtagaaaagtgagtgcatattttacagttcatgtatttgcacctttgaaatccatatgttgtttgaaaaatgttcttcatttccatgaggaagacgccgctcccagggaaatagtgagtctaagcactttgagaacacttatctaagaggaaggacaatcttagctgtagtcagagtgaccacagggaggaggctctggtctgaaaacatttcagaacaaaggattttaccactaccaccaaaaccaaacccaaaacaaaaccccaaaacaacaactaaaaccttccactgtagtccgtaggtagctcccagggggaattgtccagtgaagcaaaaaactctcattgaaaaacatacacgcataaggatataggccccctctggggaaggaaggggctggcctggagaagaaatccattggtagtggccctgtggagctggtgctaggttcacaagtgttcatttggttattatacctcatgacttatgtatacattgcatatattttgtatgtatcacatacaacataaaaaaatttaaatctatgtattcacttgctttcacagtattcatagcaaatgagtgtctgaagcataggaccagagctggcagcttgcaccgcttctgttttgcataagatattttccccagcccactcagctctataaagttgttttgtatttcaccacttgctccatcttatcttgaagccttgcatatttttttaaatgctggttctgatcatgcttgcagggtgtggctcagaggatcgctgttggaccaatggagatctgcctgggcccagcactcttatgagtcccctgtgatttcatcagcatctgcctttagaaacccgggcgtgtttgttcccatggtaactgctgcccctgacacgcctgaaattcctgggatgcccttgcgtggaaggggagcccgtgctgcccattctacccctgcatggggcagctgcttttctccctcagggtccccagtcctacccaggcaggggtggcagttgttcatctgcagatcctgaaggacatggaccctgtgcctgagattaggacggccgcaccagcctgggtgcaggctccctcaagtgtccttcctcatggacccgcggaccctacgctgtgctgtgagggccggggagcacaggggcttcctgggaggaggactggcttcctgcccctgatggggcctggccacagctcccagggctccatgacagcacagtgaagatagcaaccacatcctgggggccctggatgcaatccctgcctgttgcaaagatgagataaaggcgcgggaaagaagggtctgaattaggggttgagctctgaaatcggacgattctgtgtttcctgccgcatggagggcgtgtgtggttcgcaggctgtggggggcttcttgcagcgggggctgctgcctaaacagactccgcgggccccatgatggcaaaccccctcgccccgttcatgacttaatgcctcctagaagaaaaggctaaaaacaagacacacagaacaagaaattgcactctctcaaaacgacagtcgccctgaaacggacgctggaagaggtttccaggcccgtggcgacggtgaggggggtgaaggtcgcaggtggagggcacggggcggcggctgcggagcccggggaggaggcggcgggcgcccgggtcttcctcggagcgcgccccctgggctgggcggcgtgtccctgcctcccgccggcgccctcgtccccgcagcagcgtccccgccgccaccccgctgcctcgtcgcctttctcgcaaacagcggtgccctctacgtgggggatcctggaggctgctgagcacgagcgccctccgcgacccgcccctgctcccgcctccactcttgcctcggggggagggtctcagtcttctgcctaaggcgccctcctcccttgggaagtccgccgtcctctgccgtgaagattgcccctctctcctccagtgcctcctccccagcggcttcggtggctcccaccctccgcaccccgtctcgcgacctccccgccagcccagcccctcaccagaagaggctttctcttccagcccctgaaatctggcttctgccccagccaggaggctccgcagggcgctccgccaccaggtggcatttcccacaaaccggccactccgccctgacccctctcctccctggacctccgtctcccagttttcctccctccaggatcccactctcagtgtcttgccggattccagtccactgccagccattgaaggcggaggttcc

SEQ ID NO: 1387 - DNA, 6000 bp, Homo sapiens
accccaccacaaggaattatctagtccaaaatgtcagtatgccagggctgagaaactctctctaaacaaacttccattccttgcaaacctctgacctactgcagagggcctggaaggcgtgtgccccaggcacgcctggcctggtccagcctgccaggagtgactgggactttccacctcaagctcctggaagtggaaactatgccgcccacccttcctgcccaggaactttctccgctgacctgcccagaccctgggcttcagcactgctattctctctgcccatgctccccaccctgggcaggccctcccttggcacagtacaggctgctggcccagaaccctgggaacattcctgacctttgctttggcttcctccagctcttggcagcttctggctggcccttgatgcccatgcccccggcccaacttgctgaagtgcccatttttccctctgcccctccgtctcaggctggcttcatctttgtgccctcccttggggagtcctgctgggtgccctcatctcccagtggccaacccagagtggatgtggggctcctctggcctggtttggagctgcccttggtctgctgtggccccaacctgctgctccacccagataggagggtacgtggactcctttggagctttaaatggaagctgggcggcctgcgttctcctctcctcctcctccctgaacccacagtgaccttgggcaaggcccttcccccatcatcgaaatgcgaagaagctgtgcctctgcggcacacagatcagagctggtgtggggggaagggagagggagcctgtgggagggggagggcgcatccattatgcagattgtgtggagtgccttcccttccccagccaggaaacgccctcccaggggccctcaagtcttccttgggaaggaaggcgtgttctcagcagccttgttttctgaggccctgaagccagccattaacttgaccattccaggggagaaactcacaggattttgtccttgagtcagaaaagggccttggcagagaagcctgaggctctcagggatcagcccagagctaagaacccctgagcgtggttctggaagcttcagctctggccagtgggggttcttccctgttcataccaagggctctgtgcccggcaggggtcgggggtgggggtgaggatgggggaggaacaagtgcaaaaggtgcatcgtggcccagagaaggcggcctgtgctctgccctgctcctgtgtgacctccagtcatatgctggactcctctgggccacaagctcccagctgggaaaatctcagtgctctttgtgtaagggtcaggagaagcctgaggctggtgactggggccaaccagcctgctggcagcagcatcccctacacggccaccctcttggggggacaggacagcctgggtgggcctgggctctcactgtcacttaggagctctgtggccctgggaggcgtccccacccctccaagctatcatagcaatgtgatagatgggacaccttgcctggggctcagcacggtccctaccgcagactgagttccactgggacagcaaatcctgggtctgaggcacccacattctagacatccccaagccagggcacagaaacagcctcttcctcccggagtcctaatgctcaggctgctggctccctgggctgggcccctcggggtccctggcaacctaagaagcagttaaccccttcgcttctccacctcagggaagtctgaggacgtagtggttctattcaagcttctccttgcaaagggtcttattggggcctgcatcctgggcccagcctagccctggggctctggaaacagatgtaagtggcaaaggcagggcagaatgcctggccctggcagccgagcctccttgtgatggtgttggtgtcaccacccctgctagcagaacccagtctgcctccccttcccatgctgcagggacagggtctggagcacgcttccacctccctggtcacaggagcaagggaagtaatcagcccaggaagccgcgcgtttccttcctttctcaccagcccatccgggtttggtgagagagcatggacttgccctgtggagactgcagcttctggatgtgggaaggagagccctgcaggcagggggcttccaggcttgggacacctgggcattcctgggccaggtacatgcaccctcccactcagaaccccagagaaggactgcggggcccctgcagggctgcccatcagcagttcccaaaccctcactccttggggctaagggagcaatgtctctcccacaaccaagggggtggggaggaagaggagcagctccctcctccctcccgtccaccgggtcctctcatcctccctttcatcaaaaggcggaaggtggcctgagactaaggcgtggagcttccttggtcctgaaatcagagcggagtggctggatccagcccgcccctcccccgccccctgctccccttgccgccccaccaccgagaatcacctgcacctcccagccctgagcagagttgggggcaggcgggaatgaggtttctccatggccaactgctcagccactgttccccacgccactgccaccagaccctcactaaggggcctcttgcccctccctggtcaaatctgttttcaggaaagcacccaacaaacctgcaactcagaagccaaatgagacctatcccaggcaggtccgctctgcgatggtggctctcatacaccgcacagaagtgtaagttggcccccccctcactccctaaatccatgtagatgcccttagccaaacaggtctggtgtgtgggggcaggagggtggaggtaggagcatctgggggctggggctggctccaagtgctgcagagagttcactatgagctctgaagtcaaactcagatcctgctccttagctgtgtggccttgggcaagcccctcagcctctctgagcctcaggctcctcctctgtaagtggggctgttggagggatgaactgagatacacgtggcaaggtgcctggccctgagactgggggccccgtaaacagcacctgctgctctgactgaggggcagttggagatgaggggggacttacaggcccaacacctcatcagcaggatgggccctggctctgtacacatagaatgttggaaagctatgttctgggtccagttgcaagaccatcctgcccacttgctgggtcgctgaggcagagcgccctggactgtgctctggagagcagggggccgtctctgctcactgctgggcagtcagagtcaggtccccagggaactcagatcaaaatctcagggcagccttgctgggtctcagctttcagaattgatttctttggaagaacaggaggcatagccaggccagctggcaatggcttcagccacagtcccccagtgccccatgctgggtgattgatggtaggagctgtgcctccctgccagccccccaagccccattccctgccatggctccgacagggaactccctgcaattcttaggtggatcctgaaacacccagtccagactactttttcagcctcacagatggcccagagatagatactattagcccatttcacagatgggaccccagtgaggtctagagaggctctgctctagctgagctgggactcagatcctactccatgacctctgccaaggtccaggccctcttaccgtcctacggggtccttgccggtgtcctcagcctctgccttccagaccccaggtgtcctggagctctgcagatcagagaggctagtactggaagcctgggcccatgcccccagcagcccccagcccagggggcccccaaggctgaacagcaagctcaggatcatcttggtggtggggcaggctcagctcacactcagccttggcaagtagctccagaaactgctagtgacgttgtcttcaagttaaatctcaggaggaaaagaaaatacgaggacaacaaagagaggaagtggcctgggccggcctacccggtgggtcttgtcctgccccccaactaccctggctggccccacaggggccgccaaccacacaagccagttcctgtccctgaggacttggctcagggactctgggaatgtggtagacatggggtggccccaccaaatgcatccttatgggaacctgctccctgggagccatgaaaagagcgtggacttcgaggtggggccacaggaagtggtcaggtccatctcaggggacctgctgcccatccacactgctggccaggaaatggggggcaattcatgcctcctcagcaccttcagcactgggcggctcaaagaagggaagggactattctggggtcacacagcatgcagccagaggccaaggcatgaggaagtccttcatttccccacccccacccacctcagatcctccaaccggtttcatggcagcccagggtccagcggcatccaggatgctggtgggtagctgcacagcccaggccgcgggaggttggctgctctcacctaacaggcctatgtggccctgacccctacctaggaagctggggacaatggccaaggcgcctcccctctctgtgcctgtctgtccaggtgcagcatagacacagcacccctggggccaagagcacccagccagggctgcccccatgggtgggcagggcagtaaatgaatgagggacaggttgggaggtggccagccccctccagcccatggagggcacggggcaggagagctgggctgagccagcaggagcccagggagcctggtctctgccttcctatcctggaggaaggtgaggctgaacctccttccctccctccctccctccccgcccccactgcacgcagggctggctgggctccagctggcctccgcatcaatatttcatcggcgtcaataggaggcatcggggacagccgctgcggcagcactcgagccagctcaagcccgcagctcgcagggagatccagctccgtcctgcctgcagcagcacaaccctgcacacccaccatggatgtcttcaagaagggcttctccatcgccaaggagggcgtggtgggtgcggtggaaaagaccaagcagggggtgacggaagcagctgagaagaccaaggagggggtcatgtatgtgggtaagtggggcatggcagggtgggacagtgtggtggccaaagggtgagtgcccagttaccttcgccagaccttactccccagccccagggaggcattttgggagggggcgaggccctggctatcaaggtggggtctccagaccctggagcacccacaatgccctgtgcacacctatgtgtgtttgtctttggcctcctcggggcctctgggtgtcagagaccgcagacagggctggctacctgtctgtgcacgcacacacacattcccaagcataccagcctcccctgagcctggagcccctgaagccatgagcagcctgtgctcaggtggcccccaccctctccacacgggagcggctacagccaggtcacggatcccctccctccccagagagaaggggcaggctgggggatgaaacctaggctcagtgttccctcccccgcatcctctcctggcactctccagaggaggaaggggaggtcaagccaatgactcagctctggcccatcctgtcctgttgctgcttctgaggcccggccacacccgggcaggggctggaccctgggtctagccagtgtccctacctcaggcctgctctctcttgtcccccacattctgtcctgtccccttcccatccatccacttcttccagacacagcaggaagaggccctctgaaggggccgccggcccccagacaccatccttacccccccaccgaccccacagtttgtccagctgttctgttgtgtttgtcctgaccgcccccaacacctcgagggaggtctgggctgacagctccatttcctccccaggagccaagaccaaggagaatgttgtacagagcgtgacctcaggtg

SEQ ID NO: 1388 - DNA, 6000 bp, Homo sapiens
cacctcccaggttcaagcaattctcctgcctcagcctcctaactagctgggattacaggcatgagccaccatgcccagataattttgtatttttagtagagacagggtttcaccatgttggccaggttggttttgaactcctgacctcagatgatccacccacctcggcctcctaaagtgctgggattacaggcgtgagccaccacacccggcccttctttgtctttaatgctaagacagtctggcttcaaaataaatattttaagaacaaaccagatgaacaaattgatgattggggacagaaaatctccccaaagctttatttcagattaataatttgtatcaatagtgttgatttttgtagcacatataattgttcaaggctttgcaaatatttttgaagttagaaattaaaacctacgctcttctgtataagcctccatgtccacgggctttattctgtaagtggtcatttatttttctcaccgcgttatctattttcctatccaaaagatatatttattttattttatttcagctaatgaaatttatgctcaaaaatgtgttttaaatatgtactgataagagaacagttcccttatttgggaggtgtttgtaatctaatgttaagtgggcagggagaaggatattacattgtttatatattaaattatgtttatatgaaaattcaagggaaaaataataaaattagcaaaaatcagttggtggacagggtgaactgttttttttggcttgctgtctttccctttttcctatattccaagtgttgtgtgatttcatttgcttatttaaaaaacctaaaaattaaagacatcttcagaacaaaataatacgaagtctatttaatttcatccaccaaaaacatttttttatgcttataacataacttatgttcattgtgcaaacaaacatgagatgttccaaaaaatataaatgaggacattaaaaaaatcactgtcattccaaaatctagctatattctctatgaacattttgctgtacttgctttcactcttttttctcttccttttttcttttctggttttttgtttgtttgtttgtttgtttgttttgtttgagatagggtctcgttctgttgcccaggctggagtgcagtggcacgatcacggtttactgcagcctcaatttcctgagaacaagcaatcctctcgccttagcctcccaagtagctgggactacaggagcacactaccgtgcctggctaattttttctatttttttgtagagatgaagtctcactatgttacctagcttggtcttgaactctgggttcaagcaatctttccaccttggcctcccaaagtgttggattatacgtgtgagtcacctcacctggctactctcattcttttgaaatagtgtttagtgtgattgcaattcgagtatatgtagagtgtttttttttctttttctttttctttctttttatgtttttgagatgagatttcactctgttgccctggcctggctgcagtggagtggtatggtcatagctcactgcagcctcacatagaggatttttttttctttttcttgaaatatcatgggcattttccatgatgttacttttgttgaaatattatttgtaatggttgcttaggagtcttcaacatgaatagcctacaatacatgtcataattccaccattttgtcaatgtagctgctttccttgccttgccttttacaaatcgtgttgcactgaacaacactgtacataatattttgacttgtctttgattatttcctagagatgaagtcttagaagtgaaatgactaggtccaggggcaaaaaaaaacttttttattctatttttgaggcagagtctcattctgtcgcccagtctggagtgcagtggcacaatctcggctcactgcaacctccacctcccaggttcaagcaattctcctgcctcagcctctagaatagctgggactacaggagcgtgccaccacacccggctaatttttgtttttagtagagacgaagtttcactgtttggccaggctgatctggaactggtgacctcaggtgatccacccaccttgacttcccaaagtgctgggattacaggcgtgacccaccacgcctagctagtaaaaacaaacaaacaaacaaacaaacaaacaaacaaaatatatatatatataatgcccttcctatgtttttgaactgcctgaccaagaggtgtcttcaatgtatgcacttgtgctcattaagagtatcttttaattctaaaaaaggagaaaaagaacttaagctattttaaaagataaaaaatgcatctcattattctttctcagcattgctttggttactagtgaggctgcgtctgcttttcctgattggccagctgttgctctttctgtgaataatgtttcaagtccttttttttccccgttaggatgtatttatttaaataaatacatgtatttaaataaactctttaccagaattattatttctttagttacaatatttatgacaaatatttccccatattgttctttaactttaaattttgtttcttatcacttttggtacacacaagtttgcatttttacatggtaaaatgttggttttgcttgctgagaattccttcatggcttttatgtgttaaaagagcatcttcatacttgtctgaatgttccacctagattttttaatgtactttattttatttatttatttatttatttttattttattttattttttttgagatagagtctcgctctgtcacccaggctggagtagagtagcgcgatctcggctcattgcaagctccacttcccaggttcatgccattctcctgcctcagcctcccaagtagctgggactacaggtacacgtcaccatgccccactaattttttttttttgtattttttggtagagacggggtttcaccatgttagccaggatggtctcgatctcctgacctcatgatccgcccgcctcggcctcccaaagtgctgggattacaggcaaaatgtgctttattcatttatttatttagagatggagttttgctcttgttgcccaggctggggtgcaatggtgtgatctcggctcactgcaacctctgtctcctgggttctcctgcctcagcctcccgagtagctgggcttacaggcatgcaccaccacgccaggctaattttgtagttttagtacagacggggtttctccatgttggtcaggctggtctcgaactccctaactctggttatccacctgcctgggcctcccaaagtgctgggattacaggcgtgagccaccgtgcccagccaatgtgcttaatttttttaagttaactctttaactcatctggaattattttgatgaatggtgtgaggcataaatggaaccaagcttttcccaaacaaccaattttccattatagttattagttaatatttcctttctccaattaatttgtaattcttctttttaccacatgagaaggctttacatctatgagagtccattgtctgggccatttactttatttcactggtctgccacttcttgaaccaacataccacaatatttatattgacactttatcttttcatatctgatatgaaaatcatttttttctaaaacatcttagttatttttattagtttattcatacggatgaaaaagtttaggattttgacacattttaccagatctcatggaattttctttggtactgcacttgttcagttccccaatcctcaatcatggtagagctgtagttttccttatatgggtcctgctcaaattgttagaaattcttatttctaagaaatgtattatgactatcataaggcgattttcccatcaccacccctgctcaggttactaccaattattgttggaataacagaaagtgtttttttccctattcatcatacacatagctacttgctgcgattatggattctgagaacgtcttaggtgactatttgggttttccacgtgggccatcatatctgcaaatagtagtatttctgcctttttttttttttttttttttttttggtatttccacttcttgcttcatgttttactgcattggccagggctggtagaaagatgttcagtggtcacgtgaggttttactactgactttattaggaatgcttctggtgtttctcatctgagttccgttgtcgcttagactttgaaatccctttttaaaaatcgtgttcagaaagcacatctcatggaaatgacaaatatgagaactaaaaccgacaaatttctgcccaaaatcccacatgcagagcctcctggcctggagcctcctgaggcgtcggttctttgatgacttcccatttcttttccctttttttttttttttttgacggagtctggctctgtcgccagtctggagtgcagtggtgcgatctcggctcactgcaacctccgcctcccagcttccagtgattctcctgcctcagcctcccgagtagctgggattacaggcgcctgccaccatgcccggctaatttttgtattttcagtaaagacgaggtttcaccatgttggccaggctggtctcgaactcccgaactcaggtgatccgcgcgcctcggcctcccaaagtgctgggatgacaggcgtgagccaccgcgccagctgatgacttcccatttcttccttggttctttcggagccactttgggaaattcggttctatctgcagtggtaaaatacaggtcggctctccacgcgcgcggccaatggacgctcccagcgcggacagacaggccctttgctggagctgggcagggcgaaaggaccccagggcggggcttcagtcgaggccggccccgcccaccgctgcagccgcgcatgcgccatgtacaggctgctttgggccctcccgcgtgccgttcttacccggcctgccccgcgccgccgcttccggaagtgggtctcgtctcctcccaagcggagcatttgtgcctgaagctgccgggtctgctacggcaccgcggggctgcagaaacccgggggccaagggcgggctgcttgccgctatggctggcagtcaggacatattcgatgccatcgtgatggcggatgagaggtgggtggtgaggccgggcccgcaccccgccctgtctggtcgtctcccagcggcttcgccgccggctgcggcccagggcggctgctggagcctggcgtcccttgggcgtgcgcattggggagcgcctggtggccgtggacgcagggacaagtgtgggcctgatgctctggtcctcttctcctggcccgctccggcggggcacgtgcccagctgctcttccagacccgccttccctgtcagggctgccccaaacatctgctcagcctggtggttcccctcctccgaggccgcctcgtcctctgggaggacagacctttgccatctgggagctgcctttttttctggttccttaatcataggacatacggcagtattcatggatgtgctgatagatgtacccgaccacaccccttttccctccagagcccctggggagcccctcgtgctgcgacagtgggggagctgtgagttgcctcctggctgacttccagtgcccggcccagaggacgcgtccatagatgttagttaagaaagcggccgaacatttagcagtcaggcgctgacgtttatttagctcgcgctgtgagtcagacactgagctaaacgttccaccctggttatctacttcagccctacttagtaagtggatcctattattcttcggaatttacagactaggaggcacagtcactttccagggtcacacaactattaagtggggagctatgcaccctgcttcatggggcgctgcagcccactccttgcatgtttggtgactgcaggttaagatagtggcagttccactgttgggcctcagggtcagtgctactccgggtaccagtcggagaacattttgtggtgatctgatgccatttc

SEQ ID NO: 1389 - DNA, 6000 bp, Homo sapiens
ttgtttggagagtttagtttatttacattcaatgttatcattgttaagtaaggacttacttctgccattttgttacttttttttctggttgtttcatggtcttctttcttcttttcttctttcctgtcttccttttagtgaaggtgattttctctgatgacatgttttaatttattgctttttatatttcgtgttatctgttgtaagtttccaaatatgaagttacgatgaggcttgcaaataatatcttataacctgttgttttaaactgatgacaacttaacagtgattgcataaacaaactaacaagtaaagagaaaactgataaaaactctacactttaacatcatgcccctacttttaactttttgttgtttctacttatatcttattgtactatgtcttgaaaagttgtaattattatttttgatcagttcatcttttagtcttcccactcaagatatgagtagcttacacaccacaattacagtgttttgatattctgtctttttgtgtacttactattactagtgagttttgtgccttcggataatttcttattttttattaaggtgcttttctttcagattaaagaactccctttagctttctcataggataggtctggtgttgatgaaatctctcagcttttgtttgtctgggaaagtcttgaattctccttcatgtttgaataatattttcaccagacatactattctgcaataaaagttctttttcctttggcactttcaatatattatgtcactctttcctggcctgcaaggcttccactgagaagtctgctgctaggcatattgaagctccactatatgttatttgtttcttttctcttcctacttttagaatcctttctttattattgacctttgggagtttgattattgaatgtcttgagttaatgttatttgggtcaaatctgctcagtaaccttcttgcacttgaatattgatatctttctcttggtttgggaagttttctgttattatccctttgaataaactttctaccctcatctctcgattttctcttgaaggcccaaaactcttagatttgcccttttgaagttattttcttgatatcgtaggcatactttcattctcttctattcttcttccttttgtctcctataactgtgtattttcaaatagcctgtcttcaaactcactaattctttcttctgcttgattaattccactattaacagattctgatgtgttcttcagtatttcacttgcagtttttaactccagaatttctactggattcttttaaattatttcaatctctttgttaaatttatctgataggattctgaattcctctctgtgttctcttgaatttctttgagtttcctcaaaacagccattttgaattatctgtctgaaaggtcacacatctgtgtctctctgggattagtcaccggtgacttatttagttcatttggtgaggtcatatttcctgaatggtcttgatgcttgtggatgttcattggagtctgggtttgtttgcacccttccttcctgggaaggctttctaggtattcaaaggaacttgggtgttgtgatttagtttttggtgactgcagctgtatctgcattagggggcaccccaagtccagtaacactgtggctcctgcagacttgaagagataccaccctatggtcttagataagatctagaagaatcctctggattatcagacatagactcttattctcttccttttctttctccaaaacaagcagtctctctctcctctcctctcctctcctctcctcttctctctccctttctctctctctctccttctctctctgtttgtgctgagctgcctggagctggaagaagggtgacacaagtatccctgtggccaccatcactgagactgtgctgcgtcagacctgaagccagcacagcaccaggtgtcaccaaaggcctgtggtaaccactgtctggctaccagctatgttcgctcaaggccctaaggctctagagtcagcaggtggcaatgccagccaggcttgtatccattacttcagggtgccaagtttccaccagtcctgggcaggtccagagatgtcacctgggagccagggcctggggtaagaaactttaggaatctacctggtgctctattttactccagctgagctggcacccaagcccaaggcaatgtctttcccactcttccctctcctttcctcaagcagaggtgtctcttcccttggtcaccactgccccaggcccatggtcaatactgcctggctactgctgatgttcattcatggatcaagggctcttgagtcagcttatgaatgctgctaagcataggactctcctttctaggcagtgggctccactatggccactagggcaggtccagaaatgccatacaagagctaaaccctggaattggggaccccaagagcccacttggttctctaccgcactgaggccacaccggtacctaagctgcaagacaaagtcccctttatccttccttcaacttttctcaagcagaaggagccccttcccatagccaccacagctggaaaggtgcttggtgacatctgaagccaacatgtctcttagtctcacccaaggccaatggcaagtactgcttgggttctattgcaaattattgagggcccttgggctctagagagagcaggtgatgaatgctgccaggactgggtcattcccttcaaaccaatgggttcccttctggcccagggtgtctagaaatgttgtctgggagctagggcctgaaatgggggactcaggactctgtcttatgccctatcctactgtggctgagcttgtcttatgccctgtcctactgtggctgagctgatatccaagttgcaatacacagtcctgtttactcttcctgctcctctcctccaaccacagaaaggagtctttttcaaagctgcaagctgtgatgcctggtgttggcagagggatgatgcaagcactcccttggctgcaccagctggtgtctcactagatcatatgctcaagtccactggcttcaagcccagcacagcatcaggaatcccccctagaattgcagtccttgtgtcctagacagacttttaaaagtttatttaggaccccagagcactttaacccatggtcgtgagtctttttggaattcaggttccaaccactgggatgtgtaattcctctctggcgagggctggtctaaatgctccttctgtgggtgctggctgagttctgcctggtgttgtttctccctgtgacagggcagcactgcgttccaatgcaaagccccacaatgactgcactctccctcccgcaagtgcagagattctctctctgttccatgcggcagctgccgggtgatgagggaggggtggtgtcagcaattcaagactgtctttcttaccttcttcagtgcctctttcagtgatatgaagttaaaaccaggtattgtgatcactcattggatgtttggttgttatgagggtgctttttttgtgtggacagttgttcaatctggtgtttttgcaggaagacaatcagtgaaggcttctattcagccatcttgcttcacctcccttggtaatctcatatttaatgagtgctaagtactttgagctcactgtgcttttaaattttgttttacttctgactgcttaaaaatttcccccatctctggcagggaagtggctcatgcctgtaatcccagcactttgggaggccaaggtgggcggatcatgaggtcaggagtttgagatcagcctggccaacatagtgaaaccctgtctctaccaaaaatacaaaaattagctggacatggtggcacgtgcttgtagtcccagctactcgggaggctgaggcaggagaatcacttgaacccaggaggcagaggttgtagtgagcctagactgcgccattgcactccagcctgggtgacaagaatgagactctgtctgaaaaaaaaaaaaaaattcccccatctcttgaagccagcaatgcaaaacaaatatcatttaagcaagacctagttgttttgaaacaggaagacctctcaaacatctagtctcaagtatttagcagagaagttccacatatcactttttacctgttgcaatctggctttaacccctactacatgtctgaaactacttatgccaagtcactcaatgttttcattgttgccaaatttaacatgcacttttaacttcatttcatatgtgagccccctgcccttgtagtcccgaatgctccctttttcttgaaactctcttgttcttttgattgtgtgatatagttatctcctatatattctcctatcttgctggctgtgccttttaagccttcttggtgaagtccttttaaattttctacacatactgatgcctcagaaatctatctgcagctttcttcaccttctactttgtatactttcctgaaataatttcatcaactgctaggctcagtaccctgaattcccccccatcgtgtcttgcacttccaagcttttatacatgcttctccctctgcttggagtgtgtcctctcatacttttaaaaaccagattaactaacaagtctttctaagaaagactcaactcaggtctgttctcctccaagatgcctttgctgacatctaatctacatgctcccagagcaccttgtatctacttctgccattgcattttacacactatattgtaatctgtttactgatctgtcttcctgacatagttatgctgtatcagcagtgtctagcacagggcctagtccatggtaggtaaacaaatgtttgtcgaataaataaaagaacacctgaataagtaaatgaatgaacgggtaagtgattttggaacggacaatttggggtttggaaagagggtaaaggaggtgaaaggagaagaagagaaatgactggtatatttaagcagcttgttttgttacccttgtttatgtggaataaagttgtcatttcatttcatcaaaagtttattgagcatccagtatgtgctaggcactctgctggatgctagtaatacaaagatgaagatgaaaacaacacaaaaacaaaccccacttccttacttacccctccccacccccaatttaaggcagatttggcttaagcctggcaagctggcccctcagggattcagcaccagggtatggcatgttctcatctcaccctaaccttcacctgtgcatctcaaggctgaccagcaggtactccttatccaagtcctgctgcctcttccaccttcttgagaaacttttcccctacatgcattatctcattatggatgaggcacctgggaagtttaggggagctgcgaaggcacacctgctcaaatgagcctggggaagtgccgagggacagggagctgagacaggcatgctgtggggttcagggcagagggggcaaactagaaatgtcagtgcctttggggctgagacaaaacttgacctggtgtggaggtgatgggtaactggggccttggaattgctccatgggttgatggcgaatcagagctggagtttaggagactagggatgcaaggacccttggaggcattaaggaggagggaatggaatacacagagggcctccttctctttcagctttttaattgccctctctcctcacacagtagattactgccactcctatgaactgttcaataggcggtggcatgggcatgtcctggctacacagcggcccagcctctttattttgatgttagtgtgattagggagtctgccctttttctgtgccctgggacctgagcatgtgggagcagggcagatgggtggcaggaggccaggggttggatcatgttccccccaaatgctgggaagcaataagcctcctcctccccccaccatttctctggagattaggacttattctcacagctggaggaagctcaacaactttcctgaggacaatgattgtttgaaaggcttgttttgtaaggaag

SEQ ID NO: 1390 - DNA, 6000 bp, Homo sapiens
caagtagctggaattacaggtgcctgccactaagcatggctaatttatgtatttttagtagagatggcttttcaccatgttggccaggctggtctcgaactcctgacctgaggtgatccactctccttggtttcccaaagtgctgggataacaggtgtgtgcctctgcgcccagccttttatttagttgtatgggggattttctcattttcttcttccaagtgttctactgagttgttcatttctgctcttcctggacagttaattttgaccactcagattgctctcagcatagctggagactactatagagatgttaaaaatactcaaaaattataatagagtagcctgggaatgggagtaggggctggagaccaggaaggaatcaaagatgcacaaggcaacctttgtggatagtggatatatttattgtcttgattgtggtgatggcttcattgtgtgtgtgtgtgtgtgtgtgtgtgtgtatgtatacatatatgtatatatacaaatctatataattagtatagatactatatagtatatagtatgtagttttcccaccacttagccctgttcttagacttttgctggcatttctattacttgcaaaaatatattaaaatatatattgacaaacagaggtagccagccatttttagtatatagtatactatggtatatatatctaccatatactacatagtatgtactatgtagtacatatatagttatgtactatatatattactatatactacatagtacagtatgtactatatgtactatatgtactatgtagtacatactacgtagtatatagtagatatatatagtatatagtacatagtaattccttttatttttgtttctatggaaacaaaaatatgtatactatatattatactatatgtagtatatattatagcacatatatatctataaatatgcatatatagatgtgtatatatatgaaccaaatttatcgaattatactttgtaagtgtaattcagtgtcaattctacttcagcaaaacttaaaaaaataatagaaatgccagccaaagtctaagaacagagctaagagatgctgaaataacacatggaagtagaaatccatctaaaccacaaggctgccaattcgtgggtaggataggtgactctacctgtcctcagtcgatggctacacagaacttggggtatgcctctctggggaaggaaccctggaatatacacttgaatcaatgaaaaaatctgaaagacacttgccgccagcatagcagtgaagccatgaccttttcttaactgaaggtcatacatttactgcttttctggctcctctttcctagggaaaaaaatacttctacattaatacttgttaaattgtacttactactagttaatgagctaattcacataacaagcatattatgtaggcattttttctttccaagttcactgattcttgctttcttgaaattttctgttgttttacttcaaattgcttttctgcttgcttttgtctcttatcacttctgagctgttttacttcaaattgcttttctgcttgcttctgtctctatcacttctgagctttcttccaaagtctggtcattcttttctgtctactcttatgaatgaaaagacaaaaaagctttttagatctgtatacgtgggtgaagcatatagactctgggcttcacttagggtgctctgggtgggcctttactggggaacctctgatgtcactatcttggattgctcctcctgggctggtcagttcctcagagttgagtcttccagtcttctaaggataagaggaatgcgggccctgcatccagcattatgtattcctaaattcacttaactttgtttccagtgtgcttctctagaatgcctgaggatgccccagtccagggactagtattactttgtccagaaataaacctctagtcttctatgggagtaagggggtagagttacttagaggtgtttctcaaatagctttcatgtagtccacttccaatttcagggtgcgtgtttcagtgccttttgagaattctgcagagtgaattgggtttttctggtgtgctaagtcacattcattcacctgttttccagcttctgagttttattgctgttacctcctgtccccatttttccaatttatttttatatcattttactgtagatttagtagttttggaagggagtaaaattagatgagggtatttaacccactatattaactacttcattctttaaacttccttttttttcttttggcagagagccattagcagcgtgaaataatcttactaagaatgattcttaggctgggcatggtggcttgtacctgtaatctcagcactttgggaggccagggctggaggatggcttgagctcaggagtttgagaccagcctgggcaacatagtgagtgagaccttgtctctactaaaagtaaaaaaatattagccaggcatggtggcgtgtgcctgtagtctcagctatttgagaggctgaggtgggaggatcgcttgagcccaggaggttgaggctgtagtgagccgtgattgttccaccactccaacctgggcaaaattcattttgagaccctgtctcaaaacaaaacaaacaaaaaacacctcttcggaaccatgttcttttcacataatttaaaattaaatatacatagatgtaatttcgaattgcaaactataacctgtttaatgcctaacagcacagcttcatttaattcacaatttgtaacttgtgaaagctttcagggacctggcttaagttgtcctttttagttgttggtctttttacaaattatgtatcataaaacacttgcccagcaaaaatgtaactagtgtggctatggcaaatttgttcttctttgatatgttaacttatatgaattaatgcagtttatctttttttttttttgagacggagtcttgctctgttgacccggctggagtgtagtggtgcgatcttggctcactgcaacctccctctcccgggttcaagcgattcccgtctcagcctccagagcagctgggattacaggtgctgatcaccacgcccggctaattttttgtattattttagtagagacggggtttcactgtgttatccaggatggtctccatctccagacctcgtgatccacccactttggcctctcaaaatgctgggattacaggcgtgagccaccacaccaggcaatgcagtttatctttatgcagttgaccttgaagcatttaggtttactttagccactaagagaaataggtctccttgggttcacaatgtagtgaataaacaattttgagttcagcagggccctgaggctgctcctgaactctgcatgaagtcatggaggttactgttttaagtaaagagccaagagttaaggactaagagaagccccctattattctgaaaacttggatgtgtgcgctggatgagacagcggttgcagtccccattgatagttttttccccctgtcattctaggctaaggagttaggacttaaccagttccagttccaggctaatggaaaattgtcattttactgggggttatgtggtggccaaagttgttaatcattgttccccatggggtagatacagtgagagcttcagtaaagcctttcctctaaaagcccactattttaaggtaacttgggattactgaactatctccttaccccgatgaatcctaacttgagttgactgaggtgttttatcattaaacattagttttactgaaactaatttaaaaggaagccttaactttcatatcaaacagctatggtaaactgagtaagaactctgtacgaagtcgctattaaaatgtttttatcttgctaccaggatatggatgtaaaatgctaataactattacacaacctataatagttacaggttacaatagggataataacactttaacccacaaagactagcttagtcctactacttatctatgaataatgcatgtagtcaataacactggaagggatagagcattataaacttataattcagagatgagaaatggtgccagtaatttaaaagtatttcaggtctcataatgctaaaacagggtgtaggtatgccctacaattacagagaactcagtcgggcttgaggagaacagcctcacttaattgtagttttcctgtcggtgtaaggtgccggcgtttcttcatgtgggaggagactgaaattctaaaggttgtgtggttagtaaaattagtctgtgacctcgggaaactaatgagtctttggggcctcagcgatcttcatgttaaggaatattttagccaggaattgcttcattttcaattcttgtttagggcgctcttaggaaaaaggacgcgtacgctgcacagaaagtaaacaatagagcagaaagaagaatccgaaggtcattaatcttaaaataaccaaccctctggagccaacttatttctctctttaaattgcggaatgagccccatccccctgctggattaaaccgcagaggcccaggcctcccaccgggtgtccgctgcatgaaccagtcgcatgcctgtttccttctcgaaaccctcacagaaagacccaacacactctaggaaataaaccgtcaacgtcaggagacgctcagaaccctcttcccacacccggtggtcctcgcccagagcatatttcgcctccagaccccaggatccgggaaatggaacaaaactccccggcggcggcactcacgcactttccggcacgccggagccgcaaaagcctcgaccgctacgactcctctgtccgtctactgcgaagcggggtggcgttgggggaggtgggcaacctgtcagtaaagggggcggggcgccggccggaagagcctccgcgcggctgcgctcttttcctggagctcaagtgggcggggcctgtcgtccgggcaacccgggagcgtttgtccacacaatttctgctccgactctgcggactactgcagtggagcttgactcttaatggtgagcaaggcaaatgaggcagacaggtggaggggcgaccactgattctgcttcaccagtgttaaataatgtaatcaagagccagtcatattttacagcgaagcgggtcggtttgggaaataactcataccttggggtgggtcggccctcttctcagcaatggctttccttacctggaccaggcggacaggtaggagtcccaaaccagtttctgcaaacgggagatggtcaaagctgtcacacggtatcctgatctcgaatgttgctaagcttgaaaattggtcccaacctagtaactttcagtagtgatagacgttcccactaaattttcttattgcaacttggcggaaatgttttagtacttctccagcagttaattaaaagctaatgcaatttactctgctttgaaaaaatattttatgtcgtcttttgtgggaatatgaattgttttgtgattcaaggttctcatcctgcattagttaaatatgataaggcttctcattttgtttttctgcactcctcaactgccatgttttcagcaaggagacaggccaacatgtagctatgagagtatctctgattttcttaaatgtggtttccatcaagacattttctataattaaaaccagaggaagtggagaatgtaattacttatttaattcattaattaagggaaaaatgtggagtgcattctttgtacttggcactgggctagaagccaagaataccaagaagaacatgacgacaactctgcttataggatacagattaaacaaattaattacaatacagctttacaactgtaacaattgaagcatctaaaatggggtaacacacagttggaaatgatgaaatttcagtgaggggaaacaagggaaggagagtggtgcttttcaacctgttttaaagtataaatacgagttttccacatatggtgggaagaaatagggagtggaggcctggcgcggtggc

SEQ ID NO: 1391 - DNA, 6000 bp, Homo sapiens
gaagaaaaaggggttcctaatccaacattttctagagcagaattaacaaaaagccccaaatctagacataagtaaaaattaaaagctatttttaagagtatttgtgaaattagaactctcttatgtcaaatttgaaatgcgtcctactgttgtaaaggattattccatgatttaaactgcattaatgtctaaaaagtaagcttagtaaactctacaaactaaaactataaaaatattttataattctgtaaatattctgttcatacactgtaagtgattatacaactatctattttgaaaaaaattctacataccttttttgctttgggaccctaaaagttggaaaacaaaagaattgatcaattttaaagacaattctgatacaaaagtatcatgattatgtaagatgttaaaattagaagaagcttggtaaagggcataagggaactctctgtaccatctttgtaactttccttgcaaatctaaaattatcccaaaataaaatgcttttttaaaaagagttcagacaaaactacaaataagtatagaaaaactaagttcacctactgaaccatttttttgtatgtagattttacactgtttcttaggacaatcaatgatccatgtttaatgaaatgccctgttactaaacagagtactagtcaagaaggcactagtttaaagggttcaaaggacaataaatcattgaccaattattggcactaatgtcaaatttgcaagtgtgggaatgatctcataaagaaataacctttccgtaaagttagattgatgatttttatagaaagggaatcagttatttaaagcacgcaaagtagcctcacacggtggctcactcctgtaatagcattcgcggaggccaaggcgggaggatcacctgaacccaagagttcaagatcagcccgggcaacacaggaagaccccgtctctacaaaaaattttaaaaattagccaagcacatgcgtgtggtcccagctacttgggaggctgaggtgggaagatcacttgagcccgggaggtcaaggctgcagcgagccatgacactcagcctgggcagccaagcgagaccgcatttccaaaaaatgaataaataaataaaacaggcggctgggtgtggtggctcacacctgtaatcccaggactttgggcggctgaggaaggtggatcacggggtcaggagatggaggccatcctggctaacacggtgaaaccccgtctctactaaaaatacagaaaattggccgggcatggtggcatgtgtctgtagtcccagctacttgggaggctgaggcaggagagtcgcttgaacctgggaggcggagctgcagtaagccaacatcgcaccactgcactccagtctgggtgacagagcaagactcaaaaaataaacaaataaataaataaataaagcaggtaaagctatgataaaatgaagattctattcagcaatgtgttttaaggcagatctattcttttctggaaattattttggaaagcacaggatttcaaaaaagactcacagttacaataatatcacttatactttcctgattaggctcatgtgtttatcagatttctggtaaggaatttataggagatcatgtgaacataagacactttacatatttgaagagttatacatgggaaatattagttcaacccataagattatactgtgtaaaactgaagtttaacacatatcagtagattccatcttcttgaagagtgcatatattacactaattcactcggcagatattaattaatgatttacacacaaggcaatctgaggcactggagatagaaaagtagagactttgctgccatataatttttacaaatagattctatttttatcatagcttctatcaattaatagttaacatacttccatcgtgaaataagtactaaacagctgaatatgtaaatagcattgctccagttctcaattagccatattttaaagaggggcaaattgtcacttctcacttgtgcttttaatgtaaatcaggtttggggtaagtacatatcctcatttctcctatatgtcataatagccactatgtagtgaagtagttctcaaagttcagagggcataagaatcatatgggaagcttgttagaaatgcatatttatggactaaacgtgtgtatgctcacttctcttcctacactgtggtttagtagatgttatgggctgaattgtattgctcaaaaaattacatgttgtccgggtgcggtggctcacagctgtaatcccagcactttgggaggccgaggcagggggatcacctgaggtcaagaccagcctggccaacatggtgacacctcgtttctactaaaaatacaaaaattagctgggcgtggtggcatgcacctgtaatcccagctactcgggaggctgaggcaggagaatcgcttgaaggagaatcgcttgaacccgggaggcagaggtttcagtaagccgagatcgcgccattgcattccagcctgggcaacagagcgaaactctgcctcaaaaaaaaaaaaaaaaaaaaaaatcatatgttggctgggtgcactggcttactcctgtaatcccagcattttgggaggtcaaagtgggagaatcacttgagcccaggagtttgagggcagcctgggcaacaaagcaagaccctgtctaaaaaaatttaaaaattagctgggtgtggtggcacgtgccttgtactcccagctattcaggaggctgagttgggaagattgcttgaaccagggaggctgagacttcgataagccatgatggtgacactgcattgcagcctaggtgacaaagcgagacagtctcaaaaagaaaaaaaaaaaagaaaaaaaattcatacgttgaaattctgatccccagtacttcagaatttgatctaattggagacagggtcactgctgattttattagttaaattaagatgaagccatactgaatagggtgggcccctaatccaatatgatttgtgtccttatataataataattttaatatactcagatggagaatgccatgtgaagaatgaagttttgttgccacaaaccaagaaactactagaagccaggaaaggtctgaacagatctctccctaaggccctcagaggtatcacagacctgctgacactttgatcttggacttctagtctccagaactacgagacaataaatttcttttctttaaccactcagtttgtggcaattccttacttggcagacttaggaaactaatacagtagatttggagttgagtgggttcctggaatctgcatttttaacaagtactccgggtgcattagaaataaatgttccatgggccacactttgagaaacattgggagaaggatctaagaagaagaagaaactcaggtaacaaattggaaggtaacaagtaagtgcttactgttcccccaatttattagcaattataaattgacttaaggtccatttgcattccgccaggaatgctctccactccctatttctttttttctcttttttttttgagacggagtctcgctctgtcacccaggctggagtgcagtggcacaatctcggctcactgcaacctccgcctcccaggttcaagcgattctcttgcttcagccccctgagtagctggaattacaggtgcgcgccaacacgcccggctaatttttgtatttttagtagagactgggtttcaccatgttgaccaggctggtctcgaactcctgacatcgtgatctgcccgcctcggcctcccaaagtgctgggattacaggggtgagccaccgcgccaggcctccactccctatttcttcccaccatatgtggaaaactcgtatttatactttaaaacaggttgaaaagcaccactctccttcccttgtttcccctcactgaaatttcatcatttccaactgtgtgttaccccattttagatgcttcaattgttacagttgtaaagctgtattgtaattaatttgtttaatctgtatcctataagcagagttgtcgtcatgttcttcttggtattcttggcttctagcccagtgccaagtacaaagaatgcactccacatttttcccttaattaatgaattaaataagtaattacattctccacttcctctggttttaattatagaaaatgtcttgatggaaaccacatttaagaaaatcagagatactctcatagctacatgttggcctgtctccttgctgaaaacatggcagttgaggagtgcagaaaaacaaaatgagaagccttatcatatttaactaatgcaggatgagaaccttgaatcacaaaacaattcatattcccacaaaagacgacataaaatattttttcaaagcagagtaaattgcattagcttttaattaactgctggagaagtactaaaacatttccgccaagttgcaataagaaaatttagtgggaacgtctatcactactgaaagttactaggttgggaccaattttcaagcttagcaacattcgagatcaggataccgtgtgacagctttgaccatctcccgtttgcagaaactggtttgggactcctacctgtccgcctggtccaggtaaggaaagccattgctgagaagagggccgacccaccccaaggtatgagttatttcccaaaccgacccgcttcgctgtaaaatatgactggctcttgattacattatttaacactggtgaagcagaatcagtggtcgcccctccacctgtctgcctcatttgccttgctcaccattaagagtcaagctccactgcagtagtccgcagagtcggagcagaaattgtgtggacaaacgctcccgggttgcccggacgacaggccccgcccacttgagctccaggaaaagagcgcagccgcgcggaggctcttccggccggcgccccgccccctttactgacaggttgcccacctcccccaacgccaccccgcttcgcagtagacggacagaggagtcgtagcggtcgaggcttttgcggctccggcgtgccggaaagtgcgtgagtgccgccgccggggagttttgttccatttcccggatcctggggtctggaggcgaaatatgctctgggcgaggaccaccgggtgtgggaagagggttctgagcgtctcctgacgttgacggtttatttcctagagtgtgttgggtctttctgtgagggtttcgagaaggaaacaggcatgcgactggttcatgcagcggacacccggtgggaggcctgggcctctgcggtttaatccagcagggggatggggctcattccgcaatttaaagagagaaataagttggctccagagggttggttattttaagattaatgaccttcggattcttctttctgctctattgtttactttctgtgcagcgtacgcgtcctttttcctaagagcgccctaaacaagaattgaaaatgaagcaattcctggctaaaatattccttaacatgaagatcgctgaggccccaaagactcattagtttcccgaggtcacagactaattttactaaccacacaacctttagaatttcagtctcctcccacatgaagaaacgccggcaccttacaccgacaggaaaactacaattaagtgaggctgttctcctcaagcccgactgagttctctgtaattgtagggcatacctacaccctgttttagcattatgagacctgaaatacttttaaattactggcaccatttctcatctctgaattataagtttataatgctctatcccttccagtgttattgactacatgcattattcatagataagtagtaggactaagctagtctttgtgggttaaagtgttattatccctattgtaacctgtaactattataggttgtgtaatagttattagcattttacatccatatcctggtagcaagataaaaacattttaatagcgacttcgtacagagttcttactcagtttaccatagctgtttgatatgaa

SEQ ID NO: 1392 - DNA, 6000 bp, Homo sapiens
aatatatctaatgtttatataggccctatgcaaaatgtaaagtgctacataaatgtaaggcatcctggacctcccaactgcataataataatataataataataatcattattacccttttaactgccttgattaaggaaacttcattctgcttccatgactttattttgtattttctaaatcaacaaaattattttttagccttattaacttttccctattatggttcttctcacattccctacgcatcttttctaaaatctgtttgagaggaggtgagagaaactcttgccttaggcaaaatactctcatgcaactctaattgcataatctcctattattctgtctgccttaaaattaaacttaatgatgacaggaattttagagctggaagagaatttaaagttaacacactgcaaacttcttattttacaacggatcagagattatgtggtttgccaaattttatcagttggttactaggagaacaaggctagaacccatgcctcctcctttccacctttcctgtttttcctggaacagcagaaacagaaagcaaccactagaggcgcactgtatgccagtggttgcacacagatttttatgtcagactacccaagttcaaatcttagatctgttacgtagtagctatgtgactttggccaagtactctaactgctctgtgcctcggttttttcatctataaaatggagggcataatagtatcgacttcataggattgttatgaggattcagtgaattaatgtacttaaagcacataacacacttggcacattgagtgaccagaaatctaattgttacgatttagcacacactctgatagctgctgatatttagaggccagggattttacccacagctgtttttgtttgatctgaagtttaaagaacacaaacaaaacaaaacaaaaaacatcacttgagataatgtttatagttctagatatttcacatagagatccaaatttccggtttctctttgaaatcagaaggtctgacatcggtaggccaaaattctcaggtagtaacaattggctggggccaaatgcagctgccccctttaatccgtaccactcatgtaaagcttacatcttttaacttgacctgcctgactactgcatgcctttgcacttgcatttcagcttaagacaacctctgctctcaaggaactcataatccaataggtgagacgcatttgctaaacagtttacaatatattgtcataggaacaagtataaacttgcaaatttcaaaatacagcagtcaactgaaggaacaggagtgccctgaatggtagaggtgctgacggtgatatgtgttgtctaaaaagtggctttgaaaaagaaaaggagaggaacagggttgtaaaggaaatagaatgtgcaaagacactgaaatgggaaacagcttgtgtgtttagaaactgtaaggagttcaattttggacaatactgtaaaatgagaaagggagaagtaggctgacactaaatataatacacatcccttattttgtattttactctgtaagagataggtagcacttaaaaggttttctgtcattaaattacaaatctaggttgggtacagtggctcacatctgggaatctcagtgcttttgggaggcttaggtggacagattgcttgagactagagttcgagaccagcctgggctagaccctgtcactaaaaaaaaacgaaaatattagctgggcatggtggcatgtgcctgtggtctcaggtgtttggaaggctgaggcgagatgatcgcttgtgcccagaagtttgaggttgctattgcactccagcttgggcgatagaacgagatcttgtctctaaatagatagataattaaataaaattgcaaatttaactgcatatttttggaccttgtctttgagaatgcaatgctatacaatccacaatattctatgaacttttttttttttctctttgagacaggagacagggtctcactctgtcacccaggctggagtgcagtggtgcaatgtcggctcactgcaatcttgacctctcaagttcaagcaattctctcacctcagcctctggagattgggtttcaccatattggccaggctggtcttgaactcctgacctcaagtgatccactcgcctcggcctcctaaagtgtggggactacaggcgttagccaccctgccggcctgtactatctttcaatagcaaattgccacttcaagaagaagaaaccctgtcgttataaggggtaaaatatagttttaagattggtctgcaaatgaagtttccttatccgtaaaatgggaataacaatggcacctaactcagggctattaaattgagaattaaactcactaaacccatgtaaagggcttaccaagatacctgatacagaggataaatggtcacttaatgagttatgatacctattgaggcttccttgtctatgtaccctttatttatttatttatttatttatttatttttattgatcattcttgggtgtttctcgcagagggggatttggcagggtcataggacaatagtggagggaaggtcagcagataaacaagtgaacaaaggtctctggttttcctaggcagaggaccctgcggccttccgcagtgtttgtgtccctgggtacctgagattagggagtggtgatgactcttaacgagcatgctgccttcaagcatctgtttaacaaagcacatcttgcaccgaccttaatccatttaaccctgagtggacacagcacatgtttcagagagcacagggttgggggtaaggtcacagatcaacaggatcccaaggcagaagaagttttcttagtacagaacaaaatgacaagtctcccatgtctacttctttctacacagacacggcaaccatccgatttctcaatcttttccccacctttcccgcctttctattccacaaagccgccattgtcatcctggcccgttctcaatgagctgttgggcacacctcccagacggggtggtggccgggcagaggggctcctcacttcccagtaggggcggccgggcagaggcgcccctcacctcccgggcggggcggctggccgggcagggggctgacccccaacctccctcccagaaggggcggctggccgggcggggcgctgacccccccacctccctcccggaaggggcggctggccgggcggggcgctgacccccccacctccctcccgtccgggaggctggcctggcgggggctgacccccacctccctcccggacggggtggctgccgggcggagacgctcttcacttcccagacggggtggctgccggacggaggggctcctcacttctcagacggggcggctgccgggcggaggggctcctcacttctcagacggggcggttgccgggcagagggtctcctcacttctcagacggggtggccgggcagagacgctcctcacctcccagacggggtcgcggctgggcagaggcgctcctcacatcccagacggggcggcggggcagaggtgctccccacatcccagacgatgggctgccaggcagagacgctcctcacttcctagatgggatggcggccgggcagagacgctcctcactttccagactgggcagccaggtagaggggctcctcacatcccagacgatgggcggccaggcagagacgctcctcacttcccagacggggtggcggccgggcagaggctgcaatctcggctctttgggaggccaaggcaggcggctgggaggtggttgtagcgagccgagatcacgccactgcactccagcctgggcaccattgagcactgagtgaacgagactccgtctgcaatcccggcacctcgggaggtcggggctggcggatcattcgcggttaggagctggagaccagcccggccaacacagcgaaaccgtctccaccaaaaaaatacgaaaaccagtcaggcgtggcggcacgcgcctgcaatcgcaggcactcggcaggctgaggcaggagaatcaggcagggaggttgcagtgagccgagatggcagcagtacagtccagcttcggctcggcatcagtgggagaccgtggaaagagagggagagggagaccgtggagagggcgagggcgagggcgagggcgagggagagggagagggagctatgtaccctttttttgagaaagtacatctggttaagtatgtatttttcattgaaaactaaagttaaatcaggactgatggcattttccgactgcatttggtaaaaaataaatgccaaaaatattagattgaaaatgccaagataaaacttccttaccttctgtattgtaaaagtttcaagaataatttaaagatttttgcacaacacagaaagtgcaagttatcgtctatagttaataattaaataaaacagtttattaatggtaggtaataaaggtgcttagtaaaacagatggttctccagttccccaggctcaatgagcaggcaaagatccttttaggcaaaagacattttcacatctaacagtaacatctctgatggtcaggcaggtcaaacaatcacttggcgggaaatagataaatacagactaaattcgcacaatctgtttctgtttagtttataaactgcgatccagagtgtcagctttcgtgccttgtgggacttgaagtccagaaggaagaagtgatcagggctgccgagggatggaagcgtgcagcccctgcaggtctgagacctacgaactacaactcccggcaagcatcggaaggccgcgtcgtaattgcgggcaaccaatcgtaccagagcagggcaagcccccgccctctggctcggtggaaggcctccgccaatggcagagctcccatcgcagagcctgcgggttaggttgtgaggcccgggccgggggcggggaggagccaagggggcgagcaagctcggtggctgggtgggttggggcgttccgcgcgcccttcattgaagcggcggtggccgggctgggcgccggtagtggaaagcgacggcgcggctggaaaatgccagtccattcccgaggggataagaaggagaccaaccatcacgatgagatggaggtggactacgccgaaaatgaggggagcagctccgaggacgaggacactgagagctcgtcggtctccgaggatggagatagctcaggtgcgcgacccactgctgggaccctgagtccccgcgcccagcgcgcgacaggccgctctccgcacgccaggcggctgcgtcctgctgggaaagcggggcggggacagagggaaggggcggagactggctctgggccctgggctgcaccctgaccggtcgctgggcgctgtctggctcctgatgggtcccggcggcggggcggggcgggcctgggcttgtccagctcccaaacgcggcgtggtcctgcccccggtggtgctctggagcgaccagcccaggcggacaacttcccgcagcagacaaactggaaatgcctcctctccccagcccaccgacctctttccctattttcacctttgcaaccctcacttctcagcgcaagtgagttgccgggacagagggtcggcttagtaattaacctcagtttgcaagtcaacttgccggtcagcacttttacatcagtgtcttttcgggggctaacttgagagcggtcccgttcagtagctccctgaagtttgcaagactgagaggaagggaccaacattcgggctcattttggatcttcatatgcttataaattggctgagttttggcagcgttgaaaattctccaagtcttttcttcccttcagttttttctaactttgggctgttttaaattattttgggtgggggaggagggcagattaacactacaaataaattttgcaaacttttaggaatggttattctaaagtgaaatggaatttgtgattaccgggattattttctttcgattcaaatgatggagatgagactgacttctttgtcttggcc

SEQ ID NO: 1393 - DNA, 6000 bp, Homo sapiens
aaatattttatggagaccaggtcttccgatgttgcccaggctggtctccaactcctgggttcaagcccacaaaaaaaccctgcctccaaaccctcagtttagttaatgaggtctttagtagacaaacaatagttgaagcctctttcaaattggtctgtcgcataaaatacaaaacagctgagactgaatctagttgctcttgtgctagtatacaagtgacaaggttgagattcagtgacaatggccttctaaagtcactacttactgatctttgagatcggtaaactgtttttcaagattggacatttcatccaaacattccattcttcttctttcacagtcttcatcatccatttctgttaataaaaaggcaaatataaaagataaacttaattttcaaatttatctgaacatctcaaatatatctgaacgtaattcaaataggaagaaaaactgtaatatgaagagaagacctatattaagccttaaaagaaaataaacaagatttatcaaaaataataatttctgctgggcgtagtggctcatgcctctaattccagcagtttggaaggccaagtcaggaggacagattgagcccaggacttcaagatcagcctgggcaacagaggaagaccccatctctacaaaatataaaaatattagctgggcacggtaccatgagcctgtagtctcacctaccaggaggctgaggcaggaggatcgcctgagcccaggagttggaggctgcagtaagccatgattgtgacactgcactccaccctgggtgacagagtgacctagtctaaaaaaaaaaaaaaaaaaaatccactatagatttaatctaaaatacagatgagtatataaaactatactggtctctagaccctcttacttttattcatttttaaatcactttaaaggactgactataagctataactataaagtaattagcccacatttggtttgttttccaccaactcaccagaatgtagcaccaaaatgactgtgtcctttaaaggctaacattgctcaaaaacatttttgggattcttctttcagaactgctcacatggctgatttgcctgtcacataaaaaaagaaaagtggccgggtgtggtggctcatgcctgtaatcccagcactttgggaggctgaggctggaggattgctcgagctcaagcgttcaagaccagcctgggcaacatggtgaaaccccatctctaataaaaatacaaaaattagccagacatagtggtggatgcctgtagtcccaactgctcgagagaccgaagtgggaggatcgtttgaacttgataggcagaggttgcagtgagccaagattgcgccagcctgggcaacagagatcctgtctcaaaaataaaaagtgaaagaaaggccaggcatggtggctcactcctgtaatcccagcactttgggaggctgaggcaggcggatcacctgaggtcaggagttcgagaccagcctgaccaacatggagaaaacccatctctactaaaaatacaaaattagctgggcgtggtggcacatgcctgtaatcccagctacctgggaggttgaggcaggagaatcgcttgaacccaggaggtggaggttgtggtgagccaagatcgtgccattgcactctagcctgggcaacaagagcgaaactccatctcaaaaaaaggaaaaaaaaagaaaaagaaaaaggaaaactaatcttattatgtttaccacaggctctcctggtctgccattcctacgttcccttattccgtctacccatattactatcagtgagaaagaggcaaatgaggaggaaaatacaaactttttaaggaaagcaactgttaattaccaggtctgtcctatagtccacattttctatgttcatatcacatatattcattcatcaaaataactgaagcacaaaatgatctgcatcttgatcttcatcaaataaaagtcaaactatgagaaagagttaaatcatgttcaattatttttatataacatggaaggctgactcatttttttctcattttctaaaacagattaaaaatacttctggcttttgattgcttacttcttggctactcaaaacttggtccctcaagatgactcactatccaagttctctggatagtagaggcttttccgtagccttagaatttgctcagcaccaacatttgagaagaaaacactgtgaaagtttaacatgaaagacatatggtagaacagagatgctttaacagaagcaaactgcaaaatttatttaaacaatttctttgcacttaaaattttgacttgtagttcaaattattatcacattcttcaaaaattaagttgttcattattttttgggatggaatttttaaaagttaaaaatcacaagagtcaacataaaaattatagggggagaattttaacaaatagaattttatgagatccttgctcctatcataaatgcaagaacatctgaagacaaaatactttatagatctaagaaacatattcaccaacaggccaggtgcagtggctcccgcctgtaatcccagcactttgggaggcagagtcgggtggatcacttgaagtcaggagttcaagaccagcctggccaacgtggcaaaaccccatctctactaaaaacacaaaaattagccgggtgtgttggaggatgcctgtaatcccagctactcaggaggctgaggctggagaatctaatccaggaggcagaggttgcagcgagccaagatcgtgccactgcactccagcctgggtgacagagcaagactgtctcaaaaaaaagaaaaaaaaaaaagaaatatattcccatacagtctcctttctctatattccccgcttttgaaatctcacctactttcatggcaaggcagatgacttacaaattattctccccttcccatatcgggcaggttccaatgtcacatttccatttgtcagttgggcaatcttaagcatactgccatcactccaaaagcaacacgtcggccaggcacggtggctcacacctataatcctaacacttggggaggccgaggcaggcagatcacctgaggtcaggagttcaagaccatcctggccaacatggtgaaacacaaaaattatctgagcgtggcggcgcatgcctgtaatcccagctactcgggaggctgaggcaggagaattgcttgtaccctggaggtggaggttgcagtgagccaagatgatgccattgcactccagcctgggtgccaagagcaaaactccttctcaaaaaaaaaaaaaaaaaaaggctgggaatggtagctcatgcctgtaatcccagcacattgggaggttgaagtgggtggatcacgaggtcaggagttcgagaccagcctggacaacatggagaaaccctgtctctactaaaaatacaaaaaattagcttggtgtggtggcacccgcctataatcacagctactcgggaggctaaggcaggagaattgcttgaacccaggaggcggaggttgcagtgagccaagatcacgccattacactccagcctgggcaacagagcgagactccatctcaaagagagaaaagaaaaaaaaaagcaacatgtctgaaatactcttttctttcaccttcatctcaaatctttcacttttctatttctgttgatgctaccgccactctccttgtatcttggtttttctcttaccttcaatcctaaacttgcattcatcaatcctgttttgtgctttctttgaaatcactcacatctatactttcctgttcttttccgagctcaactccttctcccaaggttttcacgctcttttgaataagccccaaactctggcccttgtactttttcttacatccctctccctgcagggatacccaccaccccaaaccaaattctactcattcttcaagataattaaggtaatcccaccttcttcagctaggctttgtgaccacccaatattgaaacgatttcctctgcctctgaattcctacagcaacatttagttaagcattcatttggcaatttaatcaagtggtgacttatgatagctttttaagtgagcccagataataactatttatccctcatattgagtactgtccagtgctgcacaaagaagtcactcataaatatttttggatggctgatttactgattgaaattatatccttccatggagatttgctttgcaagggaaacatgaaaagagggcatctgggtgatactaggctgtcatcaacctatcatcaatgcttcctttacatgaccaaaatcaggccaagacaaagaagtcagtctcatctccatcatttgaatcgaaagaaaataatcccggtaatcacaaattccatttcactttagaataaccattcctaaaagtttgcaaaatttatttgtagtgttaatctgccctcctcccccacccaaaataatttaaaacagcccaaagttagaaaaaactgaagggaagaaaagacttggagaattttcaacgctgccaaaactcagccaatttataagcatatgaagatccaaaatgagcccgaatgttggtcccttcctctcagtcttgcaaacttcagggagctactgaacgggaccgctctcaagttagcccccgaaaagacactgatgtaaaagtgctgaccggcaagttgacttgcaaactgaggttaattactaagccgaccctctgtcccggcaactcacttgcgctgagaagtgagggttgcaaaggtgaaaatagggaaagaggtcggtgggctggggagaggaggcatttccagtttgtctgctgcgggaagttgtccgcctgggctggtcgctccagagcaccaccgggggcaggaccacgccgcgtttgggagctggacaagcccaggcccgccccgccccgccgccgggacccatcaggagccagacagcgcccagcgaccggtcagggtgcagcccagggcccagagccagtctccgccccttccctctgtccccgccccgctttcccagcaggacgcagccgcctggcgtgcggagagcggcctgtcgcgcgctgggcgcggggactcagggtcccagcagtgggtcgcgcacctgagctatctccatcctcggagaccgacgagctctcagtgtcctcgtcctcggagctgctcccctcattttcggcgtagtccacctccatctcatcgtgatggttggtctccttcttatcccctcgggaatggactggcattttccagccgcgccgtcgctttccactaccggcgcccagcccggccaccgccgcttcaatgaagggcgcgcggaacgccccaacccacccagccaccgagcttgctcgcccccttggctcctccccgcccccggcccgggcctcacaacctaacccgcaggctctgcgatgggagctctgccattggcggaggccttccaccgagccagagggcgggggcttgccctgctctggtacgattggttgcccgcaattacgacgcggccttccgatgcttgccgggagttgtagttcgtaggtctcagacctgcaggggctgcacgcttccatccctcggcagccctgatcacttcttccttctggacttcaagtcccacaaggcacgaaagctgacactctggatcgcagtttataaactaaacagaaacagattgtgcgaatttagtctgtatttatctatttcccgccaagtgattgtttgacctgcctgaccatcagagatgttactgttagatgtgaaaatgtcttttgcctaaaaggatctttgcctgctcattgagcctggggaactggagaaccatctgttttactaagcacctttattacctaccattaataaactgttttatttaattattaactatagacgataacttgcactttctgtgttgtgcaaaaatctttaaattattcttgaaacttttacaatacagaaggtaaggaagttttatcttggcattttcaatctaat

SEQ ID NO: 1394 - DNA, 6000 bp, Homo sapiens
cggccgggttcggtggctcatgcctgtagttccagcactctgggaggccgaggtgggtggatcatgaggtcaggagttcaagaccagcctgaccaagatggtgaaaccccatctctactaaagatacaaaaatttagccgggcatggtggcgggcgctggtaattgcagctactcgggaggctgaggcagagaattgcttgaacccgggaggcggaggttgcagtgagctgagattgcgccattgcactccagccagaacaacagagcgaaactccatctcaaaaaaaaaaaaaaaaaaaaaaatatatatatatatatatatatatacacatatcattgaccctgtcatgcggcatgtgattttcatatcttgctctggagaaagtccatactttggtattgaaacattatgcattgttattctaggagaacccatccccccacggaccttgactgaagctggcacaatggcactttgctacagtgctgcttgggatgcacgagttatcactagtgcttggtgggtgtaccatcatcaggtaataagggctcttgtcctttttcttaatttactaagagctactgtgtgccaaattttgagagtatagaagtaaataaagcagacaaggctcaatagagctaactctttttggtagaggaaaatatgtacataatgtcaggtaataagtgccataaaatagtgtttttaaaagcatggaaggggatagagagtgataggggataccgttttggatgaagtattgggggaacctttctaggaaggtaggatttgagcagagaggtaaatgaagagagagtgatccacacaattatacaggataaagagtgttccagttattattgattattattggcatactgacctaaaaggcctttcttctgttcatctttgttggaatattctgaattctcttgggcacttccagaaaagtaggcatatcctgtttgtttttttttttaaattcacttgtttttattaattgcccttctttgtggttaatgatgttgttggggtttttttgcatttttttttttctttatagagatgaggtttcaccatgttggccaagctggtctcgaattcctgaccttaagtggtcctcttgcttcagcctcccaaaatgctgagattacaggcatgagccatggtgcctggccagtgctgttgagtttggtgatacttcattctatatttgacctcacattgctattgatttcttatcatacttttgagaattataattgatgatgatgtacttttataagttcctaaagctgtacagtaggataaaaagaattcagtttcattatactcccttagatttagtttcatttttatatctttttatattatatgctgtgctgtgatattgtcatatagggggattataaattgctacctcagtgctgttataaaagtggttttaattctttcattaagaaattttttagaatgaaatttagtgtttttaatcccttgctggttttttgtgtttgtttgttcgttttgagatggagtcttgctctgttgtccaggctggagtgtagtggtgcaatcttagctcactgcagcctccgcctcctgggttcaagcgattctcctgcctctgcctcctgagtagctgggactacaggagtgtcccaccatacctggctactttttctatttttgtagagatggggttttgccatgttggccaggccagtctcaaactcctggcctcaagtgatcctcctgcttccgcctcccaaaatgctgggattacaggcatgagctagcacacttggccccttgctattttaataactatgactaataaagatactctcaagatttgggggtttcacagatgtataaattttttttttttatgagatggaatgttgctctgtcacccaggctagaatgcaatggcgtgatctcggctcactgcaacctctgcctcctgggttcaagcaattctctgcttcaacctcccgagtagctgggattataggcacccaccaccacgcctggctaattttagtagagacagggtttcaccatcttagccaggctggtcttgaactcctgacctcacaatccacctgccttggcctcccagagtgctgggattacaggtgtgagccactgtacctggccccaaaatttttttaaattatgggataagtttactcactttctgttttgccaaaataggatatatttttaaaaatctgctatttcatatagacaaaggttacttttgcctcatgcctgtaatcccagcactttggaaggccaaggtgggcagatcatgaagtcaggagttcaaggccagcctggccaatatggtgaaaccccgtctctactaaaaaatacaaaaattagccgggcgtggtggtgcgcacctgtaatcccaggtacctgggaggctgaggcaggagaatctctggaacctgggaggtggagattgcagtgagccaagatcaagccactgcactccagcctgggtgacagtgtgagactctgtctcaaaaaaaaaaaaaaggcaaaactttattatcaaaaacagtatcttagacaaggattttatttaataaatagagctttattttagtaaacatagctttatgataagctcattaacctatccttagttttctcattacatctcatgctggaagagatgagtggaccagttctggctgtcgtccatggcatttgaaaattattgccgggcatagtggctcacgcctgtaatcccagcactttgggaggccgaggcaggcggatcatgaggttaggagttcaagaccagcctggccaacatagtgaaaccccgtctctactaaaaatacaaaaatcagctgggcatggtggtgcgtgcctgtagtcccagctactcaggaggctgaggcaggagaatcacttcaaccaaggaggtggaggttacagtgagccgagattgtgccactgcacttcagcttgggcaacagagtgagacttcatctcaaaaaaaaaaaaaaagaaagaaaattattgatgtagtggattctttgtttttttctttgttacttccaaaggcttatctgtcattaaaggggtatctttccctttagtattgagaatttgtacgaaattataaacttttcagaagacagtgtggcttacttgactctgactttactttctcctcaagtggaaaaagaaaactagagtatttttttaaataagaatataatgtattattgtgttcttcaggtatctaaaacagcaccaactggagaatatttgacaacaggaagcttcatgataagaggtaatgtcttgacaggaaaaatatcactagacttgtcaatggattatggagacaggtttgagacagtttacaaatactcttagaacaaaaacaaattactcggatttcctatgtgaagtctgctatgaagtaaagaaatttttgccttggtgtgacaagtttagtgtttgtcatatcttcttcatgtatatttttattgagggcagtgcactttcacatagtttagttataagggtaagaaaggatagcctgaacttatttctgaaaatagaatattcagggtctgactgacccagaatatcagagcaagtgtgtatattttttacttcttaataactgttcctatacatactgcccagttctataaatgggaaatgttattcttgacatagtaaaagacaaaatggatatgaccattagtgtcatctgacactaatttttttttgttttacaagcaaaaaatggagaagactgattttcaaagcattaatgtacgttatcttttgtaggaaaaaagaattttcttcctccctcatatctaatgatggggtttagcttcctttttaaggtactcttcaacttcttggttatttatttgtttttttcctgattttcattagtcttgtctgaagctccgtcactgaaaaataactgtttctttaggtagatgagtcttgtgtttggagacatcagggtgaacgaaaagtcagagtacaggatgaagacatggagacactggcaagttgtacaagtgaactcatatcagaagaaatggaacaattaggtagtttatagattttaagaaattagcttgtgatgttttttgttacctagttttgcttctaaatccttagaagatcatgtctctttgggataatctaaatttcaaaaaaaccccgaaaacccaaagtacgtgctgttttactgaatttttttttttttggaaatgctaaatatacttattctagtgaatttaaaagtatttatcagtccgggcattgtggctcatgtctgtaatcccagcacttttgggagtccgaggcaggtggattgctagagctcaggagtttgagaccagcctgggcaacatggcaaaaccatctctaccaaaaaaatcacccaggcgttgtgagcgcctatagtcccagctactgaagaggctgaggtaggaggattgcttgaacctgggaggcagaggttacagtgagcctagatcacgccactgccactgcactccagcctgggccacagaatgagaccctgtctcaaaaaaaaaaaaaaagtatttaattggatccatactaacatactttaatgtatgtttatatagtgagacttcagtatttaatgggtaatgcataaatgtgtttaacaaaggtagactcgggtaaatgtgcattagcatttagttttgggtttaggaattacaagtgatagatgaatttataaagtgcagtttctcatatgaaaatttggcttgatttaataaaatatttgtttcaagtagagagcaattatagttgctggaataaattcatctgcctacctgaggaaactagggaaaatattcccactaaactacttttgtagttattctctctgctaaggtcattcctctttacaggtaatattgcattgtttcatttactattactgttgtgctgcaagattttgttgattgaggctcaccatttccctgggactgtataaagtgccttatttacattcttttctttttttttttccccccgagagggagtctcagtctgtcgccaggctggagtgcagtggcacaatctcggctcactgcaacctctgccgcccaggttctagcaattcttctgcctcagcctcccgagtagctaggattacaggcgcctgccaccacgcctggctaatttttgtatttttagtagagacggggtttcaccatcttggccaggctggtcttgtactcctgaccttgtgatccacccacctcggcctcccagagtgctaggattacaggcatgagccactgcacctggcctatttacattattttctattctcacaaccatccttgtcagatgagtggtggcatctcattttacaggtgaggcagtagaccctgttactactattagacagtgttccttttgcagaagaatgagcacctgctatgtgggcgttatataatacgtatttaagtttttatgtgcaaattataataaaagcagcaaaagttatgcaactaattttgctgtcttggtttttggaaatacccaactaaggcagagttgtggttttcattgttgaaagggtagcaatgtccaagaaatttattgtggtaaaggatcttggagatcatttagttcaacctattcatgatacaggttattcttttgtctaagagtaccctttgggaatgatcagacacttttctgttgattttttggagaaatatgggagaaacagtggaatatttttatgacatttttaggaaatcacctggcttggttggtagtcccacactgactttccttatgataattctacagatggaggtgacacgagcagtgatgaggataaagaagaacatgaaactcctgtggaagtagaactcatgactcaggttgaccaagaggatatcactcttcagagtggcagagatgaactaaatgaggagctcattca

SEQ ID NO: 1395 - DNA, 6000 bp, Homo sapiens
gtggtggaggttgcagtgagccgagatcacgccactgcactccagccggggtgaaaagagagagactccgtctcaaaaaaaaaaaaaaaaaaaaatcacaagataccactttatacccactaacatgtgctggtgatgatgctggagaaaacaataacacgtgttggtgatgatggtggagaacatagaatactgctggtaggaatggacaatgatacagctgctgtgggaagtggtttggcagttccaaaaaatgttaaacataattgacccagcaattcctctcttaggtatatacccaagatgagcaaaggtatgtgtctacacaaaacttgtttgcagatattgatagcagcattatttataatagccaagaaatggaaacaatccatatgtcattcaattaatgaataaacaaaatgtgatatatccatataatggaatattattcagacttgcaaagaacagaagtacttatatgtgcttttaacatggatgaatcttgaaaaacattaagctaagtgaaagaagccaaacctaaaatgctgtgtatgattacatttgtatgaaatgtccaaaataggcaaaaccatagagacagaaaatagattagtaattgccaggggctgggtacagaggagaaaatggggagtggctgctaatgaatatagggtttcttttctgggatgatgaaaatattctggaattaaatagtattgatggtcatggtcacacagcattatgaatatacaaaaagccactgaattgtatactttaaaggggtgaattttatggcatgtgaattataccccaatttaaaaatatttgaaatctaaccataagggacatgttattcatatatgctcttcatgttcatgattcagccaatctattttaattttggaagtcttcaaactttaaatggatttctctaaattatcttttctggagtgaagttagaattattgatgtgagaggatatttcttctctgacatgttttatttacgtaggtcatttaaaagcttgctctgtaaataggagtattaaaaatacatttttaattaaaatagtaactttttataatggtgaagtaaaaatgtattagtatttaagatatgtgattgaccggccgggttcggtggctcatgcctgtagttccagcactctgggaggccgaggtgggtggatcatgaggtcaggagttcaagaccagcctgaccaagatggtgaaaccccatctctactaaagatacaaaaatttagccgggcatggtggcgggcgctggtaattgcagctactcgggaggctgaggcagagaattgcttgaacccgggaggcggaggttgcagtgagctgagattgcgccattgcactccagccagaacaacagagcgaaactccatctcaaaaaaaaaaaaaaaaaaaaaaatatatatatatatatatatatatacacatatcattgaccctgtcatgcggcatgtgattttcatatcttgctctggagaaagtccatactttggtattgaaacattatgcattgttattctaggagaacccatccccccacggaccttgactgaagctggcacaatggcactttgctacagtgctgcttgggatgcacgagttatcactagtgcttggtgggtgtaccatcatcaggtaataagggctcttgtcctttttcttaatttactaagagctactgtgtgccaaattttgagagtatagaagtaaataaagcagacaaggctcaatagagctaactctttttggtagaggaaaatatgtacataatgtcaggtaataagtgccataaaatagtgtttttaaaagcatggaaggggatagagagtgataggggataccgttttggatgaagtattgggggaacctttctaggaaggtaggatttgagcagagaggtaaatgaagagagagtgatccacacaattatacaggataaagagtgttccagttattattgattattattggcatactgacctaaaaggcctttcttctgttcatctttgttggaatattctgaattctcttgggcacttccagaaaagtaggcatatcctgtttgtttttttttttaaattcacttgtttttattaattgcccttctttgtggttaatgatgttgttggggtttttttgcatttttttttttctttatagagatgaggtttcaccatgttggccaagctggtctcgaattcctgaccttaagtggtcctcttgcttcagcctcccaaaatgctgagattacaggcatgagccatggtgcctggccagtgctgttgagtttggtgatacttcattctatatttgacctcacattgctattgatttcttatcatacttttgagaattataattgatgatgatgtacttttataagttcctaaagctgtacagtaggataaaaagaattcagtttcattatactcccttagatttagtttcatttttatatctttttatattatatgctgtgctgtgatattgtcatatagggggattataaattgctacctcagtgctgttataaaagtggttttaattctttcattaagaaattttttagaatgaaatttagtgtttttaatcccttgctggttttttgtgtttgtttgttcgttttgagatggagtcttgctctgttgtccaggctggagtgtagtggtgcaatcttagctcactgcagcctccgcctcctgggttcaagcgattctcctgcctctgcctcctgagtagctgggactacaggagtgtcccaccatacctggctactttttctatttttgtagagatggggttttgccatgttggccaggccagtctcaaactcctggcctcaagtgatcctcctgcttccgcctcccaaaatgctgggattacaggcatgagctagcacacttggccccttgctattttaataactatgactaataaagatactctcaagatttgggggtttcacagatgtataaattttttttttttatgagatggaatgttgctctgtcacccaggctagaatgcaatggcgtgatctcggctcactgcaacctctgcctcctgggttcaagcaattctctgcttcaacctcccgagtagctgggattataggcacccaccaccacgcctggctaattttagtagagacagggtttcaccatcttagccaggctggtcttgaactcctgacctcacaatccacctgccttggcctcccagagtgctgggattacaggtgtgagccactgtacctggccccaaaatttttttaaattatgggataagtttactcactttctgttttgccaaaataggatatatttttaaaaatctgctatttcatatagacaaaggttacttttgcctcatgcctgtaatcccagcactttggaaggccaaggtgggcagatcatgaagtcaggagttcaaggccagcctggccaatatggtgaaaccccgtctctactaaaaaatacaaaaattagccgggcgtggtggtgcgcacctgtaatcccaggtacctgggaggctgaggcaggagaatctctggaacctgggaggtggagattgcagtgagccaagatcaagccactgcactccagcctgggtgacagtgtgagactctgtctcaaaaaaaaaaaaaaggcaaaactttattatcaaaaacagtatcttagacaaggattttatttaataaatagagctttattttagtaaacatagctttatgataagctcattaacctatccttagttttctcattacatctcatgctggaagagatgagtggaccagttctggctgtcgtccatggcatttgaaaattattgccgggcatagtggctcacgcctgtaatcccagcactttgggaggccgaggcaggcggatcatgaggttaggagttcaagaccagcctggccaacatagtgaaaccccgtctctactaaaaatacaaaaatcagctgggcatggtggtgcgtgcctgtagtcccagctactcaggaggctgaggcaggagaatcacttcaaccaaggaggtggaggttacagtgagccgagattgtgccactgcacttcagcttgggcaacagagtgagacttcatctcaaaaaaaaaaaaaaagaaagaaaattattgatgtagtggattctttgtttttttctttgttacttccaaaggcttatctgtcattaaaggggtatctttccctttagtattgagaatttgtacgaaattataaacttttcagaagacagtgtggcttacttgactctgactttactttctcctcaagtggaaaaagaaaactagagtatttttttaaataagaatataatgtattattgtgttcttcaggtatctaaaacagcaccaactggagaatatttgacaacaggaagcttcatgataagaggtaatgtcttgacaggaaaaatatcactagacttgtcaatggattatggagacaggtttgagacagtttacaaatactcttagaacaaaaacaaattactcggatttcctatgtgaagtctgctatgaagtaaagaaatttttgccttggtgtgacaagtttagtgtttgtcatatcttcttcatgtatatttttattgagggcagtgcactttcacatagtttagttataagggtaagaaaggatagcctgaacttatttctgaaaatagaatattcagggtctgactgacccagaatatcagagcaagtgtgtatattttttacttcttaataactgttcctatacatactgcccagttctataaatgggaaatgttattcttgacatagtaaaagacaaaatggatatgaccattagtgtcatctgacactaatttttttttgttttacaagcaaaaaatggagaagactgattttcaaagcattaatgtacgttatcttttgtaggaaaaaagaattttcttcctccctcatatctaatgatggggtttagcttcctttttaaggtactcttcaacttcttggttatttatttgtttttttcctgattttcattagtcttgtctgaagctccgtcactgaaaaataactgtttctttaggtagatgagtcttgtgtttggagacatcagggtgaacgaaaagtcagagtacaggatgaagacatggagacactggcaagttgtacaagtgaactcatatcagaagaaatggaacaattaggtagtttatagattttaagaaattagcttgtgatgttttttgttacctagttttgcttctaaatccttagaagatcatgtctctttgggataatctaaatttcaaaaaaaccccgaaaacccaaagtacgtgctgttttactgaatttttttttttttggaaatgctaaatatacttattctagtgaatttaaaagtatttatcagtccgggcattgtggctcatgtctgtaatcccagcacttttgggagtccgaggcaggtggattgctagagctcaggagtttgagaccagcctgggcaacatggcaaaaccatctctaccaaaaaaatcacccaggcgttgtgagcgcctatagtcccagctactgaagaggctgaggtaggaggattgcttgaacctgggaggcagaggttacagtgagcctagatcacgccactgccactgcactccagcctgggccacagaatgagaccctgtctcaaaaaaaaaaaaaaagtatttaattggatccatactaacatactttaatgtatgtttatatagtgagacttcagtatttaatgggtaatgcataaatgtgtttaacaaaggtagactcgggtaaatgtgcattagcatttagttttgggtttaggaattacaagtgatagatgaatttataaagtgcagtttctcatatgaaaatttggcttgatttaataaaatatttgtttcaagtagagagcaattatagttgctggaataaattcatctgcctacctg

SEQ ID NO: 1396 - DNA, 6000 bp, Homo sapiens
cctcttcctctccctgtagtctcaatgcctctctacggtagggtattagacttctaacattgtaactcaagcttcaagaggccaaactggaagctacaagtcttattaaaggctagagccaaaaatagcatagtatcacttctgtttaccacgctttgttggtcaaaggaatcacaggctaccctggattcaaagatgggaagaaaacagaacctacttcatgagtgttaaagaatgtgtggccatttttaatttctatcatacctactctttaacttcttggttttgttgttgttgtgtttttgagacagagtctcgttcgctgtgtcacccgggctggagtatagtgttgcgatcttgactcaccgcaacctccacgtcccaggctcaagtgattctcctgcctaagcttccccagtagctggcattacaggcatgtgccaccacacctggctaatttttgtatttttagtagagatggggtttcaccatgttgcccagggtggtctcgaactcctgatctcaggtgatctgcgcctgcctcagcctcccaaattgctgggagtacaggtgtgagccaccgtgcccagcctctttaatttcattttaaaatttattttgttttgttttgtttgagacagggtctcactcagtcacccaggctggagtgcagtggcacactcacagctcactgcagcctcaacctcctgggctcaggtggtcctctcacctcagcctccctagtagctgggactacaggtgcatgccaccacatctggctagtttcttatattttttgtagagaatggatttcaacatgttgcacaggctggttttaaactcctgggctcaagtgatccacctgcctcagtctcctaaagggctgggattacaggcgcaagccactgtgcctggctgttttgctttttaaactttgtgagctgtgtcgtacatatgaaactgtgcataagacatacacataatgtaagtttaaggaatttataaagtgagaaactatataattggcatctagaaatagaactttgcctgcatcccagaaacccgcacccaagtacctttcctcttagaaataaccactattctgacttcgtggcattctcttgttattcttaatggtttttagtgcctgaatatatctctaaataatatttgaacggtctttactaccggaaagttcttccttatgttaagatttaatccattgccctaaaattttttcattagtactttctttaacccttggggttataaataacaaatttagcattatttttacccagaagaaccacaactattttttgtattacatggtttcaattgaattccactattctgtttgttccatttgtatgtctttctgggaaaatatgattccccagtacacaacaatgtattctatctctgatttactctctaagcataggactgaaaaatcccatctctcattctagattccagacatctattgatgaggccaaacatagtgatggttaatgctaagcttataagagactaaaatattttatataagacagtgcctggggctcagtttcgggctactgaaaaaagaaatgggaatggtttccttataaaaggatgagtttggtcctcttgtctctctcattctctcgttgctcttccaccatgggatgtaacaccaagaaagccctttcaagatgccagtcctttgatcttggacttcctagtctccaggactgtgaggcattaaatttatgttctttataaattacttagtttgtggtgttctgttatagtagtgtaaaatgaattatgggaacaaataaaatttgcatatatttgaggtgtgtatatatatataaatatgttatatattatataaatatattatacatattatataaatattatataaatatattatacatattatataaatatattatacatatatctatatatataaatattatatatatatatattttttgagacagggtttccctcttgttgcccaggctagagtacaatggcacagtctcggctctttgcaacctccacctcctgggttcaagtgattctcctgccttagcctcccaagtagctgggattacagatgcctgccaccacgcccggctaatttttgtatttttagtagagacagggtttcagcatgttgaccaggctgatcttgaactcccaacctcaggttatacacccaccttggcctcccaaagtgctgggattacaggcgtgagccactgcagccggccaattttttttttttttttttttttttttttttattagacagggtgttactctgaagctcctgctggagtgtggtggcacaattatggccaccatgccttgacctcctgggctgaagggatcctcctgcctcagcctcccatgtagctgggaccataggtacatgccatcacacctggctaatttttttatttttttgtagagattggtgagggggcctcactatgttgtccgggctggtcttctgggctcaggccatctgccagccttggcctcccaaggtgttggaattataggtgtgagcaacccggcccagccatgtgatgttttgatgtatgtatacactgtgagatgattactacaatcaagccaattaacacatccataacctcacactttgtatgtgtgtatttgatatccactttcttagcaaatttctgttttttattttaatttaacttttattttaagttcatggggtatatgtgcaggtttgttatataggtaaatttgtgtcatggggtttgttttacaggttatttcatcacccaggtattaaacctagtacccattagttatttttgctgaccctctccctcctcccattctccaccctctgataagcgccagtgtgtgctgttcccctccatgggtccatgtgttctcatcattcagctcccatttataagtgagaacatacggtatttggttttctgttcccatgcaaatttcaagcatacaatacattactatgaactataatcagcatgttgtacattaagtctccataacttactctacttacaaccgaaagtttgtgcattttgaccagtatcttcccatttcccctacatcccaagtcctggaaaccacatttctgctgtctgtttctatgagaaacttctagattccacgtataagtgagatcatgcagtatttgtctttttatgtctggcttatttcacttagcataatgtcctccaggttcatccatgttgttaaatccatgccagttgcaaacagcaagatttatttcttttttgaaagctgaataatattccactgtatgtatgtatgtgtgtgtgtgtgtgtgtgtacatatatatttgcactcattatccgttcatccattgatgaaaagtagattatccctatatcttggctattgtgaataatgctgcaatgaacatgaacatatatcttcaggatagtgatgttgttgctagatcacatggtaattctattcttaattttgtgaggagcctttatactgttttgcacaatggctctactaatttacattcccatcaacagcatacaaaagttccctgttctccaccttctccccaatgctttcatattttgggccattctgtatggtttactgtaccgtatgacagtaatgctgtgcagtatgtgctatagccatttttgcatctactggtaccagttctgaaatagcagcggcgccctttctgtttagagtcgccttctggtggtaggaattctggttgctaccatgtgtagcctgcaagcctctagcagctcttttgcagcgacgccgagcgccgggcgcggtggcgcgtgcctgtagtcccagctactcgggaggctgaggctggaggatcccttgagttcaggagttctgggctgtagtgcgctatgccgatcgggtgtccgcactgagttcggcatcaatatggtgacctcccgggagcgggggaccaccaggttgcctaaggaggggtgaaccggcccaggtcggaaacggagcaggtcaaaactcccgtgctgatcagtagtgggattgcgcctgtgaatagccactgcactccagcctgggcaacatagtgagaccctgcctcttttgagttctcaccttataaagtagcctttcttcccatgcatctatcctaagacaaaagaaatgcagaatttacattcttacaggactattttcctcactacactgtgaatcccccctcccaccccacccccattgggaatcttcttgtttttatttttatcttatttcaccattatctagctaaacacttgcacattcatgctgccaagtgtttatggagcaccgattgtacaccaggtactgcggtgagtctcaggggtaccaagaccgaggttcgatgagaatcctgtaatcaattgcagaatgctccttccgagagcaggacccatcaaaataggaactccgttttgagagttcgcctcgatcgttgaggataatcttagaaggaccgaagcagttccgtttcgttacatttcaaaatcttatgtcaaagtaagcgcgcagaaaggggtccttgctcttctacactgagccctacggcccccctgtggggaaatactcctgataatcatctcgaaaattgtttcgaccagcaggggtcactatgaaggctgacttgagcccaagacacaatggggcacggtaaccagactggtccgtaagggttccaggaaggaatgcagtttcaagagaacagtttgaatctttattcgaatttgaattttggtacaatgaagagagtcagctgcaacttgacaatcgaaatcttcagaaaagcgacacaaatacgttcgcctcgaggaatattgggtcttctgcgcggccgtagagctccgccaagtgcgcctgcgcggaggagaagtggcgtcgagtccggccgggcagtagaggaacttgcggtagtgaccctcgggcctcgccatgaagagccgctttagcaccattgacctccgcgccgtactcgcggagctgaatgctaggtacagtaccctaagtgacgaggctcgtgtggggagtgcaggaggcagaggccggagtcccatggcgcaaacagaccagcttgatatgtttccttatttcctagtgcgtctatggacctgcctaggcctgagtgggcaggcgtgtggtgtctttcccgtgacccttaggatacccctgggggtcccaggcacctcgtgccccatcccccgcgtcctcccagctctctggcttgccccgctagcgcgaagctcttgcattgttggcctgggttgtccgggttgggcaggaaacgtttgttaaaacacgagacgccagagtggtcgtttgcttcagaggtttccagactgggggcttggtttcttgaacacctccctcccctcaccccagagagagagagagcatcgcggttttagctggattgagcagatttggactgagatctggattctagtctggattctattattcagccctgtgagctttgtcatattttcggggccctcttttatcttttttttttctcccttgtaataaattaattggattatattttactgtatttctcccccaaaattgggtcatttggaagacgcaagctatagtgtgttgttcctagagctgatagaccacttctgtttttaaatcgttactcttaagttttgaactgaatctccaaatggctttcagactctgctcctcggctgactccatatccttagagactgagatccgctctttcgaagcttttattaaattatgtgtagttttatgtttcagacaatagtgtaacatgttacatgtttcctttatctttgcagcttgctaggaatgagagtaaacaatgtttatgatgtggataataagacataccttattcgtcttcaaaagtaagaacattttataggcttattttctctttgacaattaagtatgagattact

SEQ ID NO: 1397 - DNA, 6000 bp, Homo sapiens
cactgtgttcccagagatggttctccagtgggagaacctaatggtaaggaacaaattgacttcacttctgtcattgcctgcctctcaaaaccagtctttgcaagtcttggagcctgaggtctgggtttttcttgcaagagttaagaaataaactttagatgtgtcaaaaaaaaaaaaaaaagccaaaccgaacaaacaaaaacaaagcattgatttcaattcttccttcagagctatgtcatataagggctgctgctgacacacacagcctgtctgggctgtggaccagtttattatttcataataaacattggccattgattcccagagaacctcattttcaaaagagggaattggtcctcttaaagctggccccagataatgaagacgcattgcctaacactccaatagtaaaagagctggaatatcttggtaagatatttatgcaacagtcctttgctgtggtcttccagaggttgaggtgtcctgcaatagttgaggatagtacttgcaaggaagaacgttggtgttggtagagaacggtttctttgagctgtggtttgttgaagaatttggggagttaatggagatctctgtagacgagagcatccatctcggtagacgagagcatccatccctgtagataagagcatcttgtccgagtcttgcagttgcagctgctccagtagatggcgcctctaactcttttcctgtcagcttcttacaagcttctctttccgtttctaattgaagtatttctttttctttcccttgacttttttttttttttttttttttttgagacggagtctcgctgtgtcgcccaggctggagtgcagtggaccgatcacgcctcaccgcagcctcaacctccggggctcaagcgatcctcccacctcagcctcgcaggactacgggcgctagcgaccacaccagcctctttctttctttctttcttttttctttcttgtctttctttctttcttattttctttttctttctctttctttctgtctttctttttctctctctttccttctttcttgagacagattctccctatgttgcttgggctggtctcgaactccgggactcaagcaatcctcccacctcagccttccagagtgctggaattacaggtgtgagccactgtactcagcctaaaaaagtgagttttcaactcacaatttttttcttttttttcctctatattctgccagtacatttcattttcataacttatacagctgaagattttcctttgaaaaaataatcttcccagcccatgcagcacgccgtcccatccagcatggccaacatggtgatgttgcgggacaatcaaaagatgggagagaccgaacagagtgagttcaggaaaggtctttattaaaaggtggtcacttggcccagtaggactagcctccaggaaagtctgagccccagacaaagaaagtagccacgttttacgcagtcagtggccgggagcaacgtgatgcaggaagggtacttacagaagcgagaacaaagacagttgatcagtcttttacatttatctatactacacgttccacatccctgggaaaccatgtttctgtaccaaccttataactttgcagctgccctagggaggggaagcaggaactcgctgagcctcaaggaatgtgaaactagcaagtacagataaggctcgccgagcacagaaggaaaagcaggcagttagtattcttctctaacttggccgggggtcttctctaacttggctgggggcggggcgggggggaggtggctacactacacttagcttttgaaggaaaaagtaaaaattttcggttgtctttgattatacttgtaaaattcatgaattccttcttcagtgaaacccagtctctcttaaaaatacaaaaattaacagggcgtggtggcacacacctgtaatcccagctacttggaaggctgaggcaggagaactgcttgaacctgggaggtgaaggttgcggtgagcggagatagtgccactgcactccagcctgggcgacagagcgagaccctgtctcaaaaaaaaaaaaaaaaaagtctacccatgctctgcacagacgttgatagacctatagttatcactgcaagaagctggcaaacctcaggaaaatgatgcagccctggcgtctctagagaagttgcagcactaatgggcaatgtaaataaaaatgtatttacaaatgcattcccagcacttccctggcaagtgctgggaaaagcctagcaggccacagaagcgtctaggagggttacaaaggtccagaagcaagagagagcgcacgggctagttgaaatggaagagggagctgcaggttgcagggcttgttgatgggggtgacctctaagctcagatccgaaggagaagcaggagccgcccaggcagtgacatgatgggaaagaagagggtggggtcaggggtatgttgcagggagaggagcagggacggtatctacaaacgtgttgtggaaagagaaaaaatcctagttcaaggaaaggtagatctgtgtctccagggagatttagaaaggtctctctcaggggctcttaaccttttttttgtgacacagacccttttggcagtctggggaagtctaaggatctcatctcagaattttttttaaattttgattaaatttttaaatttttttgtagagacaggggcctcactatgttgcccagactgtctttgaactcccggactcaagggctgctcctgagatttcaggcatgagccaccatgcctggccagaatgttgtttttaaatgtataaaattaaatatgttagaatacaaaggcaaccaattttgttggaatagttgccaaaatattctcaaagtttgtgatgtaataatataataatgcatgcacttttttttttttttttgaaatggagtcttgctctgtcgcccaggctggaatgcagtggcatgattttggctcactgcaaccttcacctcccgggttcaagcagttctcctgcctcggcctccccggtagctgggactacaggcacgtgccaccacgcccgggtaatttttgtatttttagtacagatggggtttcaccatgttggccaggctggtcttgaactcctgacctcaaatgatccacccacctcagccttccaaagagctgggattacaggtgtgagccaccgcgcccagcttaatgcatgcacttctttatgaatgcataacattacaagacataatagcaggtctaaaaattaccacaattttgaagtagcaatgagcgtaaagcaataacagtaatctgatataaaaatatctgtgatttctattggtgacaaaataatggataaggttaatattactgtagttagttgcttaccgttattgaaggatgtgctttcaattagggagtgtggaaataaggatgaaatctttttctgaaccaaataacccactgaattctatccatggaccccttggaaatgcgtggaacccagcagaaacccttcctagcagcagggtagagaatgcattggagagcaaggctaaggaagggtgactcaatgtcctgagcccaaggaggtatcaacattcccaacggatttggatctgtaacagaaagaagccactggagccagcagagaatggggccactgctttccatactcagtgcccaaaccttgctgaagcacctgccagaggccgtgttgtggagcatggtgcaatgcagacagccttgtggaggagacaatctgtaaaccatgactgcaaaagattgataaatactgattattaatctacagcacagtgtaggattgataaatactaattattaatctacagcacagattagaagggtgattaagccagcgtctagtagatttgggttacactctcctttcttcaatttagaagctgtataacctcgggcaagctaatctttcagtctcctcatctgtaaaatggagtaataaaaatatttgtcatgatcaagggttatagtgatgtaattcatgtaaaacatgtggtgcctgtagataataaataccggataaagtgtctcatggtagcttttgaagtgaaacctggtatctcataatcaggacaggtgttaaaaaccccagagtaacagtctacaataattgaaactcctcagttaggagctgtgttaaagttggaacagagcagcattggaacatatgggatggtaataattgtggaattctattcactgttgttaactccatataaaaagaaattaaatccagcatgatttctgattcctggaaagtctctttccctcccttttctttatctgtgatgtcagaacgttccaaatactgtatttcaacatttcaggcctgaaactgatggtgccagattaattgagtaataaataataagtattcaagtttttccgctctgcaaatttactttggttattaaaaaatttattctgctctgcaaatttactttggttattaaaaaatttattctgctctgcaaatttactttggttacaagcaaaagtaagccaccacatcgacgaggatgggattcgaacccacgcgtgcagagcacaatggattagcagtccatcgccttaaccactcggccacctcgtcccggtaagttactgtttcctgattgctatagggagtaatatcaaggggctgtgacgcaatgttatggaagccgccattttgtacggaagccaaagtccaatcacttccatagcaagcaatcgaaagaagatggccgctcccacgattgtgggggaggtctccactggggaggggcagaggaaattcggtcgaaaaagagataaagctgaaggaaataaaattggcacggagtctgggaaagtagtttccctaaaggagtcttagaaatagggttggtctggaacctaaggggcggagccgacgcgtagagccgctttgcgcgtgcgcatcacctaggcggttagatttgaatacttcactgaggcgagccgggcgttgtgagcggactgctagaggcggctgtctgtttccgctctaaggaaactcagagcgtgtggaccccaaacaagtctgcgcaaaatttgtcgaggaggtttgccgcggcaggtaaagagaatgactctttcgttctgggcttcagggaaggcttcgggttttgtctgggcgccctgaagttcctgcggtgggaggtagggtacgctccctcagcctggcggcctccgttagcgccgggccgagtagacgcccctgccccgggccgggcacactgtgccctttttcccctcctcggcctgtacgttgtgccgcctcccgcttccctaacacttctccgcctgcacctcggcccctccggccacccggctcgggttgcttgtccgtcgctctcttggcgtcctcttccgccccgccctgccgtcctctgtcagggctcgcggactcttcttgcacccctgccgctcttccctagggacctctcggctgtttgtatttctcacttaagctttttttggctctaaatgaagtgacagcaatgagtgattttaaaattctcagctcttcgtggtttaaggtgtctgctcggagtgctggccgcacgtaacagatttttcgttttctgcaagtataataaccttaacaaatgaagtcaatattagtactgcgcaaattagtttttaaaaatcctcttctgttcattattcctcaggatttaagcccttattcttcacgtttatttaaatactcaagtttgagggaggaaaaagtattgccgattggaattttacagataggtttaataggcattaacagataaaggatgtggatgaagaccaaagcagaagcttattccagtctagatattaaaattgatgttttcacttccgtcgaatcctgtagatatttattgggttccttatcctgtgatagggccggggacagatgattcccaaacctagaggggtttacaaagggaaataactaatatac

SEQ ID NO: 1398 - DNA, 6000 bp, Homo sapiens
cacacccggccataatttcttttcttaagctagttttaagttaggtttttttgattagcaatagaagaaatcttgcctacatatctgtgtatttcttatttctatgagctgccatcttctctaacctagtcctaccaaatgtccaaaatattgaggaacaaactataaaataatccacttttctacccaattccagcatgtcaaactttttatgggtcaaaatatactgaagacaatgtacgtgaaattgtgttgtgggcttaagaaagggggtcagaaggattatgttaagagaaatacaagacataatttttgcctttatttatttatttttgagacagagtctcgctttgtcaccaggctggagtgcagtggtgcggtctcggctcactgcaacctccacctcctgggttcaagtgattctcctgcttcagcctcctgagtagctgggaccacaggtgcatgcccccatgcctagctaatttttgtatttttagtaaatatggggtttcactatgttggccaggatggtctcaatctcttgacctcatgatccgcccacctcggcctcccaaagtgctgggattacaggcgtgagccactgcgcccagccgatttttgcctttaaagatgacttcatccaaacacaaaattcctacacctgctaccctataacagatgcttatccccaaactaaatctatataattatttaattaatgtatttattcttgacacagggtctcactccatcacccaggctggagtgcactggtgcgatcacagctcaccaaacctccacctcccagactcaaatgatcctcccacctcatcctcctgagtagctgggacacctggcctcccaattaaaccttaaaacattatatgttggccgggtgcggcggttcacgcctgtaatcccagcactttgtgaggccgaggtgggtggatcacgaggtcaggagtttgagaccagcctggctagcatggtgagacccccatctctactaaaaaaaaacaaaacaaaaaaatacaaaaaattagccgggcatggtggcatgcgcctgtaatcccagctacttgggaggctgaggcaggaaaactgcttgaacccaggaggcggaggttgcagtgaggtgagatcacgccactgcattccagcctgggtgagagtgagactccatctcccctcaaaaaaaaaaaaagaaaagaaaagaaagaaaaaaaaaacccatgatttgtctatgattggccgggcatggtggttcatgccttaatcccagcactttgggaggcccaggcagcaggattacctgaactcaggagttcagaatcagcctgggcaacatggcaaaaccctgtctgtacaaaaaatacaaaaattagctgcacgtggggcgggcacctgtagtcctagctacttccgggatcgaggccggaggatcacttgagctggggaggtcaagactgcagtgagctgagatccgaaatcgagccactgcactccagcctgggtgacagggcaagaccccatcttttaaaaaacaaaataaaacaaacaaaaaaaccacaagaaacattatttatctatgattacactgcctttacagttacatcatatttatgtctatacttgataacatattctaaaagacaggaatggactttttaaaaataattttttagcagctttagatctacagaaaaattgtgaaaatagtagagttcccatatatcccacaccgtttcccctgcattagtatggtgcatttgtcacaattaatgaatcagtactgatatattattattaactaacatccatactttattcagatttccttagtttttacctaatgtccttttcgtgttccaggatcccatccaggatacatttaatcatcatgtctccttaagcttctcttggccatgaaagattttccaattttccttgtttttgatgaccttgacaagtttgaggaatactggtcaagtattttttagaatgtccttccactgagatttgtcagatgtttttctcatgagtagactagggttatgagtctttgtgaagaagaccacacagagtgctacaatcatcatattgtatcaccaatacatactatcaacaggacatcactgttgatgttaactttgattacctggtttaaggaattgacttttaccttaatttgtttaatgtctaactcagaactacatatgggagggcacttaaacactgtcttaatatctggtttgtattcagtaggaggaacagcttgatgagacaaccatcaaaatggaaaaggccgggcgcggtggctcacgtctgtaatcccagcactttgggaggccgaggcgggcggatcacgaggtcaggagatcgagcccatcctggctaacacggtgaaaccccgtctttactaaaaatacaaaaaattagccgggcgtggtagcgggcgcctgtagtcccagctactcgggaggctgaggcaggagaatggcgtgaacccgggaggcggagcttgcagtgagccgagatcgcgccactgcactccagcctgggcgacagagcgagactccgtctcaaaaaaaaaaaaaaaaaaaaaaaaaaaaaaggaaaaaaaaatcctctggggaagagtggaaagaggattggtcatctcggccatttactacataaatgactttcggcaagttacctctgcacctgtaaaatggaataatggtacccaatagttctattaaacatctgttgaggaaatgtatgtgtatgtgttttgtacaatatttatacttttagatttgcctatgtaaaaatgaaaacactcgtgggaacagtaaatcttaagtagttaacataactttatagaataatttttttttctcttcagacggagtctcactctgttgcccaaggtggggtgcaatggcacgatctcggctcactgcaacctctgcctcaccgattcaagtgattctcctgcctcagcctcccgagtagctgaggctacaggggtgagccaccgcgcccggcctagaataattttcgattgctggttgagcagagcaaggccaatatgagttgaggaaagcagagatggaaaggctctttatagttaatgatttctcatttttgctttgcttccttttgccaaagtcggcttgtcatctgagagtggagaggatttgttagatcttatgaagccagagctcacttctgatgtgaaccaagtattaataattttggtggtggttttctgtactgcatctgagagagtaatcattgttctttgaagatgcaataattctacgctactacgggacttagggaaataatttttgaggataggaagcacagaataattaagatgacaagtcttcctgcctcaaaatcatatcactctgattcgaataaaaaataccaaggtttttccttcttgaggttttatactcatggaagttcttcaacctgaggtctgaaaaataaggcaaccccatcctctccttaaacaggttagagccagtacctttttatttctctatgcacggacaaaataattatgcaaaaaaaaaaaagaggcaggttttgtttttttttttgcactactgaaattcacacttaacatataaacaatctgctatatgcagacagcactggtgtttagagttcaatgatctggattcaagcctatttaaaaccagataagagaaagttcccaaacatctatgtgtcttggattcttcatctgtaaaattgcgttgttgagaagataatatgagactaggcgcgcaaaacaatttgttagagctattatttctaacccggaatgtgttcgctggcagtaacagtgcattagttacgattcatcgagggcagcttctggactttctgtttggaagcccagctgaggcaaaagcagcagtgcgtttaaaaattggagctcgccacattctgaaattctttcggttcgtgaaagcagtaacctaggaaacgagactggcaccacccctttcagtcctaaagcttggtttctcccgcttttctccattatgtttagggcatcgctattttacagtctttttgttttttctttccacatcattagcacaaaagagaaattccccttctacagaagcaagtacaaaacctttctagtcgctcctttttggcagcagctcacctactatttttttctattccgcggtcgcagccccagacgtcctcaaagacaaatattttcgcgagggccagtgtagggcaggaactccctaggccttgaatcaagggaatccagtagataacaacagaaaggactccgacccaggtacctgagacatctgagaccgccaaaattaacacaacaccctacgcgacagagaaaactctgggcggggagagagaaagagagcgagcgagcgagagagagagagagcgagagagagagagagagagagagagagagagagagagagagagagaaagagagcgagcgagagagagcgagagagcgagagagcgagagagcgagagagcgagagagagagagagagagagagagagagagagagagagagagagagagagagagagacgagaggaagcaacgttctcgcgacaagaggggtgtcgacggaaactcggaaatggtcccctagacgacccggccccagctagtgggtggggccagggtacatccgcccctttccggtttttttccccgcctcccaaccgtgaggtgttgggtttgggggacgctggcagctgggttctcccggttcccttgggcaggtgcagggtcgggttcaaagcctccggaacgcgttttggcctgatttgaggaggggggcggggagggacctgcggcttgcggccccgcccccttctccggctcgcagccgaccggtaagcccgcctcctccctcggccggccctggggccgtgtccgccgggcaactccagccgaggcctgggcttctgcctgcaggtgtctgcggcgaggcccctagggtacagcccgatttggccccatggtgggtttcggggccaaccggcgggctggccgcctgccctctctcgtgctggtggtgctgctggtggtgatcgtcgtcctcgccttcaactactggagcatctcctcccgccacgtcctgcttcaggaggaggtggccgagctgcagggccaggtccagcgcaccgaagtggcccgcgggcggctggaaaagcgcaattcggacctcttgctgttggtggacacgcacaagaaacagatcgaccagaaggaggccgactacggccgcctcagcagccggctgcaggccagagagggcctcgggaagagatgcgaggatgacaaggtaaggacgacccttttctcttcaaaccccatggtttcttttctccccggggtctggggcgggatgttaatccgctagctgttgtcttatgccttccagtatttcagtcctgaaggctcctttcacccccaacaaccctgtttctgtcagacttttcccagtttatcagtgccacgttctctggtccctgccagaaaaaaatgactgtaaattctggttctcaagagtggactgtgtgcagatgctgcctattctctaagctcagctggtgagttggcagtagtaatcatctggcctgtgtggcccccttaccttcaaagacacacaaatctggcgactgccaggtttggtgtggttattgtctcatttttattccgtgcacactgatcaatattaatttcgttatttaaagaacgaagccgcctctgactcctctacttatggtagtcatcatatattttttaagctgtgtgacttttaaaatctctatagggtgatgtattgaataactaaataatcagctatgactgcctttttgtgatcaaaatgttatgatagatgggccctcgagctatatgtgagacacacttgtgtcttggacatagttgatccatcattatctactcaatttgaattgttaatgaaa

SEQ ID NO: 1399 - DNA, 6000 bp, Homo sapiens
gggggcaaattcttttattaattcattttaagttaatatgtattatgaagattcttttagcaatagaggaaattgtctgaagattactaattattaaggacatgattcatttttttttgtgtgtgtgatggagtctcgctctgtcgcccagctagagtgcagtggcgtgatctcggctcactgccagccccgcctcctgggttcacgccattctcctgcctcagcctcccgagtagctcggactacaggcgcctgccaccacgcccggctaattttttgtatttttagtagagacagggtttcaccatgttagccaggatggtctcgatctcttgaccttgtgatccgcccacctcggccttccaaagtgctgagattacaggcatgagccaccgcgcacagccaattcatttttttataccttgtaatcttacctaaccaggcatgatttttatgaactcttgtgatttaaaggaaaaaaagatttaatagtgaaaagtatttgttttgctctttggtagcatctcaactaaaggactagaagttaaggatatcaggttttcattcttagctttttcacaattttatagtaggatatagagggtgtcatttctttctccatttcattttttgaatctacaaagtggaatacctgctgcctatctgcagtctactttgaagaggtgtttaaggatggattggtggacgaaggcaggcctgagtgagctaccatagtagaggcattgagggcaaccaaaaggtattattgagacactggagggtcaaaagaacataatggaacacaaaaggaaggggaagagaggtttgctgttgcaattgtgtcattataagcgtagtatataaataatgggataagtttgctctcttctattctctttttttttttgagatggcgtctcactctgtcacccaggctggagtgcagtggcgtgatctcagctcactgcaagttccgcctcccaggttcacacattctcctgcctcagccttccgagtagctgggactacaggcacctgccaccacgcccagctaattttttgtatttttagtagagacggggtttcaccatgttagccaggatggtctcgatctcccgacctcgtgatctgcccgcctcagcctcccaaagtgctgggattacaggcgtgaggcaccacgcccggccgctctcttctattctcttaaggaatacagatgagagctttccctttttttccaagccagtgtaattctctttctgttcttctatactaggctatttttatgttattaattaactaatgcttctccaattcttccttgccattatcctaccctaaatggaacaaggcatggcaggaattgaggtgcccagagaacttctcctttctgggtagcacatcagcccttaccctctagatcagctacctaattctactccccacccttcatttcctgtactttaactactatggcaagttggttctgtgcaatttgagttttcatagagacaaatccaatgttagctatatgaaataagcataaattgtattcagggatttatctttttgttttattaattttaaaattaattaaccagccacatgtctatcatagaaatgactctggaaaagaagtcagcaaactatagcccgcaggctgaattcagcttgctgcctgctttcgtactgtttagaggccaaaagtggttttcacattttcaaatggttgaaaaaaatcaagaaaaaattatcttagtacttgggaaaattataagaaatttatattttggtgttcatacataaaattttattgagacacagccatgcttatttgtttactgcgttcatgctgtaagggcagagaaactctcatagcccagagaagactaaggagactaaggacttaaatgcagtgtagtagctgggggcggtggctcacacctgtaatcccaccattttgggaggccaaggtgggtggatcatgaggtcaggagttcgagaccaacctggccaacatggtgaaaccccatctctactaaaaatacaaaaagttatccgggcatggtggctggcacctgtaatcccggctactcaggaggctgaggcaggagaatcctttgaactggggatatgggggttgcagtgagccagtactgcaccactgcactccagcctgacagcagaacgagactacatctcaaaaattaaaaaattaaaaaattaaaataaatgcagtgtagtatcctgaattggatcctgaaacagaaaaaggacttagtggaaaaactggtgaaatctaagtaagtctggagtttaggtagtaataatatactgattttcttttttagttttgcaaatgtatcatggtaattatggatggtaggttaacaggattttaacattagggaaaactgagtaaggggtgattacttttctgtaaatctagaattatttcagaataagaagtttattttaaaaacaatcaggaggcccactaaccaaatcacaaacattacatctagaaaagcatcttattttattaatattaatattgtccattcatagaaaggtactgtcaatagtacattaaagatacaacatctttgttaactattttcaatggaaaagtatttttgaacagtagcttgttgacttttaattttgttcaatatttttcttatccatatctggaaaagagtgaagagtactatagcaatagccttatgagatagcattatagtgaagatgcacagacatgcaagctggctgctcaggttgtacctcatggattttctcacccttggtgtttatattgacatgttcaaaaatttcagtttatcatttcattcatcaatgattaaactatcagaattgattatagcttaccaacttacaggaaatgtgggatttggagtcagaaagactgtggttagaattccttcttcacaattctctagttttgtgactttggacaaactgcttttttttttttttttttttctgagacagagtcttgctttgtcacccaggctggagtacagtggcccgatctcggctcactgcaacctctgcctcccgggttcaagcgattctcctgcctcagccttctgagtagctgggattacaagcatgcgccaccatgcccgactaatttttgtatttttagtagagacggggtttcgccatgttggtccggctgattttgaactcctgacttcatgatccacccgcctctgcctcccaaagtggtgggattacaggcatgaaccaccgtgcctggcccaaactacttaactttttctatttaatggagtgttgcactgttgcccaggctggagtgcagtggtgccatcttggctcactgcaagctccgcctcccgggtttacgccattctcctgcctcaggctcccaagtaactaggactacaggcacccgccaccacacccggctaattttttgtattttttagtagagtcggggttttactgtgttagccaggatggtctctatctcctgacctcgtgatccgcccacctcggcctcccgaagtgctgggattacaggcatgagccgccgtgcctggcccaaactgcttaagtttttaatacctcagttttgtttttctcaaaactattaattttatttctactagaggacagctatgaaggcaatttggaaactatgagacacgatgcaaatatttattgttgattttacttgccaggacactggaatacctacacctaattgtcagagtactctttctcctttattgtgacacactcttaagatttggctgttgtggccgggtacggtggctcacgcctgtaatcccagcactttgggaggccgaggttggcagatgacgaggtcaggagatcgagaccatcctggctaacacagtgaaaccccgtctctactaaaaatacaaaaaattagccgggtgtggtggtgggcacctgtagtcccagttactcgggaggctaaggcaggagaatggcatgaacctgggaggcggagcttggagtgagccgagatcgcgccactgcactccagcctgggcgacaaagcaagactccgtctcagaaataaataataataaaaaaaaatatttggctcttgtttttctagattccatatagatttttcgtactatttttataacattactaagaattatatttcatactgcattagagtttacaaagcatttatagatgcattaaatgttgactagaggaacctgtatatggcatcccaagcttgtgtacttgaatccttgctgctcccaattttccatggaggcaaacttaatactggtccaccaagagaattgagttaggcctaaccatgtacctgaagattcacatttccaagaagatgctaggttaggaacaggttagaggaagcactgacctgtttattgtcctgccactacttgctgtgtttcggtggccagcacacttaggaagaagattgcctgtttttcacccttgctcttgaagaggcacctgtgtaccagtctcctccttactgccatcctgcttggttctaacatatgcttacagagaacccaccctgcccatagcacccaggaagatgcccaattttaggccattagggtaacctagagtattcagcaggctgtcttgcagaatcacacacctcagcatagccaagcagagtcacctctgcctaccaaatcattcatttactgtagctagagattttcaaaagtgttattctttgactttttatcaggtataaaaatcacacagaaaataatgtatcctgcatctccaattgttcattatttgaacccatggtatatgttttacaagatgaactgtttcagaacatttaattaatagttgtgtcggtggtttaacaatttgaactgaaaaatattattaccaaattttgtctaacagcaagagacccaaaagattcaatcaaatgatggaaaggaattggatataaacaatcaagtagtacctaaaaatattccaaaagtagctgagaatgttgcagataagaatgaagaaccctcaagcaatcatattccacatgggaaaggtattattgttattattcttttgttttgtattaataggatattgactttttcttcccattttgaagtggatattttcaatcataaagaaaattgtttgattttagttcacacatgattaagtgtctgcattgtttcaaatttggattgtttgatagaagagaaaaaagagtaagttattttagagttacagctatgtccaaagcaagaggtaaagatgttcagttgatgtagcctattacttttagaaactgattgttacattccttcaaaacattttcaaattatgtaagaaaaacgatagaattctatctttttgttacttgggcagaacaaatcaaaagaggtggtgatgcagggatgcctggaatagaagagaatgacctagcaaaagttgatgatcttccccctggtaagtaaaaattgttagagaattcgactaaagtgatgataatacatttcatgtgaccccattctctttttcggtaacacttggaaaagtcacagatatctggatgatcgatatttctacttaattaagtacccattaattgccaggactttttttggatccaacttttataaaattttttgctaagatgtataaaatacttgtttttgccttgataagaatcacctatatttgaatcttttctttgcgactctgagtttttgcttatgacagttgtactatatagagtcatttatgtttactaaaagtatgcatggctcttttctttcccaccaaatgtgcccagattcctgtgttgttggtgtgctttaatatggcatagtaataccctaataagagttatttaattatttagttttgagggcttggcttgtccttttagtgaattaccccacacttttggatagtttgtttaacattttttttcttcttttctggccacttctgttc

SEQ ID NO: 1400 - DNA, 6000 bp, Homo sapiens
actcatcttggtgtttcctttgacttatagtacagaattaaaatatacggcctagtttttcttgattgaaataccctcttgtgattaagaaatgttattctcttattttctactggtttttttttttgaacgtgtttctattttattttaccaacaatttaaaactatctttagggccgggtgcggtggctaatgcctgtaattctagcactttgggaggccaaggcgggcgaatcacaaggtcaaaagatcaagaccatcctggccaacatgatgaaaccccgtctctcctaaaaatgcaaaaatcagctgggtgtggtggtacgcgcctgtagtcccacctactcaggaggctgaggcaggagaatcgcttgaacccaggaggcagaagttgcagtgagctgagatcacgctactgcactccagcctggcgatagaacaagactccgtctcaaaaatataataaaataaaataaaaaataaagctatctttatttaccaaagattgccaaattcatatgaacttgaaaagcatgcaggctagttatttaatttataagtgttcatttatttataggtcagtgataccatgtagacaatatacaaacatacatgtatacctgtacacataatacagacagacaaaagtaaagactttataactttattttaaaattttagccatgaggccaggtgtggtggctcatgactgtaatcccagcactttgggaggccgaggtgggcagatcatttgaagtcaggagttcgagaccagcctggccaacatggcgaaaccccgtctctactaaaaatgcaaaaaaaattacatgggtgttgtggtaaacccctgtaatcccagctactggagaggctgaggcagaagaatcacttgaacccaggaaatggaggttgtggtgagccgagattgcaacactgcactccagcctgggcaacagagtgagactccatcaaaaaaaaaaatttttttttaataaaacataaaattttagccacgagaaatggctacatttgctttctcatttaacatttgctttctcataccttcccaataaaactcactagtttaaaaggatagttgtattcaaactatgcctttgtaaatggaaaaggttaaagtttatctattccacatgaccaaagcccttactcatttttttctctactagtttctgaagtttgtagtctgatatttgagatgtcttacagaatgtctagcattctgtttgaagttttattgtgttgtttagcgtgaattgaaaagcgcgttaaatgcctaattaggtgatgtggagcatatgaagttagaccatgtggtatatgaattaaagtaaaatgtatgaaaaattacttcatatacatgccatacatgcttattacatatttaatagactttagctcacttagcccagaaaaggaatttaaatatggaaaataatctgttacaatttttcaaacttgatacaactcaaagactttcaatagctagtgggtgtgttgtttctttgtgttctcatgtttaaactattgggatgaagctatattgttgctgataatcaaatcattttcagctggccaccagagtgaaaataatattcaagcgcacaattgaattttgcaacaatataaggaaatctaggatccaaagtaaatataattactttattactcccctagctgggcacagatttaacagttttgttacggagcagcagaactgtattaaaggttgtaaaaagttgaaatgcctcagagatgaagtctactatttaattcctgttaatacacatcataggccaggtgtggtggctcacccctggaatcccagcactttgggaggccgaggcaggccgatcacgaggtcaggagatcaagatcatcctggctaacacggtgaaaccccatctctactaaaaatacaaaaaattagccgggcttggtggtgggcgcctgtagtcccagctactcaggaggctgaggcaggagaatggcatgaacctgggaggcggagcttgcagtgagctgagatcgcaccactgcactccagcctgggtgacagagcgagactccgtctcaaaaaaaaaaaaaaaaaaaaaaaacaaaaccacacacacacacacacacacacatcatagatttataccatcaaatgataactttgccctcattacttcttttttctcttcttaaatattgtcattccccaagatcacttctttgacttatagctgttttctgtaaatatttatttcctaaaattatattctgatagtttaaccaatcaccttgaaatttatgagttttaaatctacatgtttagccctcactttgcacctacattctagatccatatagctatgtgtctataaaacattttcatctggatgtcatactgtagttccaaattcagtttatctaaagcaacatttgctttctcataccttcccaatttgggatataggtagcattaattatagtttccaggctaggatttggaatcatcctttgactctttctgctccattatgacatatattcattttgtcattttcaaatgtatctgattcatcagtttctaacatttcctctgtcttcctagtgtaagtcctcatagcttcttacctaaatagatactggagatactgtagggcataaggcagatcagatttcagttctcagggagcttaaaagaaatcttgactactggttattgcctcctacataatgttcaaactcactctatcaaaaggaagccaactgaagccatgttcagttgtctccatgttcagatgttactttctagagcagtgtgcaatagcacacgtactatcacttcctaatttgtttacttatctgttttccttactaagttataggagatgaagataggatgttatttttgctttctgtttttatttttgaggcagagtctcatcctgtcacccaggctggaatgcagtggtatgatcatagcttactgcagccttaaactcctaggctgaagcctcctgagtagctgagactacaggtgtgtgccaccatgcccaactgtagatttatgatttatttttgtatcacagtgcatagtgcaatacctatcacatacatcagtgaaccatggatggatgaaagcattgtagatacttccattatactttgtcattggatttaaacagtgaccacaagtgaatataggagattctatatactttgtcattggatttaaacaatgaacacaagtgaatataggagccttttttttttttttttttttttttgagacaagagtttcactcttgttgcccaggctggagtgcaaatagagcaatctcagctcactgcaacctccacctcccgggttcaagcgattctcctgccacagcctcccaagtagctgggattacagccacccaccaccacagccagctaattttttgtatttttaataaagatggggtttctccatgttggccaggctggtctcaaactccttacctctggtgatccacccacctcggcctcccaaaattctgggattacaggcgtgagccaccatgcctggccccgtaattatctgtaatttgcttgttcaaacttactctaactttctcatataaatccagtcaaattaatctctttactatcttctaaataccccatctttgttcttacctgttctttcagtgcttctttctttccctgtcatagtctaatataattgtcttctttttgaactttcccttttctcacattgacatgtggctcttaaatgttgaataatttagcagtcccttatattgatcagtattatgcatttttgtctgtaccgttatattcattcaatgtttaatgcaaagtttgtctgatctccttaacttgattggcaactctgtgtaagttggttctgtgtttttcaacttttgttgtctgtgaaatgttggaagcccagtattaaaggttagctataaatatttctccaaacgtgataattctgtatatataatagcacagatcactgtttaacaaagggcaattgtgtcattattcattcttgttgatatttttattatctgagtatctatgtaattatagtattaaaattttgacttaatttaggctagtcagatcatcaaacacctaaaaaaaggaaattttaaattgttctgttggaatattataacaggtacaagtgggacatttctttattccatgtctgacaatattagtaaatgatatatattttttagtaccttgtcttagcctaatgttttgagtcttctgtatttcataactctgatttaaaaatgaaggccgagcgtggtgtctcacgcctgtaatcccagcactttgggaggccgaggcgggcggatcacctgaggtcaggagttcaagaccagcctggccaacatggtgaaatcccgtctgtactaaaaacacaaaaattagccgggcatggtggtaggcgcctgtaatcccagctactcaggaggctgaagcaggagaattgcttgaacccaggaggtggaggttgcagtgagctgatatcaggccactgcactccagccactcagtctcaaaaagaaaaaaaaaaaaagaaaatatagatttctgtaaatctctttttactgcctatattgacatcatttattttattattcaaaaagaaagataataaagcccatcaaaatgcttgatttataattaggagacactgttttcttacaaatagcctacctattctcttgtatgtttcttttctctaactctatttcatcaacttttctatttatttatttatttatatattgtacatatccaagcttatactagaatagttttaagatgaattcatgctctttttcttggccccagttactccagttacttcagtctcctgttgtccccacaccctcccttcttttttttttctttgagacagagtttggcttttgttgcccaggctggagtgcaatggtgcaatctcagtgagccgcaacctccgcctcccgggttccagtgattctcctgcctcagcctcccaagtagctggattacaggcatgcgccaccatgcctgcctaattttgtatttttagtagacacagggtttctccatgttggtcaggctggtcttgaactcccaacctcaggccatctgcccgccttgccgcctttttttttttttttttttttttttttagtcttgctctgtcacccaggctggagtacagtggcgcaatctcagctccctgcaagctctgcctcctgggttcacaccattctcctgcctcagcctcccgagtagctgggactacaggcgcctgccaccacaccgggctaattttttgtatttttagtagagatggggtttcaccatgttagccaggatggtcttgatctcctgaccttctgatcgcccgccttggcctcccaaagtgctgggattacgggcgtgagccaccacgcctggccacacccgcccttctttaaaagcctctgtaagtgcaatttgttctttaacgatttttcctgatggactctttacccaacaattagaaatacattggcttgatgatgtgatgaaccatctgtagaattgaccagtacccccagaattctatttgtacttaacctttctttccaagcaaaggaagctgtttattttttttcctgagtgttccattgcaatgtaaattttatttatttatttatctatgtatttatcttcagagatagagtcttgctgttgcgtaggctggggtgcagtggcacaatcttagctcactataacctcaaactcctgacctcaaatgatcctcctgcattagcctcccaagtagatgagactacagacccctggctaattttttttttttttaagagacgaggtctcactctgtcacccaggctgaagtacagtggcaatatcctaactcactgtagccttggactcctgggcttaagcaatccttctacctcagcc

SEQ ID NO: 1401 - DNA, 6000 bp, Homo sapiens
gaaaccccgtctctactaaaaatacaaaaaaaattcagcccggagtggcggcgggagcctgtagtcccagctactggggagcctgaggcaggagaatggtgtgaacctaggaggcggagcttgcagtgagccgagatcgcctactgcactccagcctgggcaacagagcgagactacgtctcaaaacaaacaagcaaacaaacaaatcccaaaaaggacgggcacggtggctcatgcctgtaatcccagcactttgggaggctgaggcagctggatcacgaggtcaggagatcgagaccatcttggctaacaaggtgaaaccccatctctactctctactaaaaatacaaaaaattagccgggcgtgatggcgggcacccgtagtcccagctactcgggaggctgaggcaggagaatggcgtgaacccgggaggcagagcttgcagtgagccaagatcgcgccactgcactccagcttgagcgacagagcaagactccgtctcaaaaaaaaaaagcccaaaaagtggctgggcgcggtgggtcatgcctgtaatctagcactttgggaggccgaggcgggtggatcgcctgaggtcaggagttcgagaccagtctggccaacatggggaaaacctgtttctactaaaaatacaaaaaaattagctgggcgtgatggcgggcccctgtaatctcagcaactcgggaggctgcggcaggagaattgctggaacctgggaggcggaggttgcagtgagccgagatctcgccattgcactaacaggctcggctacaacagcaagaccctctctctcaaaaaaaaaaaaaaaaaaaaaaaaaaaaaaaaaatgctgggcgctgtgcctcacgcctgtaataccagcactttgggaggccgagccaggtgtatcacgaggtcaggagttcgagaccagcctaaccaacatggtaaaaccccgtctctactaaaaaaaaaaaaaatacaaaaattatccgggcatggtggcgcacgcctgtaatcccagctactcaagaggctgaggcaggagaatcgcttgaacccgggaggcggaggttgcaatgagccgaattcgtgccactgcactccagcctgggcaacagagcaagacttcgtctaaaaaaaaaaaaaaaaaatcccaaaaagtaaagacaccttttcctttcaataactttcctattaaatttctagaaaattatccactgctacatgatgattaagtcttatcttaatttaatcattatattaaagtcctaaaagatgtgtttatagccataaggtgaggttctataatgtggatcctaaggagagctttctggagaggtacccgtgattattttcccttttaaaaacaaagataggctgggcgcggtgtctcatgcctgtaatcccagcactttgggaggccgaggcgggcggattacgaggtcagaagttcgagaccatcctggctaacacggtgaaaccccgtctctactaaaaaaatacaaaaaaattagctgggcgtggtggcgggcgcctgtactcgggaggctgaggcaggagaatggcgcgaacctgggaggcggagcttgcagtgagctgagatcgcgccactgcgctccagcctgggcgacccagtgagactccgtctcaaaaatatatacataattttttttaagtaaagagttcattgataattgattagcatgtatataaagtaaaagtgtgaaatggatataatttcaggctttaacacatattaagacagatttgggattatcatacctagtggattatactatttaaagatagatcatttgttaagaatatggggtaggctgggtgcagtggtcacagctgtaattccagcacttcgggaggctaaggtgggcagatcgcttgaacccaggagttaaaggccagcctgggcaacatggtgaaaccctgtctctacaaaaaaaaaaaaaaggaaaaattagctgggcatgtggtgtgtgcctgtagtcctagctactcagaaagttgaagtgggaggatcccttgagccctgggaagttgaggctgcagtgagccgagattgtgccactgtactccaacctgagtgatgggactgagaccctgtatcaaaaaaaaaaaaaaaaaaaaggtgcaaaatggttacctgaaattctagaaatgaaaatttctgtaagtttaacaggaaagttgttgaaaaagaaagttggtttgtttgacttttttttttttttttttttttttttgagatagggtttaactctgttacccaggctggagtgcagtggtgtgatctctgcttactgcaacctccacctcccaggctcaagcaatcctcctacctcagcctcctgagtagctgggactacaggtacacacaaccatgcctggctaaattttgtatttttagtagagactgggtttcagcatgttgcccaggctggtctcaaactcctgagctcaagtgatctgcctgcctctgcctcccaaagtgctgggattgcaagcttggacaaccatgcctggcctgttttgcatttttgaaagaagaaagttttagagtgttaaaacctctcatacctaaagtaatagtttttagaaaactatagtatacatatgaatttagattccaatgtatgactttctttaaattatattaacaaaaattaagctattgggtaatagtatgtgacccagaatgtaagaaaagtgattttttaagtctgcagagaagccaaaagatatcataaaaatccatgtactctacgccaggcgcggtggcttatgcctgtaatcccagtactttgggtggctgaggcaggtagatcacaaggccaggagtttgagaccggcctggccaacatggtgaaactaaaaatacaaaaattagctgggtgcggtggcaagcgcctttagtcccagccactcaggaggctgaggcaggagattcccttgaacccaggagacagaggttgcattgagctgagatcatgcaactgcactccagcctgggcgacagaatgagactgcatctcaaaaaaaaaaaaaaaaaaaatccatgtactccaaagggactctccaaggctctcatcaaaatacttttcattcttgttctaatataattttaatactcttggctgaggccggtggatcacttgagcccaggagttccagactagcctgggcaaatggcaaaaccctgtctttacaaaaaatacaaaatgtagcctggtgtggtggcgtgcacctgtggtcccagctacctgggaggttgaggtgggaggattacttgaggccgggaggttgagactgcaagtgagccatgataataccactacacttgagcctggccaacagagcaagattctgtctcagaaaaacaaacaaacaaacaaacaaaaaaacctcttcagcagtctcatttcaaaacctgtaatttgcagcaaaattagaaaagaaggattgctattggcaggtaaattgacaagaaggcaaagtgatcacaactcatagccaagaaagagccagaaaaatctgtaatagccaaataaatcaaactccatagcactatttggagtaatttaatacagccactcaaagaggctttgaggattttagtaacagtaatcttttttttctgtttagttaagaaaaggttaaactttggttgttataccccatttaggaagccaagaggaagctacttttgcagagacgtaaagaaattcactaaaatgttaaatgttgggattatgagtgacttttatttttctgtcttttataattttaaaaatactaatattggatacttttataatttagaaaaaaaaattgatgtttaaaagcctgaaaatgtgtacagaaatgtttctaccaaagctttaatttaaaggactaaatatcatctatatagaaataatatatttaggctgggcactgtggctcacgcctgtaatcccagcactttaggaggccgaggtgggcagatcacctgaggtgaagagtttgagaccagcctggccaacatggtaaaaccccgtctctactaaaaatacagaaattagccaggcatggtgacaggtgcctgtagtgccagctacttgggaggctgaggtaggagaatcgcttgatcctgggagacagaggttgcagtgagccaagatcgcaccactgcactccagcctaggcaacggagtgagagtcggtctcaaaaaaaaaaaaaagactacatttatataaaaatattaactcctcaatatttgtgcgttcctaaagttttactagttatgtctatctggctctatttctgtttgtctgtcatctatgtctattttctaaagatttgttaaaattaatcttgcaaaatagttccacatacttttcactctttagccaagcaactaagaaatagaacactatttgtactaggtgtaaaataacaagcaggaaactaccttaaggctatgaaaaactgagacattaattggatttctgcagtgatttaaaaaataatatgttgatacaaaattattttacttacagatgatgaagaacgagagcttcaaatggatcctgcagactatggaaagcaacatttcaatgatgtcctttaagtcctaaaggaatgcttcagaaaacctaaagtgctgtaaaatgaaatcattctactttgtcctttctgacttttgttgtaaagacgaattgtatcagttgtaaagatacattgagatagaattaaggaaaaactttaatgaaggaatgtacccatgtacatatgtgaactttttcatattgtattatcaaggtatagacttttttggttatgatacagttaagccaaaaacagctaatctttgcatctaaagcaaactaatgtatatttcacattttattgagccgacttatttccacaaatagataaacaggacaaaatagttgtacaggttatatgtggcatagcataaccacagtaagaacagaacagatattcagcagaaaactttttatactctaattctttttttttttttttttgagacagagttttagtcttgtttcccaggctggagtgcaatggcacaatcttggctcactgcaacctccgcctcctgggttcaggcaattttcctgcctcagcctcccaagtagctgggattacaggcacccaccaccatgcccagctaatttttgtatttttaatagagagctaataattgtatatttaataaagacgggtttcaccatgttggccaggctggtcttgaactcctgacctcaggtgatcctcctgcattggcctcccaaagtgctggaattccaggcatgagccactgcgcccagtctacacactaattcttgttagcccaacagctgttctgttctatctacccctcatttcacgctcaaggagtcatacctagaatagttacacacaagagggaaactggaagccaaacactgtacagtattgtgtagaaagtcacctccctactccttttattttacatgagtgctgatgtgttttggcagatgagctttcagctgaggcctgatggaaattgagataacctgcaaagacataacagtatttatgagttatatcttagttcttgaaattgtggaatgcatgattgacaatatatttttaatttttattttttcaagtaataccagtactgtttaactatagccagaactggctaaaatttttatattttcagagttgaagttggtgaagacattcatgatttaaacaccagatcctgaaaggggttaaatctactttgaaatgaatctgcaatcagtatttcaaagcttttctggtaattttagtgatcttatttgattagactttttcagaagtactaaataaggaattttaacaggtttttattaatgcacagataaatagaagtacagtgaggtctatagccattttattaaaatagcttaaaagtttgtaaaaaaatgaatctttgtaattactt

SEQ ID NO: 1402 - DNA, 6000 bp, Homo sapiens
tgttaaagtatgctgcaaagcatttagttatttatagttttacaaacctaaattgcaatctctgatgttatcgtaagtgatctttgacttacggttttaaaacacatttcttcatttgatgttttgtgcttgactagagtttatatagtgaaattcagaaaccactaatcaaagcagagtaggaggtggtcatgcaaaatggttaagtaaaataacacatcaggtggacttgggttatcagagttcttccttctagctctgttccttaggcaactgctctcctatgcctcagttttattatccttaaaatggtcataacaatttctacctcaggatgattcatataaggattaaatatgataatgtatattgcctagctcagtgtttgttccagagtaaaaactcattaaatggtatcattatagaaaacctcccattgagaagtaatactggttttgctctatttttaggagtatatgcaggaaaaatccaaagaaagcggccaaatgttgcgacaatttaagaagacaacattcattaggataaaatggggggaaggattattattcatgttattttccctgcccaagactttatttaaccctggactccgtttacacagacaaagtgacatcagaaggctgagcacttatctggatcatttggtcagtttggtaattcctgctccacacccctattttcctcttaataatacgtttgggtgaagacaaattagtgtttagtaattgcatcatctctgtgcttacctatacaaacataagtttattttatatgcccagatgtctacagagaccctttttgtaaatgtcaaggacatttggatttacttttacagaatattgaaaagataagacaaattataaataagttctaaaacataaatttaattcatctctgcatagtgatttttgaatttgattcaaagggaaattattgcagaagaatgcctttccctcattttataactttaaaaacttggattaaccactcaatgtccactttctttgacttacagtataaccatgtagccaattgtggcccactaaaatctacagaagttaatgtgggtcaccattttggtcagaagcatacattcctgtcagacaactagttgtctgacagaaatgttaggcttcatgtatgttaccccagtactgttagaaacatttgtactaggttataagatctttctgtgacaggtaacaaatttggggaagacagcacaatcttcttgaatgtagctcttgggaatgcattattacatccatttctgtaacataataatatgttgcatgcagttatattttctatttagtctgtatattttgttcttcatagtctgttttttctagcatgcttgatttaggagagaataaagggctatataataataaatccagatttccggataagaatattgcctggttaaaattctgcattgcttaaagacacccatgtttaagatttttcatcactaacatatccattaaaagtatcaactggccaggcagggtggctcacgcctgtactcccagcattttgtgaggccaaggtgggtggatcacctgaggtcaggagtttgagaccagcctgaccaaacatggcgaaaccccatctgtactgaaaatacaaaaattaggcatggtggtgcatgcctgtagttccagctacttgggaggctgagacaggcgaattgcttgaacctgggaggcagaggttgcagtgagctgagactgtgccattgcactccagtcgggttaacagagcaagacactgtctcaaaaaaaaaaaaaaaaaaaagtatcaaccaacaaatgttaccaagataacgtgacttcatgagggagaatgtcactattaatttatcataccatttccaaaaagggctttgtgcttttcacataaaattgagacagtgtatatttaatctaatttaaattttaaagagatactggtattttgaaaatgcaacctatatatattcttaatatccttttaagaatatggagatgaagattgttttctccaattttctgtgccattttaaatttaactttgacatccagctatagacagaaataataagccaccctgggtgtaaacttgattttctttattgagatgtatcatgtattgaatgagtgaaccagaaaattagaagatggtcaaaaaaagtccaagttaccaattttttaaaatttataggcaaagtatcaaattgtcttcttaatatgataaactgtgctttatcattctgaaaactcaggatacagcttattcatagcattgtgggtctctccagtaagaaagatgctaaaagttttgtgcactttttgtgtgtgtaatgcaaattagttaaaacaaatagttttggagaaagttaaaactagctttagagtaaggatgagaaacttgagtgtttttaatttaaagataaaagcctgtgttttacacattcttttttggtgttcatagcttcttctcatacaggtgccagacactgtttgtgcttttgatggatttttatttatatactttttttgcttatttttactttgagtggaatgttcattaatgtaaattgtatttatttttatacttttattttcactagttttgcttctaggcaaaaagcaaaataaacttttcatcttaaagaaaatctagtttgattgtttttatttaccaggggaaggactattaagaaataggccgggcatggtggctcatgcctgtaattctagcactttgggaggccaaggtgggtggatcatgagatcaggagtttgagatcagcctggctaacatggtgaaaccccgtctctactaaaaatacaaaattagctgggcgtagtggtgcatgcctgtagttccagctacttgggaggctgaagcaggagaatcgcctgagcctgggatggggaggctatagtgagccgagattgtgccactgcactgcagcctgggtgacagagcaagactccatctcaaaacaaaacaaaaaagaaaccgatattagccaggcatggtggttcacatctgtagtcctaggtacgctggaggctgaggcaggaggatcacttgaacccaggagttacaggtggcagtgagctataatcgcaccactgcactccagcctgaatgagactttgtctccaaaacaaaaaagaaaaaagaaacagatattgaaaagtattaggccaaaacaaatattgtatataatcattctttacaagttccatgaaagatatatctcattatttaatatgtcccctgggccaggtgcagtggctcacgcctgtaatcccaacactttgggaggccaaggcgggaggatcacctgaggtcaggagtttgagaccagcctggccaacatagtgaaaccccgtctctactaaaagttggacttttcagaaggtaaaactcaggctggaaatgtcttaacttattaagagatagaagcctgctaagggaaggagagggagaaaagagaatgcgaaggttgaagctcacatcaaagctgttaatttgcacaactttaagaatcctcctcttgttactgcctaatcatgcagtgtgagcctaggaaaaggctcctcaccttgacctcttattgagatgttgcatgtgataacatgcatggctgtatgggaagagctccttgctttcccgtggccaccctttaacccttgttcacttccagtgttgggaatagcaggtacgagtggatatactttcctactcatactgagctgaacactggagggcccgttctggagatgatccttttccctgtcataggtcaccatctcatgaacaaccacagaccaccacccccgaatgaaaagtaagagttataaaaacatcgaatgctttctctctaagggaccataatggatatctaagtaagttataaaagtaataattaaaaaaaaaatttttttttgagatggagtttcgctcttgtagcccaggctggagtgcaatggcgcaatctcggctcactgcaacctcatcctcccgggttggagcaattctcctgcctcagcctcccgagtagctgggattacaggcgcccgccaccatacccaactagtttttgtattttttagtagagacggggtttcaccatgttggccaggctggtcccgaactcctgacatcaggtgaaccacccacctcggcctcccgaagttctgggatcataggcctgagccaccgctcccggcctaaaataatttttaaaaacgttctgtggtcgaaatggatatccaccttcctagaaacactgctttgccaagttggacgaaatgcgaaccctaatttccccacgtgcattagctgtagtcaatcatattagatctagggcagccctcggttgctagtcgtgggaagggcattctgcaagtgtctaaaaccgcccgcaaagcagtgggtaaagcagcggcctagagggggcatggctgtcccacgccaaacagcgtattagccgcaaaaccaggtactggctgaacctcagtttgcgtcttcgctccgccgccttctggagtcctttctgcccctagaggacgcaggtgagctaagcagcagtcatgccctttaccatcatgacgcccgcaggcgggaccacccggcactgtagacagctgccctttacaatcatgactcatagaaactacggcactctggccgtggccgacgttgctcctccgaagcatggcgccggcgggagttgtaacccgggctgtccggagcggggagctgcccctcacaagcatggcgtcagctgaaaatgaagcctgtgctgtgcggagcgtcgcctgcccctcacaagcatggcgtctgcagaaggtgctgtgcggccgctgcggggcggccagctgcccttcacaaacatggcggccgaggggtgcggggagtggcggggtaaggatgggaagccgagcagacggccccagaacaagcggtcatgtgactgggaagatggccgtctttccttggtaaggaagcagcggcgggtgggctttggagaggggctgtccttacttgtgatggggtcggcctgggtctgagagtgtgaattcctctctgtcgggttctggtggtcgaccggccacccccaagttgtcttgaccgtagaatccctggccgctaccgcggtccagcggagcaatctgaagccagactggcgggttcttggttctctccccgtctgctgcctctctgcgccttccacgggcccctgtccattcattccctaaagaaaacttgagtttccaggcttccgcgtccccagaagttggcgcgggttctggggtcgctggatgagggtaatggtggactcagcttttaaagtctggacgagtcgggagatctggctgttggtcagtttcctcagctcctctgttcacctggagacttgcttttctcatctgtaaaatggccgccattcatcctatcctaggcacagccctcagacttattccttggcctcaaggagctgacagtataatggggcagacgcacagtagagggatgtctaaagaaggcattcggatgaggcaccaagaagggagtgattatccccaccagggggctaggggaaggcttcagagaggaggagttaaattgggtcttggaggatgaataggagtccaccatagggagggcgtggcgtgtgcctggttggcaggcccgtaggtcccttgtggttggagtagctaggaatgagtgactgaagcttcagggttcagcaggtggtatgtgtgtgagtgaagaacttgaggaagttgtgttgttgatgatagtgggatttggggacggggaatctctcctgcatctcagaaagcgagataatttactttctcttcaaatgatgtgaagtagcttagattaaatgagcaaatgaaagaccttagaaataatcaggtacaaccttctgcttttgagcttgataaacacttcattttgtcttattcc

SEQ ID NO: 1403 - DNA, 6000 bp, Homo sapiens
ttttgcatttcaaagttgtaaatccaacattagatatcaaaagcattttgttgaattcttaaagcttgtccctgagccgccttggactttgctgggttgccccctctgctggggcgggccctgggcagtttccgattgctcatgccttcattacggtggcacggcggtaacacctggctgcgggacatctgtgtctgaacctccaggtgctcccctccaagcctcaggcctgcccctcaaatgcctgggaaactgagtctcccagttccagggtagtggttggctgggctgagaaggagcccttgccaggacttcacgtgggcgggagggacactggctctcaggaagccaagagggtgagtgacaaggatggtggccaggagggtcagaaccctgggccctggagcagggtccagtggttgctaaggtgggagcctggtggcccgtatggctgagggagaggtgagggccacactggcaccgagactctttgggccgggtgtgggctgtaggaatctgagggcagaggctctttcatggtcagatgggacccccgggggaaggcgtctgtgggaggtcgctcaggtagtgcccctggtcagtgtctaaggagacagccatggcgtgaggtcaggcgtgcacgtggtcctgtcgggcctgtgtttcaccctcctcgccctagaagcttcatcttgccccaggctcccctgtgctgggacctcaggctggggtgcctggagctggggagggaggggagcgggctatggtggtggcccctcaggccaccatgacccaggtcgggtgagcccctcatgctggggtgtgtcctggtggccgtggtcgcagcgctcctgtggtgctccatttcccaaggaggaaacgaggctcctggattgggacctgggggtgccagagccgggagccaacccaggtcaggggcgacacccattttgcagaagggggagaccagccactgagctccagggcgggggcccactttgtccccttcctccgacctgacacctgcctctggggcccttaccgggaggctgggatgtattcctgagttcgcttgtccccccgcttgatgcctgatagtaggggaggagaggggcggcaccctggccctggggctgcctgggttctgtgcgtgcacctggcagtgggcctgtgctgtgttttctctgcattgtatgaggcatgtgtgtcagagaccgtgtgggtcttatgtcagtgactgtgcctctgttctctcctcctgggctctggctgtgttcccctaacccccgggggacctccacggcctgctagtggggtctcaggtgtgcagcagggtggcctgtgattagcagtggggctgagtcattcccctaaagagcttttccccctggtggctgcgttgctctgtttttctaacagaaacatttggtcactgtggctgcctactgccacccgactcagctccaagagtggcaggcggccatttgcctggggaggcaggcctgggtccagctgcacccctgggcctcaccgcgtgaggttgggatggccaccggcagggtgcttttggaggatgctcatccctcctgctggtgctgggtcctggctgagccttgaggctgggtccccacctgcctttgggaggctgggaggcctggagaagcctcaggccgtgcctcgaggcccagccaacctgccacgtccctccgccccgcctgccccgctgttggcaggtccctgcatctaaaaatagttctggaggagactcaagtctggggcgcgtggagggagatgagtctggagaggcagccgccaaatccactcccagacgcactggaagggggcggggacaccccacggaggcccccagccgggactctgctaccaggcgtgctggagacctagtgggcccagttctgctgcgctgcggggggctctgccaggcctgcggctgctggggggtgctggcgcctctgccacccccatgctcagcgcccccctcacagcaccctcagcaagcagggctggctgcctgcctgcattgggagggcctctaggggttcaggggcactgggcccgggggaggggctgctttggcgctgctgccctgggggatgtgcggggaggccctgagtcaaccctgtcccagacatcccctttgatgaaggaacaaaaggtctttcagtggagagagctgaacagggagcctggtggtggaggcgtgtgggcgcagtgtgcccgggggctggagaatcccaccagggaggccttgacctccccaaggcagggagaccttcagggaaggaggctgcctggcatggcccctacccgcttcaggctggtgctggtgaggggtcctgtggccctgggcaggccattgtgctgcctgcctcttcacccactgtgcgggccttggcttccctgggctctgggtcatggtaagagcacctggggaggggagggctggccctggacccacttcccccactaggcctcatcctttcaggtcgctggggatcttacctgctgcaggcagctcccccggggcaggcgcggcagggagggggccttggtcccagctgctgcgccccccagcacacacccaacctgcccctctggccctgtcctccagagtctccccatgctgtgctgtggggcagggggtgctaggctctatctggtcctgggccggatgcagtcccctgctgggccaacccttctgaggaggctacagctaggtggtgtgggcagcagactcccaggcctccgacgtggcctcttgtcctgtggggctaggcgccccagtaacggggggttccttgcctgtgggtagtgccctccagagccagggcctcagcccctcaccccaccggtgtcatcagctcatacccatgctcctctgtggagccttctgggtcagcaggctgtagagacgttggtgtcctggcccaggacgaggcagctctgaataaaacccagagttcttgccgtacctggcactgcgttctgctagaggaaggtcagatggtgcagagggggtgagaactggcatccttggggagccccgtcccttccacctggtgtgccctgcccacctcctaaaaggacgtggctcccaggtgtgagtggagcctccctaagggctggtttgagggcagcagtgaagtcggctctctgcccccaggtggtggtgcccacccgcgtggggcagggctatgtatacgaggccgcccagccggagcaggacgagtacgacatcccgcgacacctgctggccccggggccacaggacatctatgatgtgcccccggttcgggggctgcttcccagccagtatggccaggaggtaggtgtggggtgcgcagcggtgggagggcagggcggcaagtctgtgcctctgcttggccctgggccgagagctgcatcttctcagccccggccaggcctggggacggtgctgcggggttcccacctttcctattcccccaagtggccctggcgccgttaaccctgcactgtttctgccccaggtgtatgacacaccccccatggctgtcaagggtcccaatggccgagacccgttgctggaggtgtatgacgtgccccccagtgtggagaagggcctgccaccgtccaaccaccacgcagtgagcaaatgccagggcaatgccagggccaggctgaggctgtggggtgtctgggtgtgtgcacaggggtgctgaccagtgtctgcagggctgggggtggcgggcaggaagagactggctccagaccctggttctggatggttgacagatgaggaaatcaagctgtcttctgagcctcaggttctttgtcggcagaaccgcctgttgcgaggccttctccatgagctcctgagagggtatccgcaaggtgaccacgggatgtgtcatctcacctgggatacttccaagagtgaaggggggactagtaattatgtgggggcatcagggacaaaccagcactgtcctgggcaaaccagaatttggtcccctgataatacacacagagctcagtcgcacacctgctgcagagtagaaagttcacacgtggtggtggtgctgggtggtaacagtgatggtggtgatgaggtggcagcggcggtgatggtgatgaaatcatgatatgatggtggtggcagtggcagtatcacagctaacctttcagtgagtgtctgcagtgacacaattatgtgaattaacacatgcaattctttgggaggaagctctcccaccttcaggcacaggggtggtcacctggctccagagccggctcgtcccagagctgtcatggataggaattgtgaaggatgtgtgtgctagggctgcgagtgtgtgtgcgcgtgtgtgtgcctgtgtgcgtgcctctgcatttgtatgtgtgcctgtgtgtgtgcgcgtgcctctgtgtgtgtgtctgtatgtgtgtacgtgtgtgtgtgtgtgtggctgggtgctgcccccagtccctggggtgggcagatggacagatggacagtcttgaccaccgcttgtcccccaggtctacgacgttcctccatcggtgagcaaggatgtgcccgatggcccactgctgcgtgaggagacctacgatgtgccccccgccttcgccaaggccaagccctttgacccggcccgcaccccactggtactggctgcgccccctccagactccccgccggccgaggacgtgtatgacgtgccgcccccggctcctgacctctacgacgtgccccctggcttgcggcggcctggcccgggcaccctgtacgatgtgccccgtgaacgggtgcttcctcctgaggtggctgatggtggcgtggtcgacagtggtgtgtatgcggtgcctcccccagctgaacgtgaagccccggcagagggcaagcgcctgtcggcctccagcaccggcagcacacgcagcagccagtctgcgtcctccttggaggtggcagggccgggccgggaacccctggagctggaagttgctgtggaggccctggcacggctgcagcagggtgtgagcgccaccgttgcccaccttctggacctggcaggcagcgccggtgcgactgggagctggcgtagcccctctgagccacaggagccgctggtgcaggacctgcaggctgctgtggccgctgtccagagtgccgtccacgagctgttggagtttgcccgcagcgcggtgggcaatgctgcccacacatctgaccgtgccctgcatgccaagcttagccggcagctgcagaagatggaggacgtgcaccagacgctggtggcacatggtcaggccctcgacgctggccggggaggctctggagccacccttgaggacctggaccggctggtggcctgctcgcgggctgtgcccgaggacgccaagcagctggcctccttcctgcacggcaatgcctcactgctcttcagacggaccaaggccactgccccggggcctgaggggggtggcaccctgcaccccaaccccactgacaagaccagcagcatccagtcacgacccctgccctcaccccctaagttcacctcccaggactcgccagatgggcagtacgagaacagcgaggggggctggatggaggactatgactacgtccacctacaggtgggtgccgcctgcccagccccggctcctcttctgccacgctgggctcctgtgcttagggggagatttgttctcagctggggcctggtccctggcaaggccctgcaccctcctctcactttgacctccctcaccccacattggccccatgtgctagggtggccatgtcatcgagcccttcgttgagtccctcgggctggtatctctggtgaccagcagcggtgactctgctgttctgtgtggggagacagatctgcagaaatgtgcacacacacaaggatgctctgagcgtgggggagcagcaggaggtggtgggaggtggctgggactgctcctcccaggctggcccctggagcagag

SEQ ID NO: 1404 - DNA, 6000 bp, Homo sapiens
gggtgtgcctcctgtttctttcccagccttggggaaggtgtttgaagtttctaaattaattactgactttttggatttggggtagatagactttgttaaggaagctctgtcttattgttgttcatttttttatcctaagaagctgttctttttgtcagattattttcgtgcacctcgagagagaaccatttgctatttgttttaacttggcagctttgtcgtgattactgccgctctccttgtgttggtccaggtagcagagtggccttgggtggggcttttagggatatcttgagggtcatccctggagttttggtggtgacagtggtcaagaggattttgaggtgctatacaggtgcagttgaaagaaaggccaggatcagctgggcctttctgctggggaacaggtggggacagtggaggcaaaggcacaatgatctcgccaaactccactgagttcttttcctagtatcaaagctgggcacctccccagagcagggcaggagctggggagcccctgacgccccatgcacatccttctgttctcacacctgtgtcctctctccccagaacgtgctggccaaagcgctctatgacaatgtggccgagtccccggatgagctctccttccgcaagggtgacatcatgacggtgctggagcaggacacgcagggcctggacggctggtggctctgctcgctgcatgggcgccagggcatcgtgcctgggaaccgcctcaagatcttggtgggcatgtatgataagaagccagcagggcctggccccggccctcccgccaccccggcccagcctcagcctggcctccatgccccagcgcctccggcctcccagtacacgcccatgctccccaacacctaccagccccagccagacagcgtctacctggtgcccactcccagcaaggctcagcaaggcctctaccaagtcccgggtcccagccctcagttccagtctcccccagccaagcagacatccaccttctcgaagcagacaccccatcacccgtttcccagcccggccacagacctgtaccaggtgcccccagggcctggaggccctgcccaggatatttaccaggtgccaccttctgccgggatggggcatgacatctaccaggtccccccgtccatggacacacgcagctgggagggcacgaagcccccggcaaaggtaaggctgtcctggcacagttgtgcagccacacaggtatagcccaggccctggtttgtgggcacagaagggtccagccaccctcaatcaccggcattccaggagtggctgtgtgtttggtctggggtcaaagtgggaagtgagtgtttggggggtgttcatttgtccggggaagatggatgtgaatggacccagaggggagatgctccgctggcctcagccaagccgacccgagtggtggtgtcaccaaccacagggagcagcctgttgaggcgttccagtgggcaggcggggcttggcacatggggtcggcagttgctgggcccccgcaagggagaggccagccacttcatgctcaggctcccctgtgccatctgggtttacgtgtcagcctctagatggggttccggcacatcttctggccgcccctgcctccacaggccaacccctctccacttatggaacatgctaggggccagcgggtgcgtatggtgatctggatgtgactcctgggaggacgctgcccctgagattgctagaggaggactgccctgagagcctcctgggctcttgctgatgggatgctgggcctggggacaagacctctggcctccagaccctgagcccgcttcccaagtccacagggcccctgcctcccaagctcacctgcctgtaggaaggagtcagcactagacactcagcccagggctgaggtggagacctcattggtgccagctgggcagcgagtcagctgggagttacccccacccccgcccatgggtggcctggtacccaggaggcatggccggaggtcgttggcgggtgggggactccatggacatgggccaccaagcctggccaccaggggaacctgggtcactggctcccacttcctgctctacctgctccttcagccatctggtcagaggcgagcctggctggcgtggggtgcctgggtgggggtgctcccaaactggctttagcaagaggagcagggtcctgttatcccctggggaggcggcagggagcagtgtcctgtaggggagcctcaggccacagtccaggtatacccacaccccacacagatgaacacacgtgcatgatgcctgtaccccacagatacgaacacccatgcacacaccatatgcacgaacacacacatgcgctacatgaatgtgcgtgaatacatgcacatatctgcatcccataccccataaatggacacacgtatacgcccacacatgcgcacatcatatgcatgaacacgcacacacccaaaccccatatgtgtaaacacacgtgcatactcaccccacacacagacacgtgtacgtccacacatacaaagcgtgtgcacccaccagtatcccacaaacgtacaaatgtatgtgcgtatgcacacgcacacacagtccacactgcacatgccccaaggtcaggcacatccccacccctcctctcccgcctttgcagtgaagcttgtcctggtgcggctggaagccctgtgggctggggagcagcagcgagacccccagacagagcccggcctcgaggctgtgttttggcagctgttctgtctccgtctccggcagggggcctgctctcaattgcatcaggggctcagccagctgggtccttctctgcccatgcccactggtagagctgcccagacctgtgccccaagggccctgacctggctgatggcccaggaaggagagccctgtgtcctgggcctggctgctctcccccaggaaacctcccccagtcttgattgtgtctgcttgtattttatgatcacaaaagcaatgcttgtttgctgtagaaaatgcataatgtatgggaaagtctggagatgaaattttccaatcgcggtaatcactgggaaattctggcatattttgtctagtatctgccctgtgtttcacagatttatacatgcagttttgcatttcaaagttgtaaatccaacattagatatcaaaagcattttgttgaattcttaaagcttgtccctgagccgccttggactttgctgggttgccccctctgctggggcgggccctgggcagtttccgattgctcatgccttcattacggtggcacggcggtaacacctggctgcgggacatctgtgtctgaacctccaggtgctcccctccaagcctcaggcctgcccctcaaatgcctgggaaactgagtctcccagttccagggtagtggttggctgggctgagaaggagcccttgccaggacttcacgtgggcgggagggacactggctctcaggaagccaagagggtgagtgacaaggatggtggccaggagggtcagaaccctgggccctggagcagggtccagtggttgctaaggtgggagcctggtggcccgtatggctgagggagaggtgagggccacactggcaccgagactctttgggccgggtgtgggctgtaggaatctgagggcagaggctctttcatggtcagatgggacccccgggggaaggcgtctgtgggaggtcgctcaggtagtgcccctggtcagtgtctaaggagacagccatggcgtgaggtcaggcgtgcacgtggtcctgtcgggcctgtgtttcaccctcctcgccctagaagcttcatcttgccccaggctcccctgtgctgggacctcaggctggggtgcctggagctggggagggaggggagcgggctatggtggtggcccctcaggccaccatgacccaggtcgggtgagcccctcatgctggggtgtgtcctggtggccgtggtcgcagcgctcctgtggtgctccatttcccaaggaggaaacgaggctcctggattgggacctgggggtgccagagccgggagccaacccaggtcaggggcgacacccattttgcagaagggggagaccagccactgagctccagggcgggggcccactttgtccccttcctccgacctgacacctgcctctggggcccttaccgggaggctgggatgtattcctgagttcgcttgtccccccgcttgatgcctgatagtaggggaggagaggggcggcaccctggccctggggctgcctgggttctgtgcgtgcacctggcagtgggcctgtgctgtgttttctctgcattgtatgaggcatgtgtgtcagagaccgtgtgggtcttatgtcagtgactgtgcctctgttctctcctcctgggctctggctgtgttcccctaacccccgggggacctccacggcctgctagtggggtctcaggtgtgcagcagggtggcctgtgattagcagtggggctgagtcattcccctaaagagcttttccccctggtggctgcgttgctctgtttttctaacagaaacatttggtcactgtggctgcctactgccacccgactcagctccaagagtggcaggcggccatttgcctggggaggcaggcctgggtccagctgcacccctgggcctcaccgcgtgaggttgggatggccaccggcagggtgcttttggaggatgctcatccctcctgctggtgctgggtcctggctgagccttgaggctgggtccccacctgcctttgggaggctgggaggcctggagaagcctcaggccgtgcctcgaggcccagccaacctgccacgtccctccgccccgcctgccccgctgttggcaggtccctgcatctaaaaatagttctggaggagactcaagtctggggcgcgtggagggagatgagtctggagaggcagccgccaaatccactcccagacgcactggaagggggcggggacaccccacggaggcccccagccgggactctgctaccaggcgtgctggagacctagtgggcccagttctgctgcgctgcggggggctctgccaggcctgcggctgctggggggtgctggcgcctctgccacccccatgctcagcgcccccctcacagcaccctcagcaagcagggctggctgcctgcctgcattgggagggcctctaggggttcaggggcactgggcccgggggaggggctgctttggcgctgctgccctgggggatgtgcggggaggccctgagtcaaccctgtcccagacatcccctttgatgaaggaacaaaaggtctttcagtggagagagctgaacagggagcctggtggtggaggcgtgtgggcgcagtgtgcccgggggctggagaatcccaccagggaggccttgacctccccaaggcagggagaccttcagggaaggaggctgcctggcatggcccctacccgcttcaggctggtgctggtgaggggtcctgtggccctgggcaggccattgtgctgcctgcctcttcacccactgtgcgggccttggcttccctgggctctgggtcatggtaagagcacctggggaggggagggctggccctggacccacttcccccactaggcctcatcctttcaggtcgctggggatcttacctgctgcaggcagctcccccggggcaggcgcggcagggagggggccttggtcccagctgctgcgccccccagcacacacccaacctgcccctctggccctgtcctccagagtctccccatgctgtgctgtggggcagggggtgctaggctctatctggtcctgggccggatgcagtcccctgctgggccaacccttctgaggaggctacagctaggtggtgtgggcagcagactcccaggcctccgacgtggcctcttgtcctgtggggctaggcgccccagtaacggggggttccttgcctgtgggtagtgccctccagagccagggcctcagcccctcacccc

SEQ ID NO: 1405 - DNA, 6000 bp, Homo sapiens
cggctgcagctctccctgacgtgtgtcacccgcagccctggtcccagccgctgtgcttctcagggcctgcctgcccagcccgggtggatatggtgcccaggcgggccccggggacacaatgagggccattctcagagccaggcagagcgtgtggggcagtcctgtcagtcctatgtgcaacagctgggatattgtttagggagtgctggcatcaggctggggctctcctcctctggccctgccctttgggatgagcaagcccccaaaggccttcctgggttcctctggtgcacgtgccctggagttacccttctgaaggaggtagacttgtcctcctgtcctgggtgcctggggtgcaggggtgtgaattgggctatgtcaagatatgctgggcagtactgtgaggtgggggcagaggggagaaggtgtcccaggaggagccttcctggaggggatgatagtccagcatgttctgaagtgggagtagggtgcggcaggagtagggtaccagagaatgagtgagtcaggcagcagcctccactgcgccttggacacaggtggctgacagtgtccacctggactggctttgcaccccttctgaggtcacagttgtgtcccttgaaaacttgggcaggagcacctgactggcccagcttgggtcatgccctaggcccagcagtgcgggaggccaggaaagtaggcttggggaggctggcctctcctccagtttgaagcatggcaggggttccgggggaggctgctggggggcctgcgagcatgtccagagcaggaatgcttggggtggtgtgtgctttgctcgtctgggcttatctggccgtggggaagctggttgtgcggatgacgttcactgagctgtgcacgcatcatccatggagtctgcggtgtgagtccttttgccgctccagggtcacagcctgcctccctgctccagccccctggctgaggcccttcctctgccccatgctcttctcagacaggaatcctgtggaatgtcatctctttggggaggccgtctctgaccctgtatgcaaaggccttctcccacattatttttggcaccccactttcttccccgtgaaagcaaattgtttggtgtctttctgtcccactacagtataggcccggttcagacagaggccttgtccactaggcctgcgctatctctgcggagcccagccaaagcaggggccaggcgaatcttttgttaaaagaacaatgcgcgctgggcacagtggctcacgcctgtaatcccagcactttgggagtccgaagctggaggatcacttgagcccaagagtttgagaccaccctgggcaacataaggagaacccatctctacacaaaattagctgggcgtggtggtgtatgcctgtagtcctagctacttgggaggctaaggtgggaggtggctgaggtgggaggatcacttgagcctgggaggttgttgcagtgagagccatgatcgcgctactgggcaatagagcagaacccagtctcaaaaaaaaaaaaaaaaaaaaaaaaaaaaagaacaatcctatgaaatgagggctgtcatccagcagagaggatctagatgctcagagaggctaagggatttgcccaaagtcccacagccgggcccaggtctgagtctgcctagtgaggaagaaggagtgcatgtccttagggaacagaacaggaggcagagaggcccggagaggcgggggccctggccagctggagtggtcggttgtgtaccagcagcgtccagagctcaggctgggcgggggcacaccagctgacgcaggcggggaagctcctggtgccaggcgcctggtgccacgtgcccagcctgtgagatgcttcccagcctggcttcagcggccccagactgggctgtggccgatcagtgagctcatgcctggcagggctgggctgtgaggccagaggccccagccgctcacctgggccgggctttccctccctgcagggcccttccctccacagagcccccggcctccctgcctgtgctccctcagcctctctgagtgcctggccctgcctgatggggcctctgccagcctttcctgggccaccctcctaggaggtgaggggccttcgcggggcggtcccctctgtctaaacccccaccttctctgacttggctggaggggaattttcctgtgactcactctgctggcacttcctgtggtcaccagggcaggggctgggggacccggaggggcagctctgtggtgtgtagggtcactggggaagggtggcccgcccccgatgggctgtgattcccagaggcaggctgcagaccatatttgggaaatgcttgtcttgctggccgcctgggatgggggccctgagcccggtgggctgcaggacagcccccgccctcccgctcctctgtggggctctggcccctagacctgccgcactgcctgtcccgtcctgcctcagagcctgggacatagtccaccgttttctttttttttctttttgtgtagtttttcagccccaaagcaagaaacactcattcctgaaaaacaggaagagaaactatctccattgtctcagacatctctggtgtcttcctgaccctctcttgtctttacgtttcacaggacattttcttgagatgtgcttttcacttgagtgcctttttcattttgttgtaatcatggtgtggacagtgttgcagccatccagggcctctgcccttgtgctcaccttggctccaatatgactccacctgggcctgccctctcctagctgccccctggcccctcccttgggccttgctcctcctggctctccacactccagcctctggcccttttagggactggaggctcctagctgctctggagaaatgggctccctgctgatgatgtccacccagggcaagtgaaccatggggtctgaatgtctgatcctgggacctggggcaactactgcctacccaggccgctgcctggtatgccatcgccctctgatgccggccagggagatggcgctcagaggggcactgtccagcccctgctcatataggggaggagggtgggccctagggacttgaaagaggcctcacccccactcctctgccccaaggcacaggctcctgcttcctgtttctgcccaagggggcgtggccctttcttccttgtttcactccttgcagatggagtccagaaagtgggacttgggcccaagtggggatggtcacacagctactggctggccagaacccaggtcccatttccgagtcagagtctcgaccaggctgcacatctaagacgccaggagactctgaggagggaccttgcagggcagcccagagctgaggccaggctggtggggtggctggagcccagtgccggtcactgtccagccagcctggcactgttctcacacccggcttccctgtgtgtgaagtctggggcccctgtggaacccatgcagccctctgctgccctaggaggggccgcagccctggccttgtctcaccccgtgcctccctcacacctgccttttgctgcaaccgcccacaccctccagccagggatcctctgtctctctgggcccatcctgcgcctggcacctcgatggggcagcagcggcaggggcgaggatgcatgagtgtgtggtgggaaactgcgaggcctccctgcctgggctctagtgtcccagcgaggctccgcccctgccctcgccacggcactcatgcctctgatcccacagcctcctccaagtccctctcggactgcttggctcctgggccacatggagcacgtacccggctctgcaagggtttgctgagggcgacggggccaggacagggagggtgtgcctcctgtttctttcccagccttggggaaggtgtttgaagtttctaaattaattactgactttttggatttggggtagatagactttgttaaggaagctctgtcttattgttgttcatttttttatcctaagaagctgttctttttgtcagattattttcgtgcacctcgagagagaaccatttgctatttgttttaacttggcagctttgtcgtgattactgccgctctccttgtgttggtccaggtagcagagtggccttgggtggggcttttagggatatcttgagggtcatccctggagttttggtggtgacagtggtcaagaggattttgaggtgctatacaggtgcagttgaaagaaaggccaggatcagctgggcctttctgctggggaacaggtggggacagtggaggcaaaggcacaatgatctcgccaaactccactgagttcttttcctagtatcaaagctgggcacctccccagagcagggcaggagctggggagcccctgacgccccatgcacatccttctgttctcacacctgtgtcctctctccccagaacgtgctggccaaagcgctctatgacaatgtggccgagtccccggatgagctctccttccgcaagggtgacatcatgacggtgctggagcaggacacgcagggcctggacggctggtggctctgctcgctgcatgggcgccagggcatcgtgcctgggaaccgcctcaagatcttggtgggcatgtatgataagaagccagcagggcctggccccggccctcccgccaccccggcccagcctcagcctggcctccatgccccagcgcctccggcctcccagtacacgcccatgctccccaacacctaccagccccagccagacagcgtctacctggtgcccactcccagcaaggctcagcaaggcctctaccaagtcccgggtcccagccctcagttccagtctcccccagccaagcagacatccaccttctcgaagcagacaccccatcacccgtttcccagcccggccacagacctgtaccaggtgcccccagggcctggaggccctgcccaggatatttaccaggtgccaccttctgccgggatggggcatgacatctaccaggtccccccgtccatggacacacgcagctgggagggcacgaagcccccggcaaaggtaaggctgtcctggcacagttgtgcagccacacaggtatagcccaggccctggtttgtgggcacagaagggtccagccaccctcaatcaccggcattccaggagtggctgtgtgtttggtctggggtcaaagtgggaagtgagtgtttggggggtgttcatttgtccggggaagatggatgtgaatggacccagaggggagatgctccgctggcctcagccaagccgacccgagtggtggtgtcaccaaccacagggagcagcctgttgaggcgttccagtgggcaggcggggcttggcacatggggtcggcagttgctgggcccccgcaagggagaggccagccacttcatgctcaggctcccctgtgccatctgggtttacgtgtcagcctctagatggggttccggcacatcttctggccgcccctgcctccacaggccaacccctctccacttatggaacatgctaggggccagcgggtgcgtatggtgatctggatgtgactcctgggaggacgctgcccctgagattgctagaggaggactgccctgagagcctcctgggctcttgctgatgggatgctgggcctggggacaagacctctggcctccagaccctgagcccgcttcccaagtccacagggcccctgcctcccaagctcacctgcctgtaggaaggagtcagcactagacactcagcccagggctgaggtggagacctcattggtgccagctgggcagcgagtcagctgggagttacccccacccccgcccatgggtggcctggtacccaggaggcatggccggaggtcgttggcgggtgggggactccatggacatgggccaccaagcctggccaccaggggaacctgggtcactggctcccacttcctgctctacctgctccttcagccatctggtcagaggcgagcctggctggcgtggggtgcctgggt

SEQ ID NO: 1406 - DNA, 6000 bp, Homo sapiens
ccatttccttgtctgcccccaaccctggggtcttgggcagagaacaggagttcttgccattttctcccagctcccaccttgtgctggcttgcgggtgctgaggtcatatttgctgggtgaaagggtgcaggccagatatgagccaggcctggcagagagggttttggtcagcagtgatacctgcagtgttctctgcagttggtttgggctggccctgctcctgagaactcctgggttgtcccttcaggcaaccagggaaggctccttggagcagcagcatctccccttaccactcgccgacaccagcttccgcctgacccagagaaggagtttggggacagccacagcacgtccagggctcccaaggcagctggcagagccaatgaggagaccccaacacccatccgacggctgcagctctccctgacgtgtgtcacccgcagccctggtcccagccgctgtgcttctcagggcctgcctgcccagcccgggtggatatggtgcccaggcgggccccggggacacaatgagggccattctcagagccaggcagagcgtgtggggcagtcctgtcagtcctatgtgcaacagctgggatattgtttagggagtgctggcatcaggctggggctctcctcctctggccctgccctttgggatgagcaagcccccaaaggccttcctgggttcctctggtgcacgtgccctggagttacccttctgaaggaggtagacttgtcctcctgtcctgggtgcctggggtgcaggggtgtgaattgggctatgtcaagatatgctgggcagtactgtgaggtgggggcagaggggagaaggtgtcccaggaggagccttcctggaggggatgatagtccagcatgttctgaagtgggagtagggtgcggcaggagtagggtaccagagaatgagtgagtcaggcagcagcctccactgcgccttggacacaggtggctgacagtgtccacctggactggctttgcaccccttctgaggtcacagttgtgtcccttgaaaacttgggcaggagcacctgactggcccagcttgggtcatgccctaggcccagcagtgcgggaggccaggaaagtaggcttggggaggctggcctctcctccagtttgaagcatggcaggggttccgggggaggctgctggggggcctgcgagcatgtccagagcaggaatgcttggggtggtgtgtgctttgctcgtctgggcttatctggccgtggggaagctggttgtgcggatgacgttcactgagctgtgcacgcatcatccatggagtctgcggtgtgagtccttttgccgctccagggtcacagcctgcctccctgctccagccccctggctgaggcccttcctctgccccatgctcttctcagacaggaatcctgtggaatgtcatctctttggggaggccgtctctgaccctgtatgcaaaggccttctcccacattatttttggcaccccactttcttccccgtgaaagcaaattgtttggtgtctttctgtcccactacagtataggcccggttcagacagaggccttgtccactaggcctgcgctatctctgcggagcccagccaaagcaggggccaggcgaatcttttgttaaaagaacaatgcgcgctgggcacagtggctcacgcctgtaatcccagcactttgggagtccgaagctggaggatcacttgagcccaagagtttgagaccaccctgggcaacataaggagaacccatctctacacaaaattagctgggcgtggtggtgtatgcctgtagtcctagctacttgggaggctaaggtgggaggtggctgaggtgggaggatcacttgagcctgggaggttgttgcagtgagagccatgatcgcgctactgggcaatagagcagaacccagtctcaaaaaaaaaaaaaaaaaaaaaaaaaaaaagaacaatcctatgaaatgagggctgtcatccagcagagaggatctagatgctcagagaggctaagggatttgcccaaagtcccacagccgggcccaggtctgagtctgcctagtgaggaagaaggagtgcatgtccttagggaacagaacaggaggcagagaggcccggagaggcgggggccctggccagctggagtggtcggttgtgtaccagcagcgtccagagctcaggctgggcgggggcacaccagctgacgcaggcggggaagctcctggtgccaggcgcctggtgccacgtgcccagcctgtgagatgcttcccagcctggcttcagcggccccagactgggctgtggccgatcagtgagctcatgcctggcagggctgggctgtgaggccagaggccccagccgctcacctgggccgggctttccctccctgcagggcccttccctccacagagcccccggcctccctgcctgtgctccctcagcctctctgagtgcctggccctgcctgatggggcctctgccagcctttcctgggccaccctcctaggaggtgaggggccttcgcggggcggtcccctctgtctaaacccccaccttctctgacttggctggaggggaattttcctgtgactcactctgctggcacttcctgtggtcaccagggcaggggctgggggacccggaggggcagctctgtggtgtgtagggtcactggggaagggtggcccgcccccgatgggctgtgattcccagaggcaggctgcagaccatatttgggaaatgcttgtcttgctggccgcctgggatgggggccctgagcccggtgggctgcaggacagcccccgccctcccgctcctctgtggggctctggcccctagacctgccgcactgcctgtcccgtcctgcctcagagcctgggacatagtccaccgttttctttttttttctttttgtgtagtttttcagccccaaagcaagaaacactcattcctgaaaaacaggaagagaaactatctccattgtctcagacatctctggtgtcttcctgaccctctcttgtctttacgtttcacaggacattttcttgagatgtgcttttcacttgagtgcctttttcattttgttgtaatcatggtgtggacagtgttgcagccatccagggcctctgcccttgtgctcaccttggctccaatatgactccacctgggcctgccctctcctagctgccccctggcccctcccttgggccttgctcctcctggctctccacactccagcctctggcccttttagggactggaggctcctagctgctctggagaaatgggctccctgctgatgatgtccacccagggcaagtgaaccatggggtctgaatgtctgatcctgggacctggggcaactactgcctacccaggccgctgcctggtatgccatcgccctctgatgccggccagggagatggcgctcagaggggcactgtccagcccctgctcatataggggaggagggtgggccctagggacttgaaagaggcctcacccccactcctctgccccaaggcacaggctcctgcttcctgtttctgcccaagggggcgtggccctttcttccttgtttcactccttgcagatggagtccagaaagtgggacttgggcccaagtggggatggtcacacagctactggctggccagaacccaggtcccatttccgagtcagagtctcgaccaggctgcacatctaagacgccaggagactctgaggagggaccttgcagggcagcccagagctgaggccaggctggtggggtggctggagcccagtgccggtcactgtccagccagcctggcactgttctcacacccggcttccctgtgtgtgaagtctggggcccctgtggaacccatgcagccctctgctgccctaggaggggccgcagccctggccttgtctcaccccgtgcctccctcacacctgccttttgctgcaaccgcccacaccctccagccagggatcctctgtctctctgggcccatcctgcgcctggcacctcgatggggcagcagcggcaggggcgaggatgcatgagtgtgtggtgggaaactgcgaggcctccctgcctgggctctagtgtcccagcgaggctccgcccctgccctcgccacggcactcatgcctctgatcccacagcctcctccaagtccctctcggactgcttggctcctgggccacatggagcacgtacccggctctgcaagggtttgctgagggcgacggggccaggacagggagggtgtgcctcctgtttctttcccagccttggggaaggtgtttgaagtttctaaattaattactgactttttggatttggggtagatagactttgttaaggaagctctgtcttattgttgttcatttttttatcctaagaagctgttctttttgtcagattattttcgtgcacctcgagagagaaccatttgctatttgttttaacttggcagctttgtcgtgattactgccgctctccttgtgttggtccaggtagcagagtggccttgggtggggcttttagggatatcttgagggtcatccctggagttttggtggtgacagtggtcaagaggattttgaggtgctatacaggtgcagttgaaagaaaggccaggatcagctgggcctttctgctggggaacaggtggggacagtggaggcaaaggcacaatgatctcgccaaactccactgagttcttttcctagtatcaaagctgggcacctccccagagcagggcaggagctggggagcccctgacgccccatgcacatccttctgttctcacacctgtgtcctctctccccagaacgtgctggccaaagcgctctatgacaatgtggccgagtccccggatgagctctccttccgcaagggtgacatcatgacggtgctggagcaggacacgcagggcctggacggctggtggctctgctcgctgcatgggcgccagggcatcgtgcctgggaaccgcctcaagatcttggtgggcatgtatgataagaagccagcagggcctggccccggccctcccgccaccccggcccagcctcagcctggcctccatgccccagcgcctccggcctcccagtacacgcccatgctccccaacacctaccagccccagccagacagcgtctacctggtgcccactcccagcaaggctcagcaaggcctctaccaagtcccgggtcccagccctcagttccagtctcccccagccaagcagacatccaccttctcgaagcagacaccccatcacccgtttcccagcccggccacagacctgtaccaggtgcccccagggcctggaggccctgcccaggatatttaccaggtgccaccttctgccgggatggggcatgacatctaccaggtccccccgtccatggacacacgcagctgggagggcacgaagcccccggcaaaggtaaggctgtcctggcacagttgtgcagccacacaggtatagcccaggccctggtttgtgggcacagaagggtccagccaccctcaatcaccggcattccaggagtggctgtgtgtttggtctggggtcaaagtgggaagtgagtgtttggggggtgttcatttgtccggggaagatggatgtgaatggacccagaggggagatgctccgctggcctcagccaagccgacccgagtggtggtgtcaccaaccacagggagcagcctgttgaggcgttccagtgggcaggcggggcttggcacatggggtcggcagttgctgggcccccgcaagggagaggccagccacttcatgctcaggctcccctgtgccatctgggtttacgtgtcagcctctagatggggttccggcacatcttctggccgcccctgcctccacaggccaacccctctccacttatggaacatgctaggggccagcgggtgcgtatggtgatctggatgtgactcctgggaggacgctgcccctgagattgctagaggaggactgc

SEQ ID NO: 1407 - DNA, 6000 bp, Homo sapiens
cggtcccctagaattagcattgataggtgagcctgttttgctccatgctttgctgtcataaatgctgcagtggacattggtgagcattgagcaagaaaagttctgtgcagtgggtctgtcctgaaggcagatctcagaaagcccaaagagcaggaaccctatcccaggcttatctttccacttgggtccagtataaccccctccactccagacacttagtgtcctggtgtgctgggtccacctgttttctgtacaaacagctattccaggccctgaggggttggagacatcccttccagcctgtgagctcatcttcaacctggctggaggtgccaggccactcctgggatgacacaactgtctgggagggccctgtgctggtgccccggccacatatctgcagctgtctcccttggtctggcaacaacctctcccagctcctccttattcagggcgtctctccttgctgccagtcccactgtgtgtatacgcatgcgtgtgtgctgtgtgtatgcaagtgtgtgcctctgcacttaggcgtgacttaaccacccccatcctccagactggggcagcctcagatttcttcacccaggccagcctatcccatgagggccacctctgaggtcccacccagtcaacaaatgtttactgcaccccttctcaccaatggggctaaacttagtggggtgggggtggtgctggccccagtgctgagctcagttttactggggaggaaggtgcttaggtctcagttgcctgtccttttgcagtctgagtgtgacaggggtgtttggctttctgagcctggagtgctgctgtccctgtccctagattcccttcctgctgcagggtgggctgaggtctagcagccccatttcttccctggccctgtcccttctgtgccccgaaatgtgtgggatggggcagtggttggtaaactgggtctcggtctcttcatgtgaaaaatggggctaggctgggtgcagtggctcacgcctataatcccagcactttgggaggctgaggtgggtgaatcacttgaggtcaggagttcgagaccagcctgaccaatatggtgaaaccccatctcaaaaaaaaaaaaaattggggctaacggtgagcctgttttgcaggattgctgtgtgcacaaaataaatgcatgggcatagggcccctggcactggctgggcgcagaggctgtgctgggtatgtggggctgcatccctgtccttgacagcggaggtccgggaggctggactgggggtggggtgaggttctgcccccatataccccggccagagcctggccagtgggtgctcctcccccaccccccagctacatccccatcaacactgtggggcttaacttctggggccttgtttccaaagcggaaatgccattctgggaggcacaggcttttgggggagggaatttaagtggaaaaggagcaaatttttgaaatgcctgtgtcggagcctgtttcccttgctgcctcctgctcacaccagcagccccacccccagtgctgttctaatgcagctactgggggaggagggtctcatcccccaaggttccagccatccacctcctctctgcaccgccctccttggccaactaggatggagcaggggccagctcccttgagggccaggccttttgtgtccttgcccgtccctgcagagactgctgcctggggccctgccagcagggcactgcctgcccatgaggcctggtctcccctccccacagaagtggaggcccagggatgacctcaggctcctgagggtcccgctggttcagacctgctctctgggaagctggtgtgccagccaggctgaggagtgggtggctggacagggtcagggtgcaggaggggcccggcacagctcttgggaacaagcaggaggagatgctccaggcagcttccctgaaggctggctcctcttctgaggcgaggcgggctgtgtcggggaggcacagggtgttggctagctgttctgttcctcctgaggactctgggtcatgctctgtctcatcccactgctccttcctcacccgctgtgctgtgagttctggccaatgcttcccaagccaaatattgaagaaatgcagacgtccagttttttgggaggggtgggacacaggagtctgttttttaactagctccccagagcacctgagcagcaaatcatgggctgtcctagccccttttcagatgagaaaggagcccagagaggggagagggcctgccaaggtggcacatctggccaggcgctgcgtaggctgagccctgggggtcagacagaggggcagctgcaggcccacctgggcttgtgtcttccataggccatgcttgagaattctctgctgcgtgaagccgggtctaccccgctgcttccctgccaccagggctgcctcgtggcatcccattgctcagccagtggcccaggattgttgactgagggtcctgtctggtctggaccaggctcggtcctatcatctccctgcagattgtgcctccctggcctggcccaggggctctggcaccctggttctgctgcatggggtgacagtcactgacctgcaaccgagcaaggggcaactcaggagagccaaggttgtctccactcggtttcccccgagtgattcttccttctatctccctcattcccccagtgccgctctcctaccccatgtcgctgaagcagatgagttggagcaggactcaggagggtactaggcccaggttttaggctgaacctaggaatgagtaatgagaggaggcagatcagctggaggaccagcccgagtccccagatgtcggcacaatgcaggggaaggtaggtgctgcccgtgaaaagcgctgggtcgagagctcgccagcctccctgcttgaggcttcatttcctggggtccttacacggtgggaccgtctacagtcggagctgtggtggtgatgattcgtctcctacaggctggggcacgccccctcccctttccctctagattcagatttgagtcccacggcccatggacacgcgatgaatgccctggggttggttagcgggaaagacaagtcgacttgaggccatgtctcggctctggaggaagaaggcaaaccgggcagccttcccagaagtggaggagtttgcgtaggccttcggtgcgttctcgcctgggtggaaggcggggacgtgcatttgttggagagcggtgtcctgcgccctaggctggaagcctggcctcgggcaggggcctggagcctcggggttggaggtggggggcggggcggggggcggcccctactgggcgggcttctgtctgcgcgcccgcgcccccgacaggcggcttatttgcatggagagcggcggcggccaatgggcgcgcgcggccgggcatgctgggatcgggctgggccggctgggccgtggcggcaggcggagagcggctggaccggctctgggtggccgaggcggcagctgcgcggcggcaccggggcggctgcggcgcgctcggagccccgagggcacgcggcccgggcagctcggtgtgcgcccccgcgagagccggggccccaggcccgccggacaccatgaaccacctggtgagggcgccaggtggggccgggccgcgtacgggcttggaggcggcagcgggctggaaggggttaagcgagcggcatttcctgccggacctgcggggcctgggaaccgccggccggggtccgcggccctgggatctccttctgccctggccgggaagccgggaggcaggaaccgcgggggctccggagcctgtgcgcctcgggtgcgttggcggggccgggcgcgggggccgccagccggtaggagggttcctgtgtcgggaaagtggctggcggggcccgcgctccccggccgacggccgcctgctgtgtcaccttgggcctctgcgccctgcctccgagcctcagtttcctcggctgcgaggaggggccgttgagcctctggcgggtggtccggctggtgtggcgtggggactgcccaccggctcccggagagggaggagctccgggggaccgaggccgggcgggcaagtgcgtggcgccagcggggaaggctgcgcagccggagcacccggctccagttaatgattcactccggccgccggcgcggggttccgggagcggagcgggagtgggggcgggcgcgccgcgggctttgcagccccgcacgccgagcgccggtggaagccgggtcctggccacaggagtcctagccgcacgcgagtgtcgcgggagggggccagggccgggttctgcagtgtggacatgaaggctttggagtccatggttgggggacccgcaagagctagagcagggtcggagctccctctcgagggtccgagaggctgatcgctggaccgaggtgagggagttgggaaagcggagatttgcctaggggtgcggggtgaggggcttacggcctggaagatgttggggtttcgagttccagatcggggacagcagctccttttctaccacaaggctcccgttccctcctgagagtccctggtttcctttcccacacccctcccggggcccgccgcagctttggtcaccttctcagaatgaccatgggttgatctcttctttgctagtgagatgtttcccatcgccctgggccgggacacgccccctcttgtgcccattcctttccctcggtggagagttgggtggtgggggctggccggcctgtgagagcaggtgtcggggtgcctggagaatcggggcccaggtacgggggtggcggggctgtggggaaaagagctttggggaggagctgctgacacttcctcctggcactgcttgcccgggagctgggtggaggcagggcagggcagggcagtcccaggttctgccaggaaagtcaccttgggctggggcaggaggcttggagcttctggccgttactgtttgtctgagcaggagggtgagcactgtgtactggtaccatggccccaggtctaggcgagggatggaaataaggacagtgccactagggcctcctgtctgtacaggaggggccctgagacagctcctcaaacccctttcccattatacggatggtgcagatggggacactgaggtacagagagacagtcagttgtcctcagaattggatccagaacctcgtcttctggcatggccccccagtgcagcaccacatgtggcctccgaattcccagtctgggattgggggagctctggtccttgggggaccaccatgctcttttggagttgtcaacttggtaggaaccctctggttccaacgctgtgcctttgcggccctctcctggcatctgctgtccctttaggaggtcctaccacccttttcttctgagcctggacaactccttcccttgcccccaggagcccacagccggctaaaccaactggtcagctagaaccaaccagcaggggaggtgcgctccaggggggcttctaagaggaggcagttttggagtcagaggtgaagtgtggggagtgggattgggtgatagggaagtttctccagcaaagacactgggcaagcctcttccttggcccccagataaagggctgcagggtggtctccgtgtaagagggtggggctctgccctctgtcaggcccttcctggccctccgagcacaggagaggccctggctccacctgtgtcttgcttccctgacttcctcccacctctacattctagcctggggcagaagtagggtggaggggtgggtctagcctccttgatgacacagttggggttggaggtgggggctacccctattctgggcctggtgctgtccctgaagtcaggggtcagcctcacaccgagctctctgccaaaaccccggatcacaagcatgagctccagcaggtccgcttgagtgaacaccgctgatcctgcctgcaggggtataggcctggggcctgccagccgtccgcactgtctgtggggtgttttgggttg

SEQ ID NO: 1408 - DNA, 6000 bp, Homo sapiens
ttttgtatttttagtagagacggggtttcaccatgttggtcaggctggtcttgaactcttgacctcagatgatctgcccgccttggcctcccaaagtgctgggattacaggcgtgagccactgtgcccagctgttttttgtttttttttttgagatggagccttgctctatcgcccaggctggagtacagtggcgtgatctcagctcactgcttcacctcctggttcaagcaattatcctgcctcagcctcctgagtagctgggattacaggtgcccgccaccacggccagctaatttttgtatttttagtagagacggagtttcgccatgttggacaggctagtctcgacctcctaaagtgctgagattacaggcgtgagccaccttgcccagccttgccttggttttgagcttgccactgtgagtgtccagcctagggggatggtgtcagctctcattggccctccagagataccgtttcttcctgttcctggggctggcagtgctcacctccggcctcaggaaatcctctcctgctgccgctcccagagctggccatcaaccgagtccaccctccctgctgctgggaggccgaggcttcaggaggggagggggctgtgtgcctttacactgtgcaaactggttttagcctgctcttttcactttagtttgttgtaagcattttcttgcattatttcagtctttggaagaggccatctaatagctgcaagctattctactgaggcgctgtggtttgtctcaccggtcccctagaattagcattgataggtgagcctgttttgctccatgctttgctgtcataaatgctgcagtggacattggtgagcattgagcaagaaaagttctgtgcagtgggtctgtcctgaaggcagatctcagaaagcccaaagagcaggaaccctatcccaggcttatctttccacttgggtccagtataaccccctccactccagacacttagtgtcctggtgtgctgggtccacctgttttctgtacaaacagctattccaggccctgaggggttggagacatcccttccagcctgtgagctcatcttcaacctggctggaggtgccaggccactcctgggatgacacaactgtctgggagggccctgtgctggtgccccggccacatatctgcagctgtctcccttggtctggcaacaacctctcccagctcctccttattcagggcgtctctccttgctgccagtcccactgtgtgtatacgcatgcgtgtgtgctgtgtgtatgcaagtgtgtgcctctgcacttaggcgtgacttaaccacccccatcctccagactggggcagcctcagatttcttcacccaggccagcctatcccatgagggccacctctgaggtcccacccagtcaacaaatgtttactgcaccccttctcaccaatggggctaaacttagtggggtgggggtggtgctggccccagtgctgagctcagttttactggggaggaaggtgcttaggtctcagttgcctgtccttttgcagtctgagtgtgacaggggtgtttggctttctgagcctggagtgctgctgtccctgtccctagattcccttcctgctgcagggtgggctgaggtctagcagccccatttcttccctggccctgtcccttctgtgccccgaaatgtgtgggatggggcagtggttggtaaactgggtctcggtctcttcatgtgaaaaatggggctaggctgggtgcagtggctcacgcctataatcccagcactttgggaggctgaggtgggtgaatcacttgaggtcaggagttcgagaccagcctgaccaatatggtgaaaccccatctcaaaaaaaaaaaaaattggggctaacggtgagcctgttttgcaggattgctgtgtgcacaaaataaatgcatgggcatagggcccctggcactggctgggcgcagaggctgtgctgggtatgtggggctgcatccctgtccttgacagcggaggtccgggaggctggactgggggtggggtgaggttctgcccccatataccccggccagagcctggccagtgggtgctcctcccccaccccccagctacatccccatcaacactgtggggcttaacttctggggccttgtttccaaagcggaaatgccattctgggaggcacaggcttttgggggagggaatttaagtggaaaaggagcaaatttttgaaatgcctgtgtcggagcctgtttcccttgctgcctcctgctcacaccagcagccccacccccagtgctgttctaatgcagctactgggggaggagggtctcatcccccaaggttccagccatccacctcctctctgcaccgccctccttggccaactaggatggagcaggggccagctcccttgagggccaggccttttgtgtccttgcccgtccctgcagagactgctgcctggggccctgccagcagggcactgcctgcccatgaggcctggtctcccctccccacagaagtggaggcccagggatgacctcaggctcctgagggtcccgctggttcagacctgctctctgggaagctggtgtgccagccaggctgaggagtgggtggctggacagggtcagggtgcaggaggggcccggcacagctcttgggaacaagcaggaggagatgctccaggcagcttccctgaaggctggctcctcttctgaggcgaggcgggctgtgtcggggaggcacagggtgttggctagctgttctgttcctcctgaggactctgggtcatgctctgtctcatcccactgctccttcctcacccgctgtgctgtgagttctggccaatgcttcccaagccaaatattgaagaaatgcagacgtccagttttttgggaggggtgggacacaggagtctgttttttaactagctccccagagcacctgagcagcaaatcatgggctgtcctagccccttttcagatgagaaaggagcccagagaggggagagggcctgccaaggtggcacatctggccaggcgctgcgtaggctgagccctgggggtcagacagaggggcagctgcaggcccacctgggcttgtgtcttccataggccatgcttgagaattctctgctgcgtgaagccgggtctaccccgctgcttccctgccaccagggctgcctcgtggcatcccattgctcagccagtggcccaggattgttgactgagggtcctgtctggtctggaccaggctcggtcctatcatctccctgcagattgtgcctccctggcctggcccaggggctctggcaccctggttctgctgcatggggtgacagtcactgacctgcaaccgagcaaggggcaactcaggagagccaaggttgtctccactcggtttcccccgagtgattcttccttctatctccctcattcccccagtgccgctctcctaccccatgtcgctgaagcagatgagttggagcaggactcaggagggtactaggcccaggttttaggctgaacctaggaatgagtaatgagaggaggcagatcagctggaggaccagcccgagtccccagatgtcggcacaatgcaggggaaggtaggtgctgcccgtgaaaagcgctgggtcgagagctcgccagcctccctgcttgaggcttcatttcctggggtccttacacggtgggaccgtctacagtcggagctgtggtggtgatgattcgtctcctacaggctggggcacgccccctcccctttccctctagattcagatttgagtcccacggcccatggacacgcgatgaatgccctggggttggttagcgggaaagacaagtcgacttgaggccatgtctcggctctggaggaagaaggcaaaccgggcagccttcccagaagtggaggagtttgcgtaggccttcggtgcgttctcgcctgggtggaaggcggggacgtgcatttgttggagagcggtgtcctgcgccctaggctggaagcctggcctcgggcaggggcctggagcctcggggttggaggtggggggcggggcggggggcggcccctactgggcgggcttctgtctgcgcgcccgcgcccccgacaggcggcttatttgcatggagagcggcggcggccaatgggcgcgcgcggccgggcatgctgggatcgggctgggccggctgggccgtggcggcaggcggagagcggctggaccggctctgggtggccgaggcggcagctgcgcggcggcaccggggcggctgcggcgcgctcggagccccgagggcacgcggcccgggcagctcggtgtgcgcccccgcgagagccggggccccaggcccgccggacaccatgaaccacctggtgagggcgccaggtggggccgggccgcgtacgggcttggaggcggcagcgggctggaaggggttaagcgagcggcatttcctgccggacctgcggggcctgggaaccgccggccggggtccgcggccctgggatctccttctgccctggccgggaagccgggaggcaggaaccgcgggggctccggagcctgtgcgcctcgggtgcgttggcggggccgggcgcgggggccgccagccggtaggagggttcctgtgtcgggaaagtggctggcggggcccgcgctccccggccgacggccgcctgctgtgtcaccttgggcctctgcgccctgcctccgagcctcagtttcctcggctgcgaggaggggccgttgagcctctggcgggtggtccggctggtgtggcgtggggactgcccaccggctcccggagagggaggagctccgggggaccgaggccgggcgggcaagtgcgtggcgccagcggggaaggctgcgcagccggagcacccggctccagttaatgattcactccggccgccggcgcggggttccgggagcggagcgggagtgggggcgggcgcgccgcgggctttgcagccccgcacgccgagcgccggtggaagccgggtcctggccacaggagtcctagccgcacgcgagtgtcgcgggagggggccagggccgggttctgcagtgtggacatgaaggctttggagtccatggttgggggacccgcaagagctagagcagggtcggagctccctctcgagggtccgagaggctgatcgctggaccgaggtgagggagttgggaaagcggagatttgcctaggggtgcggggtgaggggcttacggcctggaagatgttggggtttcgagttccagatcggggacagcagctccttttctaccacaaggctcccgttccctcctgagagtccctggtttcctttcccacacccctcccggggcccgccgcagctttggtcaccttctcagaatgaccatgggttgatctcttctttgctagtgagatgtttcccatcgccctgggccgggacacgccccctcttgtgcccattcctttccctcggtggagagttgggtggtgggggctggccggcctgtgagagcaggtgtcggggtgcctggagaatcggggcccaggtacgggggtggcggggctgtggggaaaagagctttggggaggagctgctgacacttcctcctggcactgcttgcccgggagctgggtggaggcagggcagggcagggcagtcccaggttctgccaggaaagtcaccttgggctggggcaggaggcttggagcttctggccgttactgtttgtctgagcaggagggtgagcactgtgtactggtaccatggccccaggtctaggcgagggatggaaataaggacagtgccactagggcctcctgtctgtacaggaggggccctgagacagctcctcaaacccctttcccattatacggatggtgcagatggggacactgaggtacagagagacagtcagttgtcctcagaattggatccagaacctcgtcttctggcatggccccccagtgcagcaccacatgtggcctccgaattcccagtctggga

SEQ ID NO: 1409 - DNA, 6000 bp, Homo sapiens
cccccccatccgtgctgtgtcccttacctggcagctctgcccacacaccttggatactgcccctgcccccgggtctctggggactggccttgggcatgccaaaggggatgaccactggagggatttggcttcaggctatagggcccgcccaccttcccacagtcagagccactactggtaatgacaaacactgccccgcagtggaggatgggaagccctttatggtaacagctccagcttgagtcctgagtgcatgctctgcggtctggggtcacctggggtgcttaccagtaggcacacgcctgggttatgaggtggaaggtgcgagctctgctggccatgggagctgcgtggggcattgcccctctctctgcctccaggtagccgtcgttccgtcctggtcccagggcagcagtgaggaatgactggtgttggggtgtgggctgtccgttctgtgtgtgacagtaggttcacctccgtgctatccacaaaggttccgtgccctcgcctgggttttgtttttgtttttttgagacgtagtttcgctctctcgcccaggctggagtgcaatggcaccatcttggctcactgcaacctccgcctcccgggttcaagtgattctccagcctcagcctcctgagtagctgggattacaggcatgtgccaccacgcccggctaattttgtatttttagtagagacggggtttcaccatgttggtcaggctggtcttgaactcttgacctcagatgatctgcccgccttggcctcccaaagtgctgggattacaggcgtgagccactgtgcccagctgttttttgtttttttttttgagatggagccttgctctatcgcccaggctggagtacagtggcgtgatctcagctcactgcttcacctcctggttcaagcaattatcctgcctcagcctcctgagtagctgggattacaggtgcccgccaccacggccagctaatttttgtatttttagtagagacggagtttcgccatgttggacaggctagtctcgacctcctaaagtgctgagattacaggcgtgagccaccttgcccagccttgccttggttttgagcttgccactgtgagtgtccagcctagggggatggtgtcagctctcattggccctccagagataccgtttcttcctgttcctggggctggcagtgctcacctccggcctcaggaaatcctctcctgctgccgctcccagagctggccatcaaccgagtccaccctccctgctgctgggaggccgaggcttcaggaggggagggggctgtgtgcctttacactgtgcaaactggttttagcctgctcttttcactttagtttgttgtaagcattttcttgcattatttcagtctttggaagaggccatctaatagctgcaagctattctactgaggcgctgtggtttgtctcaccggtcccctagaattagcattgataggtgagcctgttttgctccatgctttgctgtcataaatgctgcagtggacattggtgagcattgagcaagaaaagttctgtgcagtgggtctgtcctgaaggcagatctcagaaagcccaaagagcaggaaccctatcccaggcttatctttccacttgggtccagtataaccccctccactccagacacttagtgtcctggtgtgctgggtccacctgttttctgtacaaacagctattccaggccctgaggggttggagacatcccttccagcctgtgagctcatcttcaacctggctggaggtgccaggccactcctgggatgacacaactgtctgggagggccctgtgctggtgccccggccacatatctgcagctgtctcccttggtctggcaacaacctctcccagctcctccttattcagggcgtctctccttgctgccagtcccactgtgtgtatacgcatgcgtgtgtgctgtgtgtatgcaagtgtgtgcctctgcacttaggcgtgacttaaccacccccatcctccagactggggcagcctcagatttcttcacccaggccagcctatcccatgagggccacctctgaggtcccacccagtcaacaaatgtttactgcaccccttctcaccaatggggctaaacttagtggggtgggggtggtgctggccccagtgctgagctcagttttactggggaggaaggtgcttaggtctcagttgcctgtccttttgcagtctgagtgtgacaggggtgtttggctttctgagcctggagtgctgctgtccctgtccctagattcccttcctgctgcagggtgggctgaggtctagcagccccatttcttccctggccctgtcccttctgtgccccgaaatgtgtgggatggggcagtggttggtaaactgggtctcggtctcttcatgtgaaaaatggggctaggctgggtgcagtggctcacgcctataatcccagcactttgggaggctgaggtgggtgaatcacttgaggtcaggagttcgagaccagcctgaccaatatggtgaaaccccatctcaaaaaaaaaaaaaattggggctaacggtgagcctgttttgcaggattgctgtgtgcacaaaataaatgcatgggcatagggcccctggcactggctgggcgcagaggctgtgctgggtatgtggggctgcatccctgtccttgacagcggaggtccgggaggctggactgggggtggggtgaggttctgcccccatataccccggccagagcctggccagtgggtgctcctcccccaccccccagctacatccccatcaacactgtggggcttaacttctggggccttgtttccaaagcggaaatgccattctgggaggcacaggcttttgggggagggaatttaagtggaaaaggagcaaatttttgaaatgcctgtgtcggagcctgtttcccttgctgcctcctgctcacaccagcagccccacccccagtgctgttctaatgcagctactgggggaggagggtctcatcccccaaggttccagccatccacctcctctctgcaccgccctccttggccaactaggatggagcaggggccagctcccttgagggccaggccttttgtgtccttgcccgtccctgcagagactgctgcctggggccctgccagcagggcactgcctgcccatgaggcctggtctcccctccccacagaagtggaggcccagggatgacctcaggctcctgagggtcccgctggttcagacctgctctctgggaagctggtgtgccagccaggctgaggagtgggtggctggacagggtcagggtgcaggaggggcccggcacagctcttgggaacaagcaggaggagatgctccaggcagcttccctgaaggctggctcctcttctgaggcgaggcgggctgtgtcggggaggcacagggtgttggctagctgttctgttcctcctgaggactctgggtcatgctctgtctcatcccactgctccttcctcacccgctgtgctgtgagttctggccaatgcttcccaagccaaatattgaagaaatgcagacgtccagttttttgggaggggtgggacacaggagtctgttttttaactagctccccagagcacctgagcagcaaatcatgggctgtcctagccccttttcagatgagaaaggagcccagagaggggagagggcctgccaaggtggcacatctggccaggcgctgcgtaggctgagccctgggggtcagacagaggggcagctgcaggcccacctgggcttgtgtcttccataggccatgcttgagaattctctgctgcgtgaagccgggtctaccccgctgcttccctgccaccagggctgcctcgtggcatcccattgctcagccagtggcccaggattgttgactgagggtcctgtctggtctggaccaggctcggtcctatcatctccctgcagattgtgcctccctggcctggcccaggggctctggcaccctggttctgctgcatggggtgacagtcactgacctgcaaccgagcaaggggcaactcaggagagccaaggttgtctccactcggtttcccccgagtgattcttccttctatctccctcattcccccagtgccgctctcctaccccatgtcgctgaagcagatgagttggagcaggactcaggagggtactaggcccaggttttaggctgaacctaggaatgagtaatgagaggaggcagatcagctggaggaccagcccgagtccccagatgtcggcacaatgcaggggaaggtaggtgctgcccgtgaaaagcgctgggtcgagagctcgccagcctccctgcttgaggcttcatttcctggggtccttacacggtgggaccgtctacagtcggagctgtggtggtgatgattcgtctcctacaggctggggcacgccccctcccctttccctctagattcagatttgagtcccacggcccatggacacgcgatgaatgccctggggttggttagcgggaaagacaagtcgacttgaggccatgtctcggctctggaggaagaaggcaaaccgggcagccttcccagaagtggaggagtttgcgtaggccttcggtgcgttctcgcctgggtggaaggcggggacgtgcatttgttggagagcggtgtcctgcgccctaggctggaagcctggcctcgggcaggggcctggagcctcggggttggaggtggggggcggggcggggggcggcccctactgggcgggcttctgtctgcgcgcccgcgcccccgacaggcggcttatttgcatggagagcggcggcggccaatgggcgcgcgcggccgggcatgctgggatcgggctgggccggctgggccgtggcggcaggcggagagcggctggaccggctctgggtggccgaggcggcagctgcgcggcggcaccggggcggctgcggcgcgctcggagccccgagggcacgcggcccgggcagctcggtgtgcgcccccgcgagagccggggccccaggcccgccggacaccatgaaccacctggtgagggcgccaggtggggccgggccgcgtacgggcttggaggcggcagcgggctggaaggggttaagcgagcggcatttcctgccggacctgcggggcctgggaaccgccggccggggtccgcggccctgggatctccttctgccctggccgggaagccgggaggcaggaaccgcgggggctccggagcctgtgcgcctcgggtgcgttggcggggccgggcgcgggggccgccagccggtaggagggttcctgtgtcgggaaagtggctggcggggcccgcgctccccggccgacggccgcctgctgtgtcaccttgggcctctgcgccctgcctccgagcctcagtttcctcggctgcgaggaggggccgttgagcctctggcgggtggtccggctggtgtggcgtggggactgcccaccggctcccggagagggaggagctccgggggaccgaggccgggcgggcaagtgcgtggcgccagcggggaaggctgcgcagccggagcacccggctccagttaatgattcactccggccgccggcgcggggttccgggagcggagcgggagtgggggcgggcgcgccgcgggctttgcagccccgcacgccgagcgccggtggaagccgggtcctggccacaggagtcctagccgcacgcgagtgtcgcgggagggggccagggccgggttctgcagtgtggacatgaaggctttggagtccatggttgggggacccgcaagagctagagcagggtcggagctccctctcgagggtccgagaggctgatcgctggaccgaggtgagggagttgggaaagcggagatttgcctaggggtgcggggtgaggggcttacggcctggaagatgttggggtttcgagttccagatcggggacagcagctccttttctaccacaaggctcccgttccctcctgagagtccctgg

SEQ ID NO: 1410 - DNA, 6000 bp, Homo sapiens
cagaggttgcagtgagccaagctcgcaccactgcactccagcctgggtgacagactgaggctctgtctcaaaaaaataaaataaaataaaataaaataaaataaaataaaataaaataaaataaaaatccataagtccatactgatataaataaattattgaataaataaataaatgagggagaacaggcaatctctcatccagaagaattccaaatcatctccatagagtccaccctcaggaggtggagcataggaactccctcctccttggctgtggatggcacacagggacttccttccaggaagtaccctacagaaagcagggggaaaaagagtcgccttacagtggagaaccctgacaaacactccctcagccaggtggtcagggtgagcctcaacagtgatcatacttcatgttgtcagtatgcaccccaatatgatgggatgaaaatggcacttgacctctggggtcttcctccccaaaacccacaacccagtctaatcgtaagaaaaacgtcagacaaatcctaattgagggacatctataaatgttttatttcattctgtaaatgtttcccgcacacctcaaaactgtcaaggtcatcaaaaacaaagtctgagaaactgtcacagcccagaggaacccaaggagacggtggaatcttggttggaatcccagaacagaaaaaggacgttaggtaaaaactggagaaatctttggccaggcgcagtggctcacgcccgtaatcccagcactttgggaggctgaggcaggtggatcacttgaggtcagtagttcaagaccagcctgaccaacatggtgaaaccgcatctctactaaaaatacaagaaaaaaattggcccggtgcggtggcttacccctgtaatcccagcactttgggaggctgaggcaggcgtgtcatgaggtcaggagtttgagaccagcctaagcaacatgctgaaaccccatctctactaaaaatacaaaaaaaaaaaaaaaaaaaaaaaaattagccaggcatggtggcgcgcgcctgtaatcccagctactcaggaggctgaggcaggagaatcgcttgaacccgggaggcagaggttgcagtgagcagagatggagccactgcactccaccctgggaaacagagggagactccatctcaaaaaaaaaaaaattagctgggcatggtggcatacccctgaaatctcagctacttgggaggctgaggcaggagaatcgcttgaacccgggaggcagaggttgcagtgagccaagatcgtgccactgcggtccagcctgggcaagaagagcgaaagtctgtcaaaaaaagaaaaaaaagagaaatctgaatcaagtgtggacttcagttaacaaagatgtatcagtattggttcattactaatgccacatgttccatgctgagttgtttttttttttttttttttttttttttttgagatggagtctccttctgtcgcccaggctggagtgcagtggtgcgatcttggctcactgcaacctccgcctcccgagttcaagtgattctctggcctcagcctcccaaacagctgggattacaggtgtgcaccaccacgcccagctaatttttgtatttttagtagagatggagtttcaccaccatgttggtcgggctggtcttgaatgcctgacctcaggtgatctgcccaccttggcctcccaaagtgctgggattacaggcatgagccactgcgccccacctgacgggagattattactagtgccgggtaatcattgcactctcccagggcaggagctcctttgccagagaagtccctggtcacctgaaggggggtacagggagataaggagccacttcccagccctcagcccctctagacatggcaaggccctggggacagaggccagcttggatgtcaggagagctggttgtgaagcttgtctctgcacagatttactccatggccaggtccaaattcctttccctccagaggccagggacaaaaatagtcccggtgtgagggcctcgcttagctctcaaggaccctctcagggcgctggcacctgctctggcagcccagctgttgcttctggttggaactgccagccttgaagccccagaggctgttccctataggacggagtgagtcatcctgggatcatttgcctgccaggagtgggtgagggaggagcagccgccgccttcacagacacctggtagtgtcaggagagggcatgcactgccctggtgaggctcctctggctgcccccaggcccacacccaaggatccctgcctcagagtaagtgagggctctagccagggtcccctctctccctgctaagggctgagttactgatgccctaaataagcagcccctggggcggtaagaggcaggatgagatggattggagggtccagctccatctgcgcccctcccttgggctctcctttccctgtgcccaggcaggtagaagggatctttctccaccgcccgccccattctggctggggcacctagatatgggggagatgggaaaggagacaggaacagtgggccccaagcaggagcaagggagggaggtggggtctgggcgaggagcaaaggagagggccagggtggtggtgggtgggggcatcagagacagcagggcgtgtggccaggagcccgggcgccaggcagagctgctgctcccagctcaggagcccctgtgccagctggatgcgggcgggtgggcacgggcagggccacgtgccagacatgcacagagcgccctttgaggaggtggcagctgtcggtccaggccccccaccccccccccggcttgctgtggccctgcttggcccctccaacaatgccttgctgagcactgggctgcggacgctgatgtgcacagttgggaaccccactcaagaggtgaaggggcaaccatactctactggagcagggaaggacccctcatcactgccagaacagggacttgggtctctcgtgggaggcctggatttccctctttctctcatacctcataccccctcattgctgctggcctcttgggatcctcaccgggacactcctggagaaaagatcaaggctgcacgccccttggggaaaaaggctgaaaacccagtcggtgacctgctactgggggcttttgggagctgggggaagtcagcctgctgcctggctctgcttcctccatccagccaccgtggcctcctggcacagcatccctggcaggcagaagggcccgccccccacatgggcacccacacagagattccctaggcagctggagctttctgcccccaggtccccgccatgagcccgggctgcggcaaaccagcctcatggagctggctccgtctttcctccctggggtgggcagcgctgacctccgggacagtgctctggaccccagccccacttgctctagatgctcacccaccgtccccaggaagcagaacagaggggtcggacccctggtccttcctttgagtgggtgagggatctcagtgcctgggcctatgaaatgtaacggggcatcagcaaggcctgcctggcaggagtggagcgatggggacgaacatgcacgtgcccagtggctgcaggtgccatgtgtgggcaccatggtagatgcgaaacagctgaaattgggggtgtttagcctggggaaaggaagtctcaggcccacgaaggctcgtcttccagcctctgggaggacggtgggctgagggtgggcccaggagtgggggttacagggacacaggatcctccctagaagccaggtcagatgtcactgtcagggcgaccccaggatgagctagactgtttccggggtggggagctcctcttccctgggggtctcggggctcgctctcagctgggggagggcagaggggctccgggaggcctgctatgctgccccgcgatcaccttccgccggccgagccctcccggtctgcgcccggacacagggcctaggagcccggccagggccacagggcagtgtagtgttgggggaggggactggttgggcgacccagagctggtgcgactggaggtggcccgcgagggatcggcgaggagcggaggagaccgcgcctccccgccgcgttgggccgacagaaaaaggcctaggtccggggtcctcacctttaacgcgtccctggccgcggagacggtggggggggcggcgcgggcggcgcatgcgcggcgcggctggagcggccggacagtccggcgtccgggaacgctcaggagccggaggagccggaaagcgccgggacccctcgcggggcctctgagcggcgcgggcggacccgagcccccagcccgctggcgccgctgcccgccaggccccgggggcggcggccaagatgtccgtgcctgtgagtaccgcgccgcccgggaccccgggccggctgtcccccgcccggctgcgacctcgccccgcccgctgcgggcctgatgccgcgttggctcccggactgggggtcgcctcactggggcctcctcggccccgggggagagcgcaccggctgggggaggctcccccaagccggcctctctgcccccgcctttccatcctctttcaggagagctggatcgggctggggtccgtactgtcccctcggggagccccccaagatggctaggtcgggaagactctttgttggtccccgggaaacccctgggacagctgggccaggcaggagtctgttgcccgccaggaccccgcaccaggacggctaggcctagcggggaggggtctctgccgctcccgcgactcccctccgggactgctgggccggatgagggggtgggaggcctgtgctgtcccgcaagacctccctcggattgctgccctgcggcgctcccgggactcccccggggtggccaggttggggcgcggtctctgccagtcgccggagccacccctcccccaggacggcttggctggatgggagccgtgcctgccctccacggcggatgggctcactttcctgggaagttttcctctcgctgcggaacccccggggccctgactggccgcttcctccccgctggccgtagggagttttctgtccgacaccccctcttcctggccgggcagcctggcttcggcagacccccgggccatgtttccacacttgggcactggcatctctgagcatctcagtctcacctcctgagaacagcaagtgatcctggctaccccgggtaaccaggcctcaggtgcaggccccacatgacagatggacagactgaagtgggaggtgggaggcggacaccccggcgtcctgccaggaagggacaccatctgcacctggcgagctgtggcctccagccatcgtttccctgcctagttaggggcttttccctccagagccctgtccactctggccttgtttctggaactgctcctcacccggaggaccccatcctttccgtgaagcaggcagtgggggctttctggcaagtggcctcttcattaactatcccagagtgagtgcagatgaccagagggaagctggccaagtgcaaagcattgttattgtggaattaaagagcccgctcctgctcgcctccagaagtggtaatgtatttacagatgaaaaaatgagggcttccagactgtgctgatgtgagccccgccatccgttctggttcagagcataatcgtctcgtcttcagaaagaaggaagacagaacatgcctgccaagcccttcctctcttctgttctgctctcctggaaagttctggacttctctggcccagggcctcaggggactggccagccctgctcctgtgggcactgggcagagggacaaggcggaccacctgagcctgctggagggccggtatcccagggcagtagtgattagggaatgtcactctggccacatcccagcctgggcgggcctctatggggaggtccccgtttgatttggtttggttgtccacagtcagagccaagctctgggcatggagtctgg

SEQ ID NO: 1411 - DNA, 6000 bp, Homo sapiens
gggaggctgagacaggagaatggcgtgaacccgggaggcggagcttgcagtgagccgagatcgcgccactgcactccagcctgggcgacagagccagactctgtctcaaaaaaaaaaaaaaaaaaaaaaaaaaaaaaaaaaaaaattgcacaagtgcactggtgcagtggcacatgcctttaatcctagcactttgggaagcctgaggagggaggatcacttgagctcaggagtttgagaccagcctgggcaaaatggtgaaactccatctctaccaaaaaaagaaaaaaaaaatacaaaaactagcggagggtggtgatacacgcctgtagtttcagctacttgggaggctggggtgggaggatcacttgagcccaggaggtggaggctgcagtgagctgtgatggcaccactgtgctccagcttgggagacaagagttagaccctgtctcaaaaaaataaaaataggctgggcggggtgactcatgcctgtaatctcagcactttggaaggccgaggtgggtggatcacgaggtcaggagttcaagaccagcctggccaacatggtgaaaccccatctctactaaaaatacaaaaattacccgggcgtgatagcaggtgcctgtaatcccagctactcgggaggatgaggcaggagaatcacttgaacccaggtgtcagaggttgcagtgagccaagctcgcaccactgcactccagcctgggtgacagactgaggctctgtctcaaaaaaataaaataaaataaaataaaataaaataaaataaaataaaataaaataaaaatccataagtccatactgatataaataaattattgaataaataaataaatgagggagaacaggcaatctctcatccagaagaattccaaatcatctccatagagtccaccctcaggaggtggagcataggaactccctcctccttggctgtggatggcacacagggacttccttccaggaagtaccctacagaaagcagggggaaaaagagtcgccttacagtggagaaccctgacaaacactccctcagccaggtggtcagggtgagcctcaacagtgatcatacttcatgttgtcagtatgcaccccaatatgatgggatgaaaatggcacttgacctctggggtcttcctccccaaaacccacaacccagtctaatcgtaagaaaaacgtcagacaaatcctaattgagggacatctataaatgttttatttcattctgtaaatgtttcccgcacacctcaaaactgtcaaggtcatcaaaaacaaagtctgagaaactgtcacagcccagaggaacccaaggagacggtggaatcttggttggaatcccagaacagaaaaaggacgttaggtaaaaactggagaaatctttggccaggcgcagtggctcacgcccgtaatcccagcactttgggaggctgaggcaggtggatcacttgaggtcagtagttcaagaccagcctgaccaacatggtgaaaccgcatctctactaaaaatacaagaaaaaaattggcccggtgcggtggcttacccctgtaatcccagcactttgggaggctgaggcaggcgtgtcatgaggtcaggagtttgagaccagcctaagcaacatgctgaaaccccatctctactaaaaatacaaaaaaaaaaaaaaaaaaaaaaaaattagccaggcatggtggcgcgcgcctgtaatcccagctactcaggaggctgaggcaggagaatcgcttgaacccgggaggcagaggttgcagtgagcagagatggagccactgcactccaccctgggaaacagagggagactccatctcaaaaaaaaaaaaattagctgggcatggtggcatacccctgaaatctcagctacttgggaggctgaggcaggagaatcgcttgaacccgggaggcagaggttgcagtgagccaagatcgtgccactgcggtccagcctgggcaagaagagcgaaagtctgtcaaaaaaagaaaaaaaagagaaatctgaatcaagtgtggacttcagttaacaaagatgtatcagtattggttcattactaatgccacatgttccatgctgagttgtttttttttttttttttttttttttttttgagatggagtctccttctgtcgcccaggctggagtgcagtggtgcgatcttggctcactgcaacctccgcctcccgagttcaagtgattctctggcctcagcctcccaaacagctgggattacaggtgtgcaccaccacgcccagctaatttttgtatttttagtagagatggagtttcaccaccatgttggtcgggctggtcttgaatgcctgacctcaggtgatctgcccaccttggcctcccaaagtgctgggattacaggcatgagccactgcgccccacctgacgggagattattactagtgccgggtaatcattgcactctcccagggcaggagctcctttgccagagaagtccctggtcacctgaaggggggtacagggagataaggagccacttcccagccctcagcccctctagacatggcaaggccctggggacagaggccagcttggatgtcaggagagctggttgtgaagcttgtctctgcacagatttactccatggccaggtccaaattcctttccctccagaggccagggacaaaaatagtcccggtgtgagggcctcgcttagctctcaaggaccctctcagggcgctggcacctgctctggcagcccagctgttgcttctggttggaactgccagccttgaagccccagaggctgttccctataggacggagtgagtcatcctgggatcatttgcctgccaggagtgggtgagggaggagcagccgccgccttcacagacacctggtagtgtcaggagagggcatgcactgccctggtgaggctcctctggctgcccccaggcccacacccaaggatccctgcctcagagtaagtgagggctctagccagggtcccctctctccctgctaagggctgagttactgatgccctaaataagcagcccctggggcggtaagaggcaggatgagatggattggagggtccagctccatctgcgcccctcccttgggctctcctttccctgtgcccaggcaggtagaagggatctttctccaccgcccgccccattctggctggggcacctagatatgggggagatgggaaaggagacaggaacagtgggccccaagcaggagcaagggagggaggtggggtctgggcgaggagcaaaggagagggccagggtggtggtgggtgggggcatcagagacagcagggcgtgtggccaggagcccgggcgccaggcagagctgctgctcccagctcaggagcccctgtgccagctggatgcgggcgggtgggcacgggcagggccacgtgccagacatgcacagagcgccctttgaggaggtggcagctgtcggtccaggccccccaccccccccccggcttgctgtggccctgcttggcccctccaacaatgccttgctgagcactgggctgcggacgctgatgtgcacagttgggaaccccactcaagaggtgaaggggcaaccatactctactggagcagggaaggacccctcatcactgccagaacagggacttgggtctctcgtgggaggcctggatttccctctttctctcatacctcataccccctcattgctgctggcctcttgggatcctcaccgggacactcctggagaaaagatcaaggctgcacgccccttggggaaaaaggctgaaaacccagtcggtgacctgctactgggggcttttgggagctgggggaagtcagcctgctgcctggctctgcttcctccatccagccaccgtggcctcctggcacagcatccctggcaggcagaagggcccgccccccacatgggcacccacacagagattccctaggcagctggagctttctgcccccaggtccccgccatgagcccgggctgcggcaaaccagcctcatggagctggctccgtctttcctccctggggtgggcagcgctgacctccgggacagtgctctggaccccagccccacttgctctagatgctcacccaccgtccccaggaagcagaacagaggggtcggacccctggtccttcctttgagtgggtgagggatctcagtgcctgggcctatgaaatgtaacggggcatcagcaaggcctgcctggcaggagtggagcgatggggacgaacatgcacgtgcccagtggctgcaggtgccatgtgtgggcaccatggtagatgcgaaacagctgaaattgggggtgtttagcctggggaaaggaagtctcaggcccacgaaggctcgtcttccagcctctgggaggacggtgggctgagggtgggcccaggagtgggggttacagggacacaggatcctccctagaagccaggtcagatgtcactgtcagggcgaccccaggatgagctagactgtttccggggtggggagctcctcttccctgggggtctcggggctcgctctcagctgggggagggcagaggggctccgggaggcctgctatgctgccccgcgatcaccttccgccggccgagccctcccggtctgcgcccggacacagggcctaggagcccggccagggccacagggcagtgtagtgttgggggaggggactggttgggcgacccagagctggtgcgactggaggtggcccgcgagggatcggcgaggagcggaggagaccgcgcctccccgccgcgttgggccgacagaaaaaggcctaggtccggggtcctcacctttaacgcgtccctggccgcggagacggtggggggggcggcgcgggcggcgcatgcgcggcgcggctggagcggccggacagtccggcgtccgggaacgctcaggagccggaggagccggaaagcgccgggacccctcgcggggcctctgagcggcgcgggcggacccgagcccccagcccgctggcgccgctgcccgccaggccccgggggcggcggccaagatgtccgtgcctgtgagtaccgcgccgcccgggaccccgggccggctgtcccccgcccggctgcgacctcgccccgcccgctgcgggcctgatgccgcgttggctcccggactgggggtcgcctcactggggcctcctcggccccgggggagagcgcaccggctgggggaggctcccccaagccggcctctctgcccccgcctttccatcctctttcaggagagctggatcgggctggggtccgtactgtcccctcggggagccccccaagatggctaggtcgggaagactctttgttggtccccgggaaacccctgggacagctgggccaggcaggagtctgttgcccgccaggaccccgcaccaggacggctaggcctagcggggaggggtctctgccgctcccgcgactcccctccgggactgctgggccggatgagggggtgggaggcctgtgctgtcccgcaagacctccctcggattgctgccctgcggcgctcccgggactcccccggggtggccaggttggggcgcggtctctgccagtcgccggagccacccctcccccaggacggcttggctggatgggagccgtgcctgccctccacggcggatgggctcactttcctgggaagttttcctctcgctgcggaacccccggggccctgactggccgcttcctccccgctggccgtagggagttttctgtccgacaccccctcttcctggccgggcagcctggcttcggcagacccccgggccatgtttccacacttgggcactggcatctctgagcatctcagtctcacctcctgagaacagcaagtgatcctggctaccccgggtaaccaggcctcaggtgcaggccccacatgacagatggacagactgaagtgggaggtgggaggcggacaccccggcgtcctgccaggaagggacacca

SEQ ID NO: 1412 - DNA, 6000 bp, Homo sapiens
ccttcctccctccctctctccctccctctctctctctcttcctctctccctctctctttctctctttctttctttccttctttcttaccgagtctcgctttgtcacccaggctggagtgcatggtgcgatctcggctcactgcaacctccgcctcctgggttcaagctatcctcgtgcctcagcctcccaagtagctgggattacaggtgcacagcaccacacctggccaatttttgtatttttagtagagacggggtttcgccatgttggccaagctggtcttgaactcctgacctcaggtgatctgcccatctcagcctcccaaagtgttgggattacaggcacgagcccaccacgcctggcttcactgctttatggatcctgttttacacatggagaggaaacatgcttagagactatgaagatcatgctgaagctcacacggcaggaccagaacccaggtcagccccaccccgccctgccctgccactggaggtcaatggcgacaggagcctgggttcttgccaaactgcagacctcactccccacagtgagttccttcctgttttcacaaggatcggtctcactctcgggtaacagcgagattttcctagtgccccccaccccccactccaaccctgggcggacccttggcctcaggcaacatcacagggcagctgccgggggtgcctggcattcaagccttgctgagaacatgaaactgctgctctggggactcgcactggtgaccccaatgtggcagccgctctttcggctcttcaataatttagagaatgcatacaattcagcgggcagtttcatctctgggttcagaaacacaatgccctggggattgcttccagcgaagagtgaaattccacttgtcacagtgacagaggatgtgagcctgttcctggaaggggctctggtctctgggtgtttgcgaacatcctagaagacaggaggccggcagccagcgtcctgggagctggagggtctgccccagctcagctgtccaaagatgggccttcatgcaaaatccctttccccctgcctcttgcttgtggggaagagagaggtgactgcacagactgttgtgtgtggctccacatttgcatttgatgcctagctgcacccctgaccctggcctccccccatgtcagctcctgggaaagacccttgcaccaggccccagagggtccatgggaactttctaggacacttgcagttcctaaaacttggcaattgcatttttcccttaaaaaaaaaaattattctttgccggcttggtggcttatagtcccagcactttggaaggccgtggcaggaggattgcttgagcccaggagtttgagatcagcctgggcaacatagtgagaccctgcctctacaaaaaataaaaaacaaaattagccaggggtgtgtgcctgggatcccagctacttgggaggctgaggtgggaggattgcttgagctcatcggagttgaggttgcagtgtgctatgacaccactgccttccaacctgggtgacagagtgagaccatgtctccaaaaagaacaaaaaaacaaaaattgttctttaaaaaaattacacttgaaaacatgatgttaagttaaattagccagacacaaaaagacaaataatatatgattgcacttatccaaggtacagagaataagcaaatttatagagacagaagtagaatggggtttaccaggaactgaggggcctggaagcagagagttatcatttaatgactacagcatttctgtttaagagatgaaaatgtctggaaatggacagtgatggttgcacaacattgtgaatgtacttaatgccatggaattgtacacttaaaaatggtgaaaatggtaaattctgtgttatgtatattttatcacaattttaaaagtatgtttactgtaaaaacaaaaaactgggcggggcgcggtggctcatgcctgtaatcccagcactttgggaggccgagacgggcggatcatgaggtcaggagattgaggccatcctggctaacaaggtgaaaccccgtctctactaaaaacacaaaaaattagccaggagtggtggcaggcgcctgtagtcccagttactcgggaggctgagacaggagaatggcgtgaacccgggaggcggagcttgcagtgagccgagatcgcgccactgcactccagcctgggcgacagagccagactctgtctcaaaaaaaaaaaaaaaaaaaaaaaaaaaaaaaaaaaaaattgcacaagtgcactggtgcagtggcacatgcctttaatcctagcactttgggaagcctgaggagggaggatcacttgagctcaggagtttgagaccagcctgggcaaaatggtgaaactccatctctaccaaaaaaagaaaaaaaaaatacaaaaactagcggagggtggtgatacacgcctgtagtttcagctacttgggaggctggggtgggaggatcacttgagcccaggaggtggaggctgcagtgagctgtgatggcaccactgtgctccagcttgggagacaagagttagaccctgtctcaaaaaaataaaaataggctgggcggggtgactcatgcctgtaatctcagcactttggaaggccgaggtgggtggatcacgaggtcaggagttcaagaccagcctggccaacatggtgaaaccccatctctactaaaaatacaaaaattacccgggcgtgatagcaggtgcctgtaatcccagctactcgggaggatgaggcaggagaatcacttgaacccaggtgtcagaggttgcagtgagccaagctcgcaccactgcactccagcctgggtgacagactgaggctctgtctcaaaaaaataaaataaaataaaataaaataaaataaaataaaataaaataaaataaaaatccataagtccatactgatataaataaattattgaataaataaataaatgagggagaacaggcaatctctcatccagaagaattccaaatcatctccatagagtccaccctcaggaggtggagcataggaactccctcctccttggctgtggatggcacacagggacttccttccaggaagtaccctacagaaagcagggggaaaaagagtcgccttacagtggagaaccctgacaaacactccctcagccaggtggtcagggtgagcctcaacagtgatcatacttcatgttgtcagtatgcaccccaatatgatgggatgaaaatggcacttgacctctggggtcttcctccccaaaacccacaacccagtctaatcgtaagaaaaacgtcagacaaatcctaattgagggacatctataaatgttttatttcattctgtaaatgtttcccgcacacctcaaaactgtcaaggtcatcaaaaacaaagtctgagaaactgtcacagcccagaggaacccaaggagacggtggaatcttggttggaatcccagaacagaaaaaggacgttaggtaaaaactggagaaatctttggccaggcgcagtggctcacgcccgtaatcccagcactttgggaggctgaggcaggtggatcacttgaggtcagtagttcaagaccagcctgaccaacatggtgaaaccgcatctctactaaaaatacaagaaaaaaattggcccggtgcggtggcttacccctgtaatcccagcactttgggaggctgaggcaggcgtgtcatgaggtcaggagtttgagaccagcctaagcaacatgctgaaaccccatctctactaaaaatacaaaaaaaaaaaaaaaaaaaaaaaaattagccaggcatggtggcgcgcgcctgtaatcccagctactcaggaggctgaggcaggagaatcgcttgaacccgggaggcagaggttgcagtgagcagagatggagccactgcactccaccctgggaaacagagggagactccatctcaaaaaaaaaaaaattagctgggcatggtggcatacccctgaaatctcagctacttgggaggctgaggcaggagaatcgcttgaacccgggaggcagaggttgcagtgagccaagatcgtgccactgcggtccagcctgggcaagaagagcgaaagtctgtcaaaaaaagaaaaaaaagagaaatctgaatcaagtgtggacttcagttaacaaagatgtatcagtattggttcattactaatgccacatgttccatgctgagttgtttttttttttttttttttttttttttttgagatggagtctccttctgtcgcccaggctggagtgcagtggtgcgatcttggctcactgcaacctccgcctcccgagttcaagtgattctctggcctcagcctcccaaacagctgggattacaggtgtgcaccaccacgcccagctaatttttgtatttttagtagagatggagtttcaccaccatgttggtcgggctggtcttgaatgcctgacctcaggtgatctgcccaccttggcctcccaaagtgctgggattacaggcatgagccactgcgccccacctgacgggagattattactagtgccgggtaatcattgcactctcccagggcaggagctcctttgccagagaagtccctggtcacctgaaggggggtacagggagataaggagccacttcccagccctcagcccctctagacatggcaaggccctggggacagaggccagcttggatgtcaggagagctggttgtgaagcttgtctctgcacagatttactccatggccaggtccaaattcctttccctccagaggccagggacaaaaatagtcccggtgtgagggcctcgcttagctctcaaggaccctctcagggcgctggcacctgctctggcagcccagctgttgcttctggttggaactgccagccttgaagccccagaggctgttccctataggacggagtgagtcatcctgggatcatttgcctgccaggagtgggtgagggaggagcagccgccgccttcacagacacctggtagtgtcaggagagggcatgcactgccctggtgaggctcctctggctgcccccaggcccacacccaaggatccctgcctcagagtaagtgagggctctagccagggtcccctctctccctgctaagggctgagttactgatgccctaaataagcagcccctggggcggtaagaggcaggatgagatggattggagggtccagctccatctgcgcccctcccttgggctctcctttccctgtgcccaggcaggtagaagggatctttctccaccgcccgccccattctggctggggcacctagatatgggggagatgggaaaggagacaggaacagtgggccccaagcaggagcaagggagggaggtggggtctgggcgaggagcaaaggagagggccagggtggtggtgggtgggggcatcagagacagcagggcgtgtggccaggagcccgggcgccaggcagagctgctgctcccagctcaggagcccctgtgccagctggatgcgggcgggtgggcacgggcagggccacgtgccagacatgcacagagcgccctttgaggaggtggcagctgtcggtccaggccccccaccccccccccggcttgctgtggccctgcttggcccctccaacaatgccttgctgagcactgggctgcggacgctgatgtgcacagttgggaaccccactcaagaggtgaaggggcaaccatactctactggagcagggaaggacccctcatcactgccagaacagggacttgggtctctcgtgggaggcctggatttccctctttctctcatacctcataccccctcattgctgctggcctcttgggatcctcaccgggacactcctggagaaaagatcaaggctgcacgccccttggggaaaaaggctgaaaacccagtcggtgacctgctactgggggcttttgggagctgggggaagtcagcctgctgcctggctctgcttcctccatccag

SEQ ID NO: 1413 - DNA, 6000 bp, Homo sapiens
ttaaaaatgtagtagattgggcatagtggctcacacctgtaatcccagcactttgagaggccaaagtgggatgattgaggccaggagttcgagaccagcctgggcaaaatagcaagatccctgtctgtacaaagacgttttttaaattatctgggtttggtgacatatgtctatagtcccagctacttggacttaaatctagcaccaagcaaggtggaaaagacagtagtctgggcatcaaaagcactgagtactaaccccaagtctcctgctataaacttgggcaggtttcttaaccttttggagtttagttgactgatctataaaataaggaggttggactaaacatcccttcagctcttcttttgtgccctcataatatgtggttacagtttgcctgtatgttgatctgtcctccactagatttttgttttgaagccgaaaattaagctttgtatatttttatatccccattctgagcacagtgtctggtagagagtaagttctcagtaatctctgttgaatgaatgcaatgaatgaatgactctgaattcctttccaaagctaaaattctattctgtgaaacagctgggtacctggggatgattttaaagatctccgggaaagatcttctaccatccttcacaaacagttggtaagccctgtcagcctttccacttggcaagttactctcccagctcctttccagtacctcttttaaacaaacagcaggatcccgggcattgctgagggtggtcagatagaacagtgctcttgctacaaaataaatcggttggacaaatccaagtcaatgctggtggacatggaacaaagtaaacaagttaccataatatctctgtgacagactcaacaggatgaagtttattgtttagttacaatgacatttttgttaaaattacatttcttttgctaaagagaagcagaataagttctagaaaattatcattataaactttgaacctagaaaagaaaaagatgacttgtcattttacattctgtgtctcttttacttttctgagtttcttaatcaaggtcttggttggtgtctggtgttatgataggtcttggtttggcatggtgggaagggagttgataattgctgattgatggataactgaacaaaatatgcaagaaagataagcttggaaaataagtgtctctttcaccagtatgagctgcactcagccactctctcttatggcatggaagctggctggtgagagcaaagtccacactccttgaacagtattagtctttacatcaaatttatggtagtaaggtcaacaaagtcatgtgatgttcaggaggaggtggttgcaatgtcattgtgacattggaaacatcttggtaataacattccagaatgcctcagcgtaacatttgggatgtaatctgggtgagcaagtgcatggtgcatttctttgaactttgacttgcaacaggtgggtgaggagtctcttgactcaatgaagtactgttgtctggagagtggtctgttaaagcagactttctggcagtaccttgccctatggcttaggataaagaacaaagaaaccagtggttctgttggtctggaactggattggttttttttttttttttttttttttttgagatggagtctcactctgtcacccaggctggagtgcagtggcatgatcttggctcactgcaagctccgcctcctgggttcacgccattctcctgcctcagcctcccaagtaactgggactacaggcgcctgccaccacgcccggctaattttttgtatttttagtagagacggggtttcaccgtgttaggcaggatggtctcgatctcctgaccttgtgatccgcccgcctcggcttcccaaagtgctgggattacaggcatgagccacagcgcccggttggattggttcttgatgaaaacaaatctccaagggaattctgacttccccattctacagttttccaatatacacagctgccagatgcctggagagccagtgctgatttgtcccctgctagccatagttctcggaggtgcgtggctgaagtaggcttttctgtgttctttctcagaatagggtcagcgccccctgcccagagactgattctctcccgcctcggcttcctgaaagcctggttcatgtacctttgtggcagagaaagcggcaaggtcacagtaaatctgcctttctgaaagctgtgctgaaatgacaccaggattaggacactgaaacccctctcagggtgggagagtgagtgggagggctcagaaccctgagggagcccacaaacaggttctaggaagaagctgctggtctcctggttatcatgagccccctgtgtgttctggctgctgctatcagtgtgtcattcactttgatttagcctcaaataaaagacagattattttgctttagagactatcacattaggacatcttacaccttgttaatgacccagtgaaaggagagttggaagccttccccaaaagcataatagcacaggtgacattttactgatgtttaatggtgagcaaggcaaaggggtattatggtttttttccttttctggaaacctcactgctgtgcatcaaaaaatcaagtttctcatagacttctcaaagtaattcgtcaataagatggcctcacccaggaataccactggagctgtaggctgaaggggagaggtggcgtacatagcttgtggtgctgcccaaattaaatggggaaccttgggctgttgagagctgatgggagaataaaagtgaattgttccccttaaaatctccagtgtagaagcgctctaaagaatacttagttctgcgaatatctgattctcttccatgaattggttctgtaatccaggtgacgttgttgacttaattgagtgctcactgttcacagaactctatcaatgggtagagaggtttggagacacaggaacttaaatagccacagaaagataaagattacacgaggaaaataatttttctcctaaaatccttagttagagtcccctcaaagcagaacataagacaaggattttgagtgcagggagtttatttgggaagtgatcccaggaagcaggtgtgagtggtggaaagaatgagacaaggaaggaggaaaagtcaatataagagtacaattccaaggccacgagggcttgatgccaccagaacttctgagaagcattccacctcctatagctaccttgtgagggtaggaggctggccgtttaaccaccagcttttgtgttccttcaggctagccccaatggcttgagctccaccacctgtccaggcagtacttgtggcatgcaggcaggctcagaggagaccctgcagccagaaatggaaagtcctcatgcgtatgcttttggtggggtgttgtcaacagtgagtctgcacttgcccagaaccatctagtgcagctgcagctgaaataagagttcacaagcatctaaagaaaagatcagtgttcccatatgaaaagaactggtatgatagaaataccaccagggacacctaatctagaggttagggaaggcttcctggaggaagtggttttaaagctgagataaggcttaatatggtggcttgtgcctataatcccagtacttcgggaggccaaggcaggaggattgcttgagtccaagagtttgataccagccttgggcaacatagcaagaccctgtctctacaaaacataaaaaagatagttgaacgtggtggcacacacctgtagtctctgcacctcaggagactgaggtgggaggatcacttgacccagggaggttgaggctgtagtaagctgtggtttcactggtgtactctagcctgggtaacagagtgagaacctgtctctaaaaaagtaaatacataaaaatttattttaattattatgttttaaaaaggggtcagtgggcctgggcgcagtggctcacacctgtaatcccagcactttggggggccgaggtgggcagatcacccgaggtcaggagtttgagaccagcctgcccaacatggcaaaaccccgtctctactaaaaatacaaaaaattagccaggtgtggtggcaggcgcctgtaatcccagctacttgggaggctgagacaggagaatcgcttgaacccgggaggcggaggttgcagtgagccgagatcacgcatctgcactccagcctgggcaacaagagagaaactccgtctcaaaaaataaaaataaataaaaataaaaaggggtcagtgaagagacatttaagcagaaagacatgctaagctttgtgttttggaaaattcagtctaattacagcatgtcactagataccaggatagggccactgagtgaggatggggaaaaacaggtcagggagaccagtaaagaggctgttcaattatccaggtgatataagaatgagaattcgggcagtagcagtaaggaagatgagaaggaaaaagatttgagacacagtaagtttccatatccccactcatgctccgttcctggtaaaatggtgaaaaagaaagtgtgtgtgtgtgcgtgtgtgtgtgtgtgtgtgtgtgtgatcacgcgcacatatgacattgtaggggttgagttgtctggaaaacagtgcttagaagatatgaattgaaagctcataaagagctatttggagttctcttaagcaaactgggaagtaaagtaactaatgagaaaatctctcaagtcacttctcatctggaggcgagatagcacagtgcaccaccctgagagttgggagagatcttcctttgtcccggatctgcattgtctattgttttgacccttgttttatcatttaacctctctgaactttgtttatttgtccaacttaatacaaggatgatgaagcttgcccagcccattctgagttgatcttaagctcagcatgtactggggtgtgacccaaacagggaagttgacatcctctctactaaagttaatagaatgagaatgttcagggtcattgttcagtcccagcagtctggtgttcagtgtggacgttggcctgttggctcacaccaggcagagggggtgagtagtcgttcacgctgctttgcggcagggacgtggggtttcagaatgggttagggtgatactaggttatttcaaagatgatcccttccaactctgagactgggtcctgtgtcacaggccttagtgagagttagatgagatcatggctacaaaagcacttggagaacaaacattctagacaagtaaaggtattattatcagtagaccatgtgacattagctcatagtttttaaatgtttaactttcttgcatatccccgtgaggcggaaaataacttccaagttcctacatgctggtagatgatttcgtttcatttcataaagagaccaaacctttcctcataccatcttaactgcattttgcttttcttattttatttcatatgtttaacaatgactggaaacatttgacctgccaagacttgaatttgggcatctggggtttctcccactgtccatgatagcatcaccagcaagtggagcacaggctgtacattccccgtgtgagctttcggagtgaggaatgttctccacctcctggaaaaaacagggcccaactcacaggagttaaaaggaaactgattttagaaccctcttacagtactgtgacttttcactcatcagtgttgggaactggttctctttctcttaaaagaaccccctggggctttaagcttaaacgatgacagtgactcagagtggctcatgcttattgcaccttgacgctgtgccaagtgctgttttagccctttacgtgtaagatacaccacagcctgtgagtaagcatttgctttgtagattaggaaaccaaggaacatgcagtaaataactggcctagagtcacacagttaagctggaagttggaccttggcatgtgactccaaagccctgcctgaagcgctgctcctcccctccttgcaagcagagacctg

SEQ ID NO: 1414 - DNA, 6000 bp, Homo sapiens
accattgtgggaagagaagaaaagttcctcaggggcctcccactgctaaagttttttgtgagatgttgatctgtgcttcctggatttgacttttaaaggaattattctggcagcacatgtagtattcttggatgatcttgctgctcttatttctccttttgtgtgtgtgtgtgtgtgtgtgtggctatgggttttcatttgtaactccatctgcttaggagagtgggctctctataagggaacctgctgtaaacttcattgcagcaaggatgtagagagaaataggacttaattccactaggggctctcatctcacaccttaaggaggagatttctagaaaaactgggccagattttctttgttctccatcattttaatgtggcaggctgttcagttttcttactcttacctatgtgatatttcttcgtaacgtgtccaaaaagaaaaaagacccaatcagtgtctcttgactttgttctttgatccctcagtttcttcttgatttcagcatgtgtcgggttcctaattttgggtatgagttagcaaatttaaccattgtgtttgtgccctacccaggggactccccagtttctgacttgaagtagactgagaagaatccacgaggtgctatctggccagatttaagtagattctatttccttggttctccctctccctgaggacctcttattttattgtcccctcttctaggttaattctcctttgatttgactttgttgagaaggaggttggacagtagattagcaaagttccaagtgcaaaattacagtgtgttagagtgtggggggaaaattagtcttatttttccctacatgggatacaacactgtgaattcaatcttcaactgaaggccctgcagttctcctaaaacatagttgtttgtttttctttaacaaagtttaagctagtgttaataaattaaaaaaaattgcttgtctgtctacttcagctttgttttatgcccatttcatattgttgtctgtgttgtaattcataacttttgataccatttctgatgtgtaaaattggttgtcttgtaaatatcttataaagagttcaattgtaaataaactattgtggctgttaatttttgaacttctgcttcaatttattatatttattggcaaacaaacaattctgcttgtatatttgaaacattggaaaaagaaatccattttctcaataaaaaagaataacacattattttcccctttataataaggtactcacttccatttgtgtataagtataatgtatgtttcatccctctttgtccagtgtacttccttaagtataatcagcaacttggctgggcgcagtggctcacacctgtgatcccagcactttggtggctgaggtgggcagatcacttgtggtcagaggttcaagaccagcctggccaacacagtaaaacatggtaaaaccccatctactaaaaatacaaaaattatccagatgtggtggcatgcacctgttatcccagttacttgggaggctgaggcaggaaaatctcttgaacctgggaagtggaagttgtggtaagccaagatcaagctgctgcacttcagcctgggtgacagcgagactccatcccacccacccccaacaaaaaaaaagggtcgggcgtgttggctcacatttgtaatcccagccactttgggagactgaggtgggtagatcacctgaggtcagaagttcgaaaccagcttggccaacacggtgaaaccctgtctctactaaaaataaaataaattagccaggcttggtgacaggcacctgtaatcccagctactcgggaggctgaggcaggagaattgcttgaacccaggaggcagaggttgcagtgagccgagatcatgccattgcactccagcctgggtgatagagggagactccaactccaaaaaaaaaaaagtataattagcaattttagaaacgagattataggatacttcgtaagttaacaaaatcttatagctggaaagacattagaggtcatctagtgtgaccccgatatgtgatttacccttgataacactccagacaagcaaattccaggctgtgcttcaacactttttctacatacatttttccccctaagtgtttgaaaattcttgcttgttgacaaaaaatctaacttcttgtaacttaaactcactggtttttgctttgccttctaggatgatgaaaaaaagaccaatccctcctttcttcatagtccctagttaaagattgctgtgggctccaggcccggcgcggtggctcaggcctgtaatcccagcactttgggaggccaaggcgggtggatcacgaggtcaggagttcaagagcagcctgaccaacatggtgaaaccccgtctctactaaaaatacaaaaattagctgggcgtggtggtgcgcgcctgtaatcccagctacacaggaggctgaggcaggagaatcgcttgaacctgaaaggcggaggttgcagtgagcccagatcgcaccactccactccagcctgggcgacagagcgagactccgtccccctcaaaaaaaaaaaaaaaaactggacccagactaaacaactgaaggacaaagtggcagactatcactttccttatttagacactaaacttggcagccttatttgcaccaatttagtctgtgatcgataagatcctccaggttctttttctttaacacttattaaatcatattatcctccattttgaactcaggcagttggcttttggagctggacttataagttgtcacgtttggccacttgtctaattagctgagattgtttgaattttctttttttcttttttttgaaacagaatctctttgtctcccaggctggagtgcagtggcgcgatctcggctcactgcaagctccgcctaccgggttcacgccattctgcctcagcctcccgaatagctgggactacaggcgcctgccaccacgcccgtctatttttttttatttttagtagagacggggtttcaccgtgttagccaggatggtcttgatctcctgacctcgtgatctgcccgcctcggcctcccaaagtgctaggattacaggcgtgagccaccgcgcccggccttgaattttcctttcatctctgaaggcattcataattacttccagtttcatgttatctataaatttgataaacatcaggatccttaaccatgtcatttataaaaattttactcaggaaaggccgggcgcggtggctcacgcctgtaatcccagcactttgggaggccaagaacggcggatcacgaggtcaggagatcgagaccatcctggctaacacggtgaaacctcatctctactaaaaacataaaaagttagtcgggcctggcggcagacacctgtagtcccagctactcgggaggctgaggcaggagaatggcgtgaacccgggagacggagctttcagtgggccgagatcaccccactgcaccccagcctgggcgacagacagagtgagactccctctcaaaaaaaaaaaaaatattttactcagggaagaattctatgccatggtggcctttgtttgataacatacattattaacgtgcactcctgtaggtgcactaaaaacttagctcatgcactttgtatatccttataatggtccaaagaaaacacactgattcttttcaatggtggccaatgccttgccaaaatgaaataatttccataaaccttaagaaggaaataatgtcaggattttgaatcaacatctgtttctactgaccatttatttttaaataggttctaaaatcctgacaagggcagtagctcatgcctgtagtcccagcactttgggaggctgagacgaaaggatcgcttgatcccagccaggagacaagcctgggcaagagcgagaccccatctctacaaaaaacagaaaaattagccgggtgtggtagtgtgtgcccgttgtcccaactactaaggaagctaaggcaaggaggtcacctgtgcctgggaggtcaaggctgcagtgagccgcgctactgcactccagcctgggcaacagagtgagaccctgcctcgaaaaagccaaaacaaaaccggtaatactggcatcataccagcctgcactttgggacaggtgatggctggggtgggaagaaacgtgaagaggaaatgagaacacagagaaaacgctgcaacaagaagtcctctggcttcactgcagacaactggtttctccttcgcccgttatcttaaacaaggctggtgcagcaaatctgacgcagcactacagcttttaagatttaccttgattcgtgattttaccaagcaaaggaatgcagtaaattgacctgcttcaaacgtaggtagaagtgagaaatggaaacagaaaaccatgaaacagccctagtgttgcagtgaagctgtgacaggttgactccttccactcgggaagcccaagatggccgggccaggaacccgggaggctgctgaagtctcaattcccctcgccctaggcctgcccaagggaagtcaggagccgcgccacgcccccttacatcaccgatagacgtaatccgggtcggccgcaaacgtgccgcaggcctaggccccgcccagtgccccgcccctcccccaacacacacacacacacacacacacacacacaccccaacacacacacacacaccccaacacacacacacacacacacacacacacacacacacacacacacacacacacacacagcgggatggccgagcgccgcacgcgtagcacgccgggactagctatccagcctcccagcagcctctgcgacgggcgcggtgcgtaagtacctcgccggtggtggccgttctccgtaagatggcggaccggcggcggcagcgcgcttcgcaagacaccgaggacgaggaatctggtgcttcgggctccgacagcggcggctccccgttgcggggaggcgggagctgcagcggtagcgccggaggcggcggcagcggctctctgccttcacagcgcggaggccgaaccggggcccttcatctgcggcgggtggagagcgggggcgccaagagtgctgaggagtcggagtgtgtgagtgcgcgcaggcggggcggggtggggaccgggcggcgagccggccgggggcggggtgtaggtgatgctaggtagtctgtgagttgatagtagatactgggacttttttttgtttttgagagaaaaggggagttatcccaatgcgagtttgcatccggagttccaagggaagaagaaggattgggggtttctgggaggatggtagagccgctggagatggaaagcggatgttttattcagaagtcggggctggagggaaggagaccagacctgccttggctactacttgataaagatttacctatctctgtctccctctccaaccattttgtgctgaatcttcagcttttcacccacatttctttattgggctccccacctctggaaatcacagaactaacccatgtcttctgctttctttcaggagagtgaagatggcattgaaggtgatggtgagtagcatcttttaccccattaggacaagagttttttttaacataaactcaggtcatctatttccaacatcgacattctcacacactgtcacggatttagggccacagagtgcctttttgtaacatagtggttaagagcataggctttagcagtatagtcttcagcaagttaccctctgagcctgtttctccttttgtaagtggggactataattttatccacgttgtaggttgatgtcagaattaaatgagactcttagtctgacctgtaataagcagccaaaaaatgtttctgggtttctttttttccacatatttctgttttatttcagctgttctctcggattatgaaagtgcagaagactcggaagtgagtatgacaggttttttcctatggtatagatcagaaatgctttttaaaaacgtgtacacaccttcgttgc

SEQ ID NO: 1415 - DNA, 6000 bp, Homo sapiens
gtgtacatctgtagtcccagctacttgtgggggctgaggtgggaggattacttgagcccaggaagtcaaggctatagtcagttgagatcacaccactgcactccagcctgggcgacagagtgagaccctgtctcaaaaaagagttgcatgtctactcattcagttctcattatctatagactaaaatatacatctccccccttatgtactactatttttgaatatatgtaaattaataaaatgtaaacttaaagtgttattgaatgtataacagtttgttgttttttgtttgtttttgagacagtctctgttgtccaggttggagtgcagtggtgcgatctcggttcactgcaacctctgcctcccaggttaaagtgattctcccgcctcagcctcctgagtagctgggactacaggcacgcacgcatcagttcattgtgtgtttttttttttttttttttgagacaggatctctctctgttgctaagactggagcgcagtggcacaattatggctcactgcaacctctacctcctgggctgaaatgatctcacacctcagcctcccaagttgctgggactataggcgcacaccaccattcctggcgaatttttttttttttttttttttttttgacagggtctcactcttttgcccagactagtatcagtggtgcaatcttggctcactgcaacctccacctcctgggtttaagcaattctcttgcctcagcctcccaaatagctgggattacaaattcatgccaccatgtctggctgatttttgtatttttagtagagacagggtttcaccatgttggccaggctggtctcaaactccggacctcaagtgatccacctacctcggcctcccagagtgttgggattacaggcgtgaaccactacatccagcctagcagttgtttgtcattgtatgttttctcagtgaatatctcatggggatccatgaaaatttttagatcctaaaaaggggtccgcataatcaaaaaggttgggaatttctgctctaagccattttgagatgggagagttcacaacttacgtcaaagtatagttattaggcactgcatgtttaagagacaattcatgggccaggtacagtgttcatgcctgtaatcccagccctttgggaggccaagggaggaggattgcttgagctcagcagtttgagaactgcctaggcaacatagcgagacctcgtctctactaaaaataaaaaaaaatcagccaggtgtggtggcatgtgcctgtagtcgcagctacttgggaggctgaggtgggaggatcacttgagcccaggagattgagattgcagtaagccatgattgtgccactgcactcctgggcaacagagcaagaccctgtctcaaaacagaaaaaaaaaaaaagataattcatggagagagagattatcaaggaagattaagctcctcttatatgttaggtatcgtatagtaagtctcccttccattcttatcctctgggcccattagaggctgccgctgtttttttgtttttttgttttgctttttcgagatggagttttgcttttgtcacccaggctggagtgcagtggcacaaacttggctcactgcaacctccgcctcccggctaatttttgtatttttagtagagacagagtttcaccatgttggccaggctggtctcgaactcctgacctcaagtgatacgcctgcctcggcctcccaaagtgctgggattacaggtgtaagccactgcgcccagcctgccacttttaataattcttgcatatgttccaggaatacctatgtggatatatatgtatgtatgtgtgtattttttttaatgtgatatttttaaaatagtgtcttttttttattattactattttttgcgacagagccttgctctgtcgcccaggctgaagtgcagtggcgcagtctctgctcactgcaagctctgcctccctggttcaaacgattttcctgcctcagcctcccgagcagctgggattacaggtgcctaccaccaagtgcggctaattcttatatttctagtagagatggggttttgccatgctggccaggttggtctcacactcctgaccgcaggtgatctgcctgcattggcctcccaaaatgtgattacaggcgtgagccactgtgccaggccaaaataggatctttattttctagaaatatgggtaagaatattgatttgtttgcttttcagttctatgttgtactaaaaatttattgataaatgtattcctaaagagtagaaaattgaaatgcagccaggcacggtggctcacgcctataaacccagcactttgggcggccaaggcaggcagatcacgaaatcaggagttcaagaccagcctggccaacatggtgaaacctggtctctactaaacatacaaaaattagccaggcgcggtagtgggcgcctataatcccagctatttaggaggctgaggcaggagaattgcttgacccctggaggcagaggttacagtgagctgagattgtgccactgtattccagcctgggtgacagagactttgttttggggttgggggcaggggtgggaattaaaatgcaccgttcagatcttatatgcatcgctgacagggaaacttttttcagggtgaagaaggtgaatacagtgaagaggaaaactccaaagtggagctgaaatcagaagctaatgatgctgttaattcttcaacaaaagaagagaagggagaagaaaagcctgacaccaaaagcactgtgactggagagaggcaaagtggggacggacaggttagtacattccacagtcctccattttagaggctggaatagagattcttgaggcttggaagagtaaggatccctttatctgtcctctaggagagcacagagcctgtggagaacaaagtgggtaaaaagggccctaagcatttggatgatgatgaagatcggaagaatccagcatacatacctcggaaagggctcttctttgagcatgatcttcgagggcaaactcaggaggaggaagtcaggtaaaagccacttgctgctgctgctgtctaacatgtattttacacatgtaggccaggtacttcgatttgcctgtatttcatttattacagcattttaagataagtattatgattatccttatcgtacaaatgaggaaagtaggcttagaatatttggtaactcttggtgaggcagctaagatacagacctaggacagtttgtttccagaactcatcttctcttaattattatacttttgcttttcttagtctgaggtgtaaggcgtctgagaagtgaaatacttgcataggttgccttttaggagaaaggagatgtttcaaaggtactgaatggcatgaaatgaagtctttttctcatttctgtgtctgttatatttgagcccagcaggccctgaggttctgtgattcacgcttgctttggggaggcctgttttttataatctctttgggatgatgaggagactacgtaaagttcctattgtccccctgcctccctgacccattttgttcaagaacatctctacttggagaattctgctgacccaagacacttttccttcattttatccagacccaaggggcgtcagcgaaagctatggaaggatgagggtcgctgggagcatgacaagttccgggaagatgagcaggccccaaagtcccgacaggagctcattgctctttatggttatgacattcgctcagctcataatcctgatgacatcaaacctcgaagaatccggaaaccccggtgaggacattttagaacataagaccaggctgggtatggtggcttacggtggcttacacctggaatcccggcactttgggaggctgaggcaggaggattgcttgaggccaggagttcaagaccagcctggggaacatagtgagaccctgtctccaaaaaaaaaaagaaaaaaaggaaaaaaaaaatagagtgtagactcttgatatcttttagaaagaattctctttgcttttctttttatttatttatttaagacagagtctcgctgtgttgcctaggctggagtgcaatggcatgttctcggctcactgcaacctccacctcttgggttgaagtgattctcctgcttcagcctcctgagtagccaggattacaggcgcgtactatcgcgatcggctaatttttgtatttttagtagaaatgaggtttcgctatgttggccaggctggtcttgaactcctggcctcaagtgatctgcccgtctcgatctcccaaagtgctgggattacaggcctgagccaccgcgcgtagcctccttttgttaatttcctaacagtttcttcattccattttttgtagatatgggagtcctccacaaagagatccaaactggaacggtgagcggctaaacaagtctcatcgccaccagggtcttgggggcaccctaccaccaaggacatttattaacaggaatgctgcaggtaccggccgtatgtctgcacccaggaattattctcgatctgggggcttcaaggaaggtcgtgctggttttaggcctgtggaagctggtgggcagcatggtggccggtctggtgagactgttaagcatgagattagttaccggtcacggcgcctagagcagacttctgtgagggatccatctccagaagcagatgctccagtgcttggcagtcctgagaaggaagaggcagcctcagagccaccagctgctgctcctgatgctgcaccaccaccccctgataggcccattgagaagaaatcctattcccgggcaagaagaactcgaaccaaagttggagatgcagtcaagcttgcagaggaggtgccccctcctcctgaaggactgattccagcacctccagtcccagaaaccaccccaactccacctactaagactgggacctgggaagctccggtggattctagtacaagtggacttgagcaagatgtggcacaactaaatatagcagaacagaattggagtccggggcagccttctttcctgcaaccacgggaacttcgaggtaggtatcataggattggtggctagctttttcccctttgcatcatcaggtttaggggcatgggacttctgtctcaggaaggtggtgtctgacaaatgtctacttctttttttttgagacagagtctcactcttttgcccaggctggagtgcagtggcgcgattttggctcactgcaaccttcgcctcccaggttcaagtgattctcctgcctcagcctcctgagtagctggggttacaggcgcacaccaccacgcccagctaatttttttttttgtatttttatttatttatttgttttgagatggagtcttgctctgttgcctaagctagatgcagtggcacgatctcggctcactgtaatgtccacctccgggttcaagtgattctcctgcctcagcctcccgagtagctgggagtataggcgtgcactaccacgctgggctaatttttgtatttttagtagagaccgggtttcaccatgttggccaggatggtcttgatctcttgaccttgtgatcctcccaccttggcttcccaaagtgccgggattacaggtgtgagccacagccaccgtgcctggcctttttttttttttttttttttttgtgacagagacttgctctgttgcccaggctggagtgcagtggcacgatcttggctcactacaacctctgcgtccagggctcaaacaattctcctgcctcagcctcctgagtagctgggattacaggctctcaccaccacacctggctaattttttttttttttttttgagacagagtctcactgttgcccaggctggagtgcagtggtgtgatctcggctcactgcaagctctgcctcctgggttcacgccattctcctgcctcagcctcctgaatagctgggactacaggcgcccaccaccgcgactggctagtttttttttttgtat

SEQ ID NO: 1416 - DNA, 6000 bp, Homo sapiens
ttttgttaatttcctaacagtttcttcattccattttttgtagatatgggagtcctccacaaagagatccaaactggaacggtgagcggctaaacaagtctcatcgccaccagggtcttgggggcaccctaccaccaaggacatttattaacaggaatgctgcaggtaccggccgtatgtctgcacccaggaattattctcgatctgggggcttcaaggaaggtcgtgctggttttaggcctgtggaagctggtgggcagcatggtggccggtctggtgagactgttaagcatgagattagttaccggtcacggcgcctagagcagacttctgtgagggatccatctccagaagcagatgctccagtgcttggcagtcctgagaaggaagaggcagcctcagagccaccagctgctgctcctgatgctgcaccaccaccccctgataggcccattgagaagaaatcctattcccgggcaagaagaactcgaaccaaagttggagatgcagtcaagcttgcagaggaggtgccccctcctcctgaaggactgattccagcacctccagtcccagaaaccaccccaactccacctactaagactgggacctgggaagctccggtggattctagtacaagtggacttgagcaagatgtggcacaactaaatatagcagaacagaattggagtccggggcagccttctttcctgcaaccacgggaacttcgaggtaggtatcataggattggtggctagctttttcccctttgcatcatcaggtttaggggcatgggacttctgtctcaggaaggtggtgtctgacaaatgtctacttctttttttttgagacagagtctcactcttttgcccaggctggagtgcagtggcgcgattttggctcactgcaaccttcgcctcccaggttcaagtgattctcctgcctcagcctcctgagtagctggggttacaggcgcacaccaccacgcccagctaatttttttttttgtatttttatttatttatttgttttgagatggagtcttgctctgttgcctaagctagatgcagtggcacgatctcggctcactgtaatgtccacctccgggttcaagtgattctcctgcctcagcctcccgagtagctgggagtataggcgtgcactaccacgctgggctaatttttgtatttttagtagagaccgggtttcaccatgttggccaggatggtcttgatctcttgaccttgtgatcctcccaccttggcttcccaaagtgccgggattacaggtgtgagccacagccaccgtgcctggcctttttttttttttttttttttttgtgacagagacttgctctgttgcccaggctggagtgcagtggcacgatcttggctcactacaacctctgcgtccagggctcaaacaattctcctgcctcagcctcctgagtagctgggattacaggctctcaccaccacacctggctaattttttttttttttttttgagacagagtctcactgttgcccaggctggagtgcagtggtgtgatctcggctcactgcaagctctgcctcctgggttcacgccattctcctgcctcagcctcctgaatagctgggactacaggcgcccaccaccgcgactggctagtttttttttttgtatttttagtagagacggtttcaccgtgttagccaggatggtctcgatctcctgacctcgtgatccgcccaccttggcctcccagagtgctgggattacaggcatgagccaccgtgcctggcccacacctaatttttgtatttttcatagagatggggtttcattatgttggccaggctggtctcgaactcctgaccttaagtgatcgacccatcttggcctcccagagtgctgggattacaggcgtgagccactgtgccagccccagctaatttttaaaaaattttttgtagtgatgggtcttgctatattgcccaggctaatcttgaactcctgggctcaagagatcctcctaaagcgctgggattacagatggaagacactgcacctgcccggtcatcattgagcctcctgagtacaggatcattttccacaaaaagtagaagaagacaacgttattatttgaactaatggttaaatatttgaaggcagaaatttattcagttgaattttgatcaagatcttctctaatatatttgaaaggcaagcctcccttatttccttaatcttctagagacagattgcccaatagaactttgtgtaatgattgtacttttgtgtttttgttgttgttgtgtttacatagatatagtttttttttttgtttttttttttttttagatgggtcccactttgtcacccaggctagagtctggagtgcagtagcgtgaccttggctcactgcaacctccgcctccagggctcaagcaatcctcccatctcagcctcctcagtagctaagatcataagcacacatcattacacctggctgattttttttattttttgaaaagacggggggtctcactgtgttttccaggctggtcttgaactcctgggctcaagcagtcttacctctgccacccagagtgctgggcttataagcatgagccactgcatccagccggaattgaacttttaattaattgaaacttaagtgtccacatttggttagtggatatcatattgggcagcatagttttagagagtaagacctacctattacccattttgcctattgtggtttgtttttctccagccagatagatcaaaggatcttcccttagtctgaaatctaacttaaatattggaactcctcaattggagttgcagcacccttcttactattggaggacaatctctagaacattcctttttgtcttgagtcattttagccagaggagaatctcctttcaaacttccaacccagacccctgtgaatggatataatcaagtagatttacaaagcatccctcccttgtccagctgttgctcagaaactcttgggctgagatttttcaatatgttggataatgtaatgtgctaattataatctctcagggattctatgcagggaacaatttgataggaaaaaatttgaatttgattttcttcactgaagtcattttatttttcattttcaagggctttattgctatattaagatggcagacagtggggacaaatttctaaatgctggtgttgacagaaagcagagatagtttatagagaattttattagttaaaagaaaaaaggcattccttatgttgacacttaaacctgtctcttgatagtatctttgagtcccactcacgtatgtctgatctgcagaagtgacttttttggtgtattacaggtatgcccaaccatatacacatgggagcaggacctccacctcagtttaaccggatggaagaaatggtacagaaggggaaaggggtagatgggggagggagctgcctgttacacagcttgttcattgtttaaaccaagataaggtcttttttttttttcttttctttctttctttttttttgagacagagtctcgctctgttgcccaggctagagtgcagtgacgggatcacggctcactgcaagctctgcctcctgggtcccagttcaagcaattctgcctcagcctcccgagtagctggcattacaggcacgtgccatcatgcccagctaatttttgtatttttagtaaagacagggtttcaccatgttggccaggctggtcctgactcctgacctcatgatccacccaccctggcctcccaaagtattgggattacaggcatgagccaccacgcccggccaagataaagtcagtttttccattgattatgcatgtttcttttaatttggatctcctaaatgtaaggtagaaggtttaggttcaaatcttgatatcttttcattatttttcagctcactttgcaaatatccattaaatacctgccatgtaccaagtgtttttcaacacctaaaggaaggtaggacttgatatgagagccctctagaattcttattgtttaggcctctttctttgtctcagggtgtccagggtggtcgagccaaacgctattcatcccagcggcaaagacctgtgccagagccccccgcccctccagtgcatatcagtatcatggagggacattactatgatccacgtgagttttttcttactgttggggtacttttcttggcagggtgaagtgaagtaagataccaggctcctggctcctgaatttctcttctgacctcttatagtggttatcaaacattgtctggttgctgttttcttcgcatggaatattgagaacatcttttaaagggcttggggaacaaggagacttgtccatgtgaagagtaagggtttatgagagtcccaatgtgatatcttacagtgcagttccagggaccaatctatacccatggtgacagccctgccccgctgcctccacagggcatgcttgtgcagccaggaatgaaccttccccacccaggtaagctttgtgtctctgcttatatgcttccagtacctgaggatatatgttgggagtgccacaaaacccatcctcctgagctttgtgctgctagcctgggagtctggccatcctggctgcttgggcaacaagttcctcttgtgtccatcctgaggacttccattctgagcctgattatactgagcagtccagccgggccatcctgtgaaaatgatgttactttatttttcagtttttttcttctccttatccaggtttacatccccaccagacaccagctcctctgcccaatccaggcctctatcccccaccagtgtccatgtctccaggacagccaccacctcagcagttgcttgctcctacttacttttctgctccaggcgtcatgaactttggtaatcccagttacccttatgctccaggggcactgcctcccccaccaccgcctcatctgtatcctaatacacaggtgagatggctaatgatcatgtttttctagatacacattctttaattcagacaggaatgtggtatggggagaatgctaaaggaatttgagagaacattttcagtgccactgatttgtatgtgacaccaagacgcctcttagtggtcaggagctggaaatgcagcttatgtaatgcccatcatctttattcttttcagtttttttctccgttgcccaggcttggagtgcagtggcgtgatctcggttcactgtaacctccacctcttgggttcaagcgattcttctgcctcagcctcccgagtagctgggattacagtgcctgccaccatgcccggctagtttttgtatttctagtagagatggcgtttcaccatgttggccaagctggtctcaaactcctgacctcaaccgatccacctgcctcggcctccgaaagtgctgggattacaggcataagccaccgcacccagcgttcagtttctttaatggtgtttctttcctgtgttgtggtacatcataggtggcaatacctggtttttactctattgcataaagaagctgtattctactccttatcacccctacctctgtcctgcttaacttccaccacgttgacataatcaagtatctgtagtgtcgctactgaactcagccttttccatttgtcagctgatggtaggaattagagaaagctgggcagtactttgaagaaataaaaaccagagcataataatgaagaattaaggcaaaaatgaatagtcactttattttgaagggtgggcagattagatatttttaaaattataaattccccaattctcttatggctgaataatatttcctgttcatcataggttggatgaattcattcctaactttttcttctcctggcttgtggggtcccaggccccatcacaggtatatggaggagtgacctactataaccccgcccagcagcaggtgcagccaaagccctccccaccccggaggactccccagccagtcaccatcaagccccct

SEQ ID NO: 1417 - DNA, 6000 bp, Homo sapiens
acctgcaatccttggactgcttagggcctggctggctctttgcaggtgtgattgatttcccaaattgggaactgttgcctcttgattgtattctgtggatccaggtccccaaaacagcaggtctcgggcaaaattttttttgtctttttctcagatgaagagttatcttaaggatcatctttccctaagatcgtcatcccttcctggagttcctatcttccaagatgtgactgtctggagttccttgactaggaagatggatgaaaacagcaagcctgtggatggagactacaggggatatgggaggcagggaagaggggttgtttcttttaataaatcatcattgttaaaagcactcatactatttgagttatttggttaaaggtgaggaggagggggaggaggacagatgacatttgttgcgtactgactatcaacaaggaccatgttaaattctccccaggcattatctaagtaaccttaacaaccttttgactgcacttcttatcattaccatttgaggacactgaggtttggggcagagtcatatagcaggtaagtgtcagggcctaaactataatctcatgtcgaacgccatataagtcctatgcattatagcatggtggtcaggagccctgactctgaatttcaaacccaggcacaccacacagccatgtggccttcagtgagagtcttcatctttctgtgattcgactcatatatataatagtacctcatgaaactacaaagattaaagagggtcacataaagtgctgacacatagaaagcattcagtaagtgttaactacaatgattattaacacagtagtacccctaatccacgggggatatgtttcaagacccccagtgaatgcacaaaaccgtggatcgtatcaaactctacatatactgccgtggatagtatcaaactctctatatatgtgttctgtcctataaatacatccttatgataaagtaaatttataaattaggcacagtaagagattaacaataactaataataaaatagaacaaatataacaatatgccagcatcactactcttatgctttgagaccactaagcaaaataaaggttacttgaacacaagcactgggacagtggatctcataactgagatggttattaagtgactaacgggtgggtagcatataaagcgtggatatgcttgactaagggatgattcacattccaggcagaatgaagtgggatggcgcaagatttcatcacgctactcagaacagcagcaagttgaaatgtatgaattgtttatttctggaaatttccatttcgttttttttttcttttttttttggacggagttttactttggtcacccaggctggagtgcaatggtgtgatctcggctcactgcaatctctgcctcccaggttcaagtgattctcctgcctcagcctcccaagtagctgggattacaggcgtgtgccaacacgtccggctaatttttgtatttttagtagagatggagtttcaccatgttggtcagctggtgtcgagttcctgacctccagtgagcagcccgtctcggactcccaaagtgctgggattacaggcatgagacactgcgcccagcgcatttcatattttcatactgtgattgaccacgggtaattgaaaaggctgaaagtgaaactactgataaggggggactcctatgtaatcacatagataggctgatgaccctgaaacagaactcaaggccaatcctccttcctagcctctcctggttcaaagtgtaatctggataccgaaatcaagctcctgtcttctggttttccccattacaaaatgtgggaggtaaaaaacaatgggtttataatttcttgtctatgttcttcacaatcacagccagcctgggctgcaatctgatttcaaccaatttgctgcctgtgcagccttgaccaaccatttatactcttcggcaccattttcccaactataaaagggggaaataatatctacctcatttgatactaagacttataaaactttatagtttacaaagcattttcacaaaaatcccattcgattttcacatcaaccggtggcaaataggggaccctgaataaaaaattagtgaattcattcattctgttaacaaatattgtggggcatctaccacatcccaggggctgtgctagccctgggatacaacagcgaatgagacaaacgggaactgtgccttcataaagttaatattctagaggggaaaacagatgataaagtcatcaaataaacaagataactgcaggttatggtaaattttccgaaggaaataatcaaagatgtgaattagagtgaagtgggggtatgcaagcctacgtgagttaggatgacccagacgctcatgaagggataaaagtgaagtcttgagaggtttccacacatgaaaggagtgaaattccactgaggttccagatcatccgatgcagaatctaacaaaggaaatggctgtgaacgtgcttagcaccccttaaagcccctcagtcactgcaggactatgaaaatgcagagaattgaggaggagacagaagattttcttggaagagagcttttgccatgctgtgtttccacagtttcagggtgggaggtgggagcaggagtgctactgtctaaactcaagccaatgcagggtgccttcaaaggcctccctcagagcttgagatacgtttccttcagttggtgatcactgcagagtagggatgtccatttccttaaaggaaccacactgatccaaaacagtatattctaccagaactgaacagaccggcatcagtatactgtattttacaattcctgggccattccaccctgaataacacaatatgtaggtcatccatattgcaacttaaagtgaaccacaccaaacccagatcctttccagtctcttcgaacgtgcattgtggaaatgaccaggcctcacatccttctagcccaatgtgtaagacagctctttagtactacttcacatactcttggtcttacattcttactctagccattgctacagcaactagtttatcacaggcatctactagcttagcacaggtataactggtgagagccttgcctcagatatgcacctagtttcctcacttttgcctcagggcttctttgactatgcaacataggactcctccaggaaccaagcacagatgcatgctcaacacaggaacaccagtgaattaatgccttgtggtcaacttttgacaatagacttcaaaagctgacagataaatgcttttcctctctgttcctcagaagaagggttttgagagcttcacaaggcttctcagaaactcctgaggactgaacaatcagtcaccccttgcaatggccaactcaatagcacatattggtattaattctccttccttccctgttcatttctggataaatccctcacctatcaacctcatctgaggctctgctatcagggaacccagattaaaatatccaacgactaggtttcagctcctgatcttctctgaacaaatgcttgaatacatttctttacacgaatacacacacacacatgcacatatataacgcacatatgtacacagactaggaataagaaataatataccagcacaacggaatctaaatccaaacaaaaaaattaacatttctccccaagcccaaagtcttcagaaaactacctctgctaaagcatacccccaattttcactgctgaacagaaatgttttgttctcaggataaaacatacattcaggtgacttcaaggttttccctaagggccaagggtgaggatttgctttatatttgcataactcaaaggccctagagatggttttcccaatctgcccaactgtgaaagtcaagccttcacttcctggatgactgaaaagtgatcacagatttttaaatggccattttattctccagcttcttgacttcaaggtttcagaaaatcttggggtgtctcatttcaacccggtcactcttaggcagattatattttacatgattcagttaaactccaaaattactcttctagtggggcgaggtgcctcatgatccatgagaggattcacactgggaaaaagggagaaaaaggaaccaagagtacagccagctgtcacttaagtagggaaagctgccttatattccactgaccagattgcaatcacagagccacagccaactgcaaggaatgctagggaacgtagcctttattccgggtggttttgtgcctggggaaagattttagaagagtagaagggtgccttagaactagcggtttctgctactgccatccacagcataccctctccaactccagcccgaatctgaaactctagtacggaacagagtaccttcagccctgtccaggaacaaactctgggaggacaaactttctggaagcacaaattgagaactcacttttcagtcagggctcaagaaggagtggccggcgaaaaatctccaagccaatttctttctttttttttttttctgagacggagtctcgctctgtcgcccaggctggagtgcagtggcgcgatcttggctcattgcaagccctgcctcccgggttcacgccattctcctgcctcagcctcccgagtagctgggacaacaggcgcccgccaccactcccggctaattttttttttttttttttttttgtatttttagtagagacggggtttcaccgtgttagctaggatggtctcgatcttctgacctcgtgatccgcccgcctcggcctcccaaagtgctgggattacaggcgtcagccaccgagcccggcctccaagccaatttctgacaagcatctgcagggtaccggtcggaggagtcccgtagtcatggaaacccctctgagccccagtccggtctaaaaaaggtactttcggaactagagcgcgcggaacgggaggatgtcccggaagtatttccctgggatcaccccacccaccccccccgcccgtagaaaagatggctgctgtgcaagttgtcggttcgtggccttccgtgcagccgcgggaggcaccgcgggaagcaatccctgagcgaggcaatgggtttcgcctcttgtctgccaggctctgcgccctgcgcccggatgacagcagctccgcccgcaccgagatccacctgctcttcgatcagctcatctccgagaactacagcgagggcagtggcgtggccccggaggtaggcggcgcgccctgctggccccggccccggccccacccctccgggaacccagctggtggcctctgcctgcctttccctgatcttcccactctcgcgcctgatgatttagtttcaggatggcgtgccccctccaaccttggcacattcttagttctccatttggaagaccctgcagtgcttggcacgctcgagtcattcaaaacccaacttgacgactcctgctctgataatgcctcgggtttcctctctgataccaactttccatccgcccgcaccctccttcactccctctctgtgcacccagaacacttggttgacaaaatgcattactactgtttattgcgtacatggtacacggaccacgtgggaatcttagaacttgcgtagtattagggcttgtttgctaatgaaaatactgaagctcgtaaaaatacagtatacaaaactctgccacaaagcccctatgttttctgttcctacacactagctcctcccctctgccgtctttctgagtaatcttacacacatcaggccttaaattaatgaattctctgaactgttgacaccatggccttctggccctacgtaggaaagagggaagtggtgcaagttgcctgcttgcacaggcatctcaaactagacagttcctaaagatgaaattcattagctccaaacacgcattcccgtccccagtccatcccaccttccaacacacatgcatcatccaccaagtcacaccagacacaaacactggttcttccctccttcatcc

SEQ ID NO: 1418 - DNA, 6000 bp, Homo sapiens
ccagtaatttctgcatataacttgttgttgagtattgggccacatgctataaaggagtctgaggaagtgaatggggcacactaccacctgaaaaaagttgggaggtggatattcagtaggtatctagcaatgagtaccagatcagatcactgctattggcaaaaagagaactccctgaagggcttgtgcatggaaataatgcgatcagagctgcatttcagaagggtatgtctagaagatgaatgaaggagagatcagagggggccagatcagagacagagagatcagttaggaggttgacatatcagtctcggcaaaagatgaagatctaactaaggctgtgacaatgggaatggagagaagaggatgtttgagggggagcttcaaacttgtttgatgtgaggagtaaggaagtttctatctggctggggtgagtcagtgaatggcagagctaaaattatcaagattaataatacaaaaggagaaccctgtctggaagaaagacaaggagttcagtgtattacaaacacagagttgattcttgttatttacagtaactatattctgtagtcactgtgaacgctgcattgtgaatactgaaccattgctcctgaagcaaatacagggataggttctgagaagcctctagtcaaaatattttccatcaactcatcaatacataacattgtgttatgtgtgtttttgtttaaaggcatcttgtttaatatagactgttgattcattaacattgaattcacagccagcctcactataactcatgcctgaatgaagcttatctaacatatgtattttctccataaggcacatcacagcctcctagtgcttagaaacactagacagcacttcagcactatgattgggggccattttaaatagtgaaataaccaaagaaaagcataaaaatgcaaaaaagaaaaaagtggcactcgatggaccacaaaaagagcatttacttacagtgtgagagctgaaacacgaagtcagagcattactttgttcagccttagctgggaatgtgctatcaggtgactcaagcttttcatcactctatgcatggccacaaatgaccacaaaagcatcttacatattgatttggggattacaaataaattttacctagtaggtacattcccaattgcaaaatttgcaaataatgaggactgagcatttaacttaagctgcccacgggatctccaaaaagcaatcgaatataccagtctggaggcaggagagagatgtaaattagatgggtaacacctctgcccaaagcccagcaatgcttccctgtcactatgagcaacagccaaagtccttgtcacagctcataggaccctaagataatctactcaccccacatttccatttgatctcatttcctacttttcttccttggcttccttgtcgtgtccttgaacacgtcaagaatacaactcaaggaatttgcactgtagttccctccaagtggatgttctccccacagagaactgcacagtttacccccttggctccttcagagtactcaaatgctgtcatctcaatgaaatctacccagactgccctatctatacttgcaaacatcccccctgcccgagatgtacgcagtccttccaatactgcccatcctgctttgcatttccttttttcttataatgtactacataattttcttattttgattattatgtattgtcttcccccattcccacccagctaccagactgcaagctctatgaaagcagtgatcttagtatgatctgttcagtcttatatctccagaacctagaatagtggtgggcatattccaggttctcagaaatacttgttaaatgaatgaataaatgaatggaggaattatgaattgggcatatagaacacacttaatctacacataaatacaggcaagagcactcacagcgagtaaactgagacggtggtcgaggacagaacccctggcaatgccatgcgaaaaaatgaaacaggaacaatgagccaagaaaggaagcagcatggagaaagggaccgagagtgagattcaaagccaagggaatgggggttttcaaggagggagacttgaacagtgtaaaatatcacaaacaggccaagcgcagtggctcacgcctgtaatcccagcacgttgggaggccgaggcaggtgaatcacctgaggtcaagagctcaagacctgcctggccaacaaggcgaaaccccatctctactaaaaatacaaaatgagccaggtatggtggcgcatacctgtagtcccagctacttgagaggctgaggcaggagaatcgcttgaacccaggaggcagaggttgcagtgagtcaagatcgcaccactgcactccactctgagcaacaagaccgaaactccacctcaaaaaaaaaaaaaaagaaaaagaaaaagaaaaaagcacgaacaagtcattgatttgagaaaggaaatctgttatccatttatgtaaaaaaaaattgctgcacatcttctatgtaccaggcattgtgggcacgggaacaagccatggaaagagcaggactctaatgacaacgtcaatgctccacccaggaccccggggttcactttctgccatttttgcacaccacccaccttcagtatgcctcagcagtaaggtcacccctccagctattcagaggcttgtccacacacactcacacaaagaagagctggaatcctaggaatttacttcccccagggcagccattgaccagtaaccataggtactgggatactgcagtccatctccctggccttccatgggcaattccaaggtgtaacttatactccaaagctcccctgcagggtcaggctgtagctaccaccctcaggatgttgcctgaggacaccctcttgctgggtttcctcccttccactgtcctgcacctccactccttaccaggctccatgggagcccttccttaatatatcacttatgcatgaaccctaatgttagtccctgcctctgaggccttcaggtgtccagtctctagaaagggagatggtcaagagaagagaaaaagacagtgggaaagaatgtggaaaacatatcatgctggaagggaacatgggaaggacccaagatcaagactcccaggactcgagagggcttccaggagacaagggaggctgtgctgatgctggaaagatgaataggaatcagtccagcaaaggcagagggcatttgtgacagagaaggcaatcagtgtaaagatcctgagaagagcaacagcagagctccttagggaaattgcaaacagatcagtatggctggagggcagaacaccagaagggctgggcaggccataagaccacaggtgggcactggccacttcaaatggcttagtaagccaggatgggggatttggagcatcctgacaagccttgaagtgcctttgagcatccctttggcagcagtaaaaaaaatggattagcgaggggcaagataggagacaagaggacccattagaaagctgttgaagtaattcagccatgagacgacagtggcctgaaataaagtagcagaagtggggccagagggaggaaaaggattaaaactgagagatcaattgtgatatcaggagggcaaggccagtgaactgggcaaggcagaaggcagacagagtaggtgggcaagttatgtgcagtaaagaggtggagatgatgaacagagattatttttgaacagcttaaccataagaagaaggaaacaattcagtgtcaaaaaagggttttgcaggggctgaagggggcagcctttaagatgaaagagaactggaactcatttataaagttacaaggaaagtgagatctacccatcaaagtttctgcccatttctctctctgcctttctcgcttttattttcctttttacttagatgaagacttgttgtcatgttatccttaagatgagcacaagaaattccagcagcaagaagataccaggacataaaaactatatacttcaaaagttcagacttaattcctgttcatatattgcattggataaaatttgtttttttttccagtccagccctggtaaaaaggccacaatagcacaagcagtcctgttatggctgcagaacagaaggtgggaggaaaagttcaattagaaccatgccttcctcagcccgataatgggtttaacatttgcagagggttcccaggcaacaacccctgccattccacaccctacaaattgggaatggctttttgttgcaggctgagaaagcaccacacaaaaggtcccaggcagcacagctttttcatgtttgaagggtcgtcagcccagccccatctgcctcccaaagcatattcccctcttctctttaccttcccacagatgacacttcggacagctcttttcaggtaagtccaagagaaaaagtaaatgctaggcctggtgaagtaatttctcactcaggttttgcaaaatgcagagaggctacaggtttccccaaatatactacaaaaatctttgagtctcaaaaggggagactgtcgacggtgtgaagggaagtgttttcaaagataattcacctggacatttgcctaggagttttgcaatttacaaaatatttcacacacataattttattggatcctcacaataatactgtatttttcttattctatagatgagaaaacagactcaggtcttctccttggacatgtggtccattgctctttccaccattccacactgcttctaaaaaaaacaaaaaaccaggatggcatctgttgggcggggctacggggcttgtgatgccgcccgctgaactttgtgacacagccgcttgcggagacaggaagcggtcgcagcacgtcaggcccgccctcttccgcggccgcggtgggaatggaaacatctgccccacgtgcaggaagccgggtggtggccacgacagcgcgccactccgcagcgtaacctcgcagatcccctgcgtgtgtcctcgcaagactagctcaccgaaatggccgcgtccagtcaaggaaactttgagggagatattgagtcagtggaccttgcagaatttgctaagcagcagccgtggtggcgtaagctgtttgggccagaatctggactctcagccgaaaagtatagcgtggcaacccacctgttcattggaggtgtcactggatggtgcacgggttttatattccagaaggttggaaagttggctgcaacagctgtgggaggtggattttttctccttcagcttgcaaaccattctgggtacatcaaagttgattggcaacgagtggagaaggacatgaagaaagccaaagagcagctgaagatccctaagagcactcagatacctaaccaggtcaggagcaaagctgaggaggtggtgtcatttgtgaagaaaaatgttctagtgactgggggatttttcggaggctttctgcttggcatggcatcctaaagaagatacctcattttcattgttcctggttttttccagtcagcagcctctacactccatcacaggacattgagtccctcctcctcttctcccatgccttcctccctgctgtggcaaatccgagtggcttctataagcatccgttggtacaagttaatgtggcaccatgagcctgactggcttctataagcatctgttggcacaagttaacgtggcaccatgagcttgatggcagcagaagagacaatagtccttagctcttcttccagtacgccccctacttagtcagtctgtaggtcatcaagaaggtccctctacccctatgcaagacacttacaagaacacattgcaagatagctgaccgtggaggatgagtggatcctgaaatgttgtcccgaactgttgatttggaaaagaaataagcacatagataaccttattgtgtgctgcatggaaaggaactgaatacaattgcctttaagcattaaaaaaaaaggatgaaaaattggggtgtcacatttgcaaaatggatgga

SEQ ID NO: 1419 - DNA, 6000 bp, Homo sapiens
ggaatactctctctgggatcctaagccatcatgctggagaggccacatgtaggcacttcagttgacaatctcagctgagtcaagccttccagctatccgtcccaaggtgccacacaggtgagtggagctgtctgggactctcaagtccagcccatctgccagctgagtatcattgatgatctctgtcaataccacatggagcagaagaaccgctcacttgagcccttcttaaattcctgatctccaggattgtgatcataataaaatggtggttgttctctaagcctttaaatctgggatcagttttgaagcagtgattggtaactggaacggtagggttttgagtagcagagataagggcccaaaggcatcccagagactaggaatgttgtaggtaaagccatgaacctgtgaagatgcagagaattgatgcgtgaattttgagttttggggagatgaggaaaaccataggaagcataagaaaaaaatcactgttgtacatgtttaagggctaaatagagagtctgaaggtctctgtgtatgttatgtattcttacatatgtatagctaatgaagtgccactaagagtctatattttaaatttttattatgaaaatgtataaacatgtacagagaatagcataataatcccctgttgtctcagtctgtttgggctgctataacaaaataccatgaccaggtgacttataaacaacagaaatggatttcccacaattatggagactggaagtccaagatggaggcaccagcagatttggtgtctggtgggggctcacttcctggctcatagattcacagatggcaccttctcactgtgctctcacatgtcggaaggaaagagggagttcactagaggacgctttttaaaggatactaatcccattcatgcaggctctgccctcatgaccctatcacctcctaaagaccccacctctaataccattactttgggggttaggatttaaacagatgaaatttgggaggacagaaacattcagaccatagctcccaaacatataataactgggagtcaaggacagcgtaagtggtttcctggcaaaaaaatgatctctgtttgccaatctttttcctgaactattttaagtgaaatcccatacattgaatcactttacccataaaaattcagtatatagttctaatagacagggctttaaaattgcaaatacaataccattttcacacctaaaatatttagcaatgttaattaaaatgaagccctctcggctgtcgaatctctcttactgctggctccttggaggcagagtcaagatggacctggccttgctgtggttgttctctctgaggcctctcataatcaaaggcagctccgtcttagaccctgccccctttcccctgtgtgcattcagctcacggcacgctcgcagagtgatggcacttcctacagtcctctatctgctattgccaggtatctgtgaattggaagccacagagggaggaccactgaggcccctgagtcacgtggaggaagggaacaccatgtctggactgtgtttgagaaggtcagtctgacaatgtgtgacaatggtatgtggagtggattggaatcgtctacaatgagagctcctggccaaaggaagggaggatcagagaggtgtaagagcactgggtggggagctcagaggccagagggagtttggtctgaaaataatttctaacatttgttgagtgcttactgtacaccaggctctgtgcatgtgatctcttaccccagtgtgatagataatattgcccccatattacctctggcctagagaggacaggtgatctaattacacagtttgtgcataatgcagaaggaactggaacccaaagcccacgtccttagctactgtcacatggcagaaacgaaggtcctggggttcatttggtatggtatatcaagggagagaaactgcattattaaactgagtgaggccaggtagagactttaggaagcaggtgcgttttggtggagagctgaatgagctgagttactcaaagtgcagtctgaggactacagcatcctctaggagccaataaaaacaaaatggagacagctgggccccacccaagacctacgtcattccaggggatttgactcagaaatctgcactaacaagctccttgggattttcagactaagtttgagaaacactggaatgaaaaatcagaccagacttagcagcgggagaaaggagggtcttgtacattaaaggggtgaaaaatttaagcgactagtaagaaaaggacctttaatagtgtctcacatgtagctagcattttataagtgctacagactgaatttttgtgtctcccctaaattcatacattaaatcctaattcctgaagtgaggtgttaggaggtggggcctttgggagatgatcaggtactgaggatggatccctcatgagtgggatttgtgacctcataaaagagccccagagagctccctcaccccttctaccgtatgaggacacagcaagaaggtgccatctaggaagcaggaagcagggcctgaccagacaccaaatctgctggggccttagtcttgaatttccagcctccataactgtgcaaaatccatttctgttgcttataagctacccagcttatgggattttgtttagcagcccaaatggactaagacagtaagtaaataccgttgaacaaatagacagatgaaaaggaacttagatatcagcataagaactgacatagtgtctccaggctgaacacatgagtttagcggcccctctgaaggcagagtgagacgctccctgctacagaacactctctggtcatatcccgattaagtgaagataatttatttttttttagatagtgtctcgctttgtcacccaggctggagtgcagtggcgcaatctcggctcactgcaacctccgcctcctggattcaagtgattctcctgcctcagcctcccaagtagctggaactacaggcacgcaccaccacgcctggctaatttttgcatttttgtagagagggagtttcaccatgttggtcaggctggtctcaaactcctgacctcaagtgatctgccctcctcagcctcccaaagtgctgggattacaggcgtgagccaccatgatcccccttaagtgaagagaatttgaatgtcatattagaagtagatattggtagcaatttggggtaagggggatgatctccacaggataaataagattacagccattatgtttaatgtatgttctaaaccaatccaaacagaatattggctttttatgtgctttgatttttctttctaatgataaatttcttgtcctcaggcaaaagtaaatatatgcctggttacttttaaaactcctatcccctattctacagtttcctcaagggtttagaagcacttccccaagatagctagatgtgtaacattatccttctgattctctctgacaccctgggcagtatcatgatctaactcagacccactttgcacttttttctttggttggccaccatctgtctttactagctcaatgttagaagacttctttctccttcctgctggagaaattcaactgcattgcatggagagctaattatatggagagacagtaagtgcttaccactggagggtataaaaatactggccggtgtggtggctcacacctgtaatcctaacactttgggaggccgatgcgggtgaatcatttgagttcaggagttcaagaccagcctggccaacatggtaaaatcccttctctactaaaaatacaaaattagctgggcctcgtggcacatgccttgtaatcccagctactcaggaggctgaggcaggagaatcgcttgaaccccggagttggaggttgcagtgactgagatcccatcactgcactccagcctgggcaacaagagtgaaactccgtctcagggaggggaaaataagtgagaaccttggtgaaggaaagaggtaatcagctcagttcagggcagatctgagatgggaagacaggaaaggtaatctcacatctccatccttttgtagcccaggcctggagagaataattaggtgacccgctcagagtccgttgggataaagttgttctagtttttgttcactacgcctcctttcacgtgtcctctacagttgaacaggccagttactgggatgcagttctgcgtttcccttgggtctcaccttaacatcgctcgctgaagtgtgcccagattacagagcgggcaaagggaagcagtggttttgctcacagctgcagggcaccaggttcctggtttctcaaaggcttttctattggagaagtttgggtgagacgatttcccggactgcagctctgaacccagactgtggaatctttcaaactatctcaaaaacagccccgcctaaggcatccttaagagcagctctgaactaaggaaattccaaagcccactttacaaaccaggcagaagcaaggcccccaagcagggagggagggagatagggaagaaaggggtgaggagtaaggggaacagtggcgcggctggggcgggcggaggaagtgggggagccaaggagacaccccagcgctgggatccggcaagtcctccctctgagtggccagggggcctcgtcccttctcccgatgccttctgcccttccttgggtctccggaacccagcttgtcctaaccgctttcgctgcgggcagcgctggccacgcggcccccgccgccggcggttctccgtggccaagcatccttggccttggagcccaggggctgcgttccccttggggccggggcgggagagaggacctcggtggtactcgcccgtgcgctgggcgcagccgcttggccctcagccctctggcgcggcgcccacccgctgggtcccgccccggcagcgacgcagggataacccgcggccgcgcctgcccgctcgcacccctctcccgcgcccggttctccctcgcagcacctcgaagtgcgcccctcgccctcctgctcgcgccccgccgccatggctgcctcccccgcgcggcctgctgtcctggccctgaccgggctggcgctgctcctgctcctgtgctggggcccaggtgagcggggcgatgccaggctgattgatagcggcaccaggggttggccccatgtggcgcttccatggtgcccggggagagcgatcggtgatggggtggcggcgtagggacccatccttagcctaggcagggccaaggggtggtagaggaccgggtctggggttttgcactcgcacaagtgcgaagtggtgcccttgtgagggtggagagagtaccggggtcaaggggagggtctcagatctcccgggcaaccttgggcaaggagggccaggcgtccgaagggtgggcaagtagtgtttcgtggcttaacgtaaggggcaaaagggttgtgggggctttacgcagctggtaacccagaggaggcaaatggcaccatcaccgccattcccttccaggcagtcgcttagcaaccaagttgacttgcgcttcccagctgggtcaagttgcaatttgcaaagctgggcacaggcctcacaccccagagaggggaaaggctcttaaaggagtaatgcttaatctttcctgcttcgtggagctcccagcgaatcggttgaaaactctgaaattctctgctcgctctctgtaaaacgtgcattcacacgcacacccagaatgatgggtgctccgatatctgatcgctgggctccacaggccccactttaggaaccataatctgaagccgtggtttgtcctgagttaccaccttcactgggtaggaggaacatttatggttcacaagtggcctcaaggacacatgactgcctttgaagcttacaactaggggaggcagggattgttacctcagagttactggtgtatgaagtgacttgcccaagagcctgagactggcgctgtcccactgcaaagcagctgggcact

SEQ ID NO: 1420 - DNA, 6000 bp, Homo sapiens
accatgcccggccgtgtttctcttttcctaaacatgcctcacatagcgtatctccaaatgcagctatgtaaaagggaaccaaaacttgagtgactgctctgaatagctatgcggaattctttgtaagaactgctaaagtcagtctgatttaaatgcgcgaagaggcagctaggtatttaaagttcccccagatattttcacctaagtgatacctcccttcctaaggctgaccaaggccagttgatccttttaaattaaaaataaaatgtcccatgcaaaggctggaggagtgttttatcagaatgccttgcctttctgaggttcctttctattaggtcgaaggtctatgctccaggaggagagaaagacctcctcataggaatgctaaagggatggcaggaactgagctgatcccaggcttcactgcaattttgtatgcctgttcgtcagtctcttttagggcattctatattttgcattctgatgtacctaggagttaaacagttgttaaacagatcgtgcttgtgagtatttctctctcattttctacaattaaccaaataaacaacaaaaaaaagcccatgaagccctgtatttgtctttttttttttttttttttttgagatggagtcttgctctgtcaccagactggagtgcaggggcgcgatctcggctcactgcaacctctgcctcccaggttcaagtgattctcctgcctcagcctcccgagtagctgggattacaggcacacgccaccacaccccgctaatttttgtatttttagtagagatggggtttcaccatgttgtccaggatggcctcaatctcatgacctcgtgatccacctgccttgacctcccaaagtgctgggattacaggtgtaagccaccgcacttggcctgtatttgtctttttactacatggatgaactctgtcatatgaataagtactgtactaatccattttaagggaggcttatttcagaaatatttcaaactggtgcaaatggaaaaggctttttttcttttaaagctaaagacaagaatgtcatgctatacaggtagaatttgacctctgctaataaaaaccaatgtagatatagacattttgccatttgaagtagctgtgtcccaacatgttgccattgattttttggaaatggctttagaaatgtccaagttgggctggacacagtggctcattcctgtaatcccagcactttgggaggccaaagcggacggatcacttgaagccaggagttcgagaccagcctggccaacatggtgaaaccccatctctactaaaaatacaaaaactagccgggcgtggtggcacatgcctttaatcccagctacttgggaggctgaggcaggaggatcacttgaacctgggaggcagaggttgcagtgagctgagatcacgccactgcactccagcctgggtgagagtgagactgtgcctcaggaagaaaaaagaaaaaaaaagaaatctccaagatgtccttgaattgtctaaccatggacattgtcagttctcccttctatcatgtagaatacttagacttaatattcttccagatacagggggatacttgcttgtttttcaaagtgtttatttactgctgctactatttgattacaatgtgttaaattttaaaacctgtgggagtggcgaggtggggaagaaatcctgtagtggacctcatacacatttatctcattgaattcggattttttctgagtgatccagtgaatgagtctttggataggggtggcaactcacggtcagagtggtgaagtgacttgtctgaggccacatggctggtcagaggcaaaattgcatttaatccgaagttcatctcctccatagctttccccccgctagccaaagatgaaggatgtgaattttccttgctgattataatttgtggcaatcccacctcccacagaaaatacacaaggaggtgctcgaaatttggggcttcttttgggcagtaactaactcgggtcggtgccaagccttagtccatgctgtaccaaccacctaggacaccttttcttctcccttatctgctggttaaatcctcctcaaccttccagactcactgctcaggagtcaccgcccagctaagtggggactgctccttaatgtttccaaaaatgagacactgtatttctcgactggcaggtctaaccaagctaccttgtcaccagcgtccagtgcagagagaacactcaaaaatcatcagctttcaatagcgtggcttccacttttctcattcacccctccgcccatctgccccagggcaggtgcttcagtcttcaacagctctagtgcctagcaaaggtgcaagcaaataacccatgatgaatgaatgactggatgagtgaataaatgaatgaacctcttcttgactgtacatggacaccatctctggggcagctgaatgggtgagtaagcaggaaaattctagcaaaccaggattagggggtataggagacctgcattattttctgttaaccagagacagataatggaggacaaaattgatggactatgaaccaaatgcatggctcctaggtacatgactccaggctgtggagggggtagggccaagatcaccaggacccactgaagactgatgtggccaatgtggggttggggggggggttcccctctgtgagcctccctgggaccagctctgacttctttttcaccaagcccagaatgtaaaagtggggatgtggtgagggcttcctggaggtggtgatgtcccatgaaggaggctttgggtaagaggaggatgctttgggagggagagggacacctaccataaggggatatgtgggaagaatgaaggcaaaacctaagtggacatgaggttatccagagagtaaagcactcaactctagtacaggctcttttgaagcctttattcagttaaatcaatgctgtccattaatatggatctttccaatgtttgcctgatttacacaggataacatttcaggatccaaattgttaactctatgccttggaacattttgtgaccccaggaacacatcacgaaatatttaccaaactggatctttctgtttacattacaatgatagcgtgtacatatttcactacatctttgccagcagatggaaacctttattgtaaatatttgctctgtgaatgggaatagaataaatttcataacactggaaaagccaaagttctcaaattaggggagttaattgttacaccaactcgacagactgctttctgagcatttttaaaaatggaaaaatagctgtagtttccagctgggtgggaatacagatctaagaatttgcttagctggaatcacaatgatgcaaaaaagtggaactgagaaaaaactgaaaagggatgccaaaatttgacagaagtttatttgttagacatgactcttatttctgtgttagtgcatgcaagaaaaaaaaatgcattttcaaaaaaaaaataggaagattgttgagtatctagctgagccaagcctgtgctgagcaattcagaggtgacctaagcagtgcctctccaacctcagcatgcaaggaatatgttcctgctacacctgctgcaggggctggaggaactgagaggggaaaagggctagacttgttctcaccatcaagaaagtacagcctgttcctgctgcaataacaaaatatcttagactgagtaatttataaataatagaaatttacgtctcacacttctggaggctggaagtccaagatcaaagtgccagcagacttggtgtctggtaaaggctttctctctgcttccaagatgacaccttctcactgcaatcacaagagagaaaggatggaagggcaaacagggacaactgctgtgtcctcatatggcagaagagaagtggaagggccaggcagctatctgaggccatctttataaggacactgtcctattcatgagtacagaactcttatgacttaattgggcccaacaggccccacctcttaataccactactttggggtttaagttccaacatatgaattttggagggacacatgcattcaaaccatgcacgtgttttaagacatctttgcaattaaggctttagtggggtcccaacttttcaaatggttgagcacatctgttctgaagtcttcaaggaacaaacatcttcagtgagatagagaacagttgcccctaccctacaaggaaaccacagctctgctttaaaaggaggaaattgtgatgtagtgtgaaggttacaagctttcatagaatgtagaactagattcaaatcctgattctattatacactagctctaggaccttgggcaagatttgtcttctcttgagtcttagtttcctcatctgtaaaatcaggcaaattagttcttagatgataaggatgcatttgtgaaaattgcctgtcaatgtgagctactattattatagatggagagacggagaccatgaaagggcttgggagctgtccagcatcaaacagcaagaaatgggcagcgccatgctagaattcaagggtctgggaccacaaaccagtaaactgaagctaggacaccctctgcctccccactcacagaagaccgagtggcttccttcctcggagtcaccaggcccatctcgcttattgtacagatgagaaaagcatctcagagtggagcagggatgtgaatgtgactcctgcacaccatcttcccacttgcagcccctctcggtgctctccacactctctgcacctctccatttgatggcattcatgatgtacagattcaaatatgttgttgacattcccccgggccttccaagcaggaatgtttgctttggaggtattggatagacgtggtaaaatcaagggctttccatcagcttcctagctgtccatcacccagtgccacgtctcccccagcaatgggatcacttgccatttatacagtctgcccccctacaaagtcatcgggaatcaacctacagaggccagagtgtcttgacagcacaccagagaaatccaggtaagcacaaggcaatggcactctccaacctgcctcttcatcagatgctgaaccagactaaagcttttgatacatgttaccagttattaccaattgtgtttggttctagcacagaacatgaaaaatcgtggcttcaatcatgatgagaagcccagagttaggctggcagagcctgccatctccttccttggctacccctaggatgtggctttcatcttcctgctagtaagataactgctgggctccagtcgtcatatcttatatgtaatcaggaaaaagcaggagaggaaaacaaaagcatgcaatttgcagctgggtcagccactctagagaagtttttaagaagccccgacctacaatttccatttatatctcattgatcatgcctggttgcaaagaaggttgggaaagataatttctttgttaagcacatttcttccctcaaaaataaaaggattctgtaaataaagagggaagaatgggcatgtgccctcggctctccaagcttccgtttcctgctctgtaaaggaagcatgtcaataactgtctcataagattgggatgttgtaaggaattgggggactcctccaacacccagcaggaaagatgctccctggccaccctcccctccttcagactgtctgtgagtcttccaagggtactcactgtcagaaccagggagggataaaaaggaactttaattgcaaatccaaaattaacttctatttagtggcactaggctaaacaattttcaaaatgcttcctgaattctcctagtaacctttttgagtgagatgcagattaaagtataaaaaactaaaagacgggagagccaggtgctagccactaactacagctggccttaggaaaacttaaccctgatccgagcctcagtgtgccatctgtaaaatgggtattgggccaggtgcggtggcttatgcctgtaatcccagcactttgggag

SEQ ID NO: 1421 - DNA, 6000 bp, Homo sapiens
tggggaagatcttgacagatgaggacaggggacaggggacaccacctcaagaagagtgacaaggtcattttacaaagatcatcctgggccaggcatggtggctcattcctgtaatcccagcactttgggaggccaggcaggctgatcacctgaggtcaggagtttgagaccagcccgtccaacatggtgaaacccacctctactaaaaatacaaaaattagctgggcttggtggtgtgcacctgaactcccagctacttggggaagctgaggtgggaggatcgtttgaacctgggaggcagaggtcacagtgagctgagatcgcaccactgcactccagcctgggctacaaagtaagactccgtctcaaaaaaaaaaaagaaaaaatcatcctgggtggaagatgaaggttctgggtgagacaggcagcagagagaccagtgaggaggttgctgcagggttcaggggagaagggatggtggcctggaccaaactttggcagtggggacagaaaaggcctaaaggaaattcaggagcaatgggcaagagttgaggagtatggagcaagagggagcaggagtcatgggtgactccaggtgtctggtgggtgggagcaagttggggaagccttggtaggaagttgagtttggctcagcaaaattttagggcagaatgaccttccaggtctctcaagtcaaagccggtgttgatggtgtttccacagcctggaactgagctgggaaggtggagcaatcttgaggacagaggggaaagggtccagctgagcaggagcgagttccatgtgcattagaagccctgcctcagcttccccagttttctgggccccagggagaaagggctggccactgaggccttgtacatgctaacactcagcctgaagttactggaaggtggtatcccgcaaaacagacctgatccttgtttagcagcatgtcacattccatgggatggcaggaccccttcctttcttccatttttcttgtttctgtttttgagatggaatctcgctctgtcgcccaggctggagtgcagtggtgccatcttggctcactgcaacctccacctcccaggttcaagtgattctcctgcctcagcctcccgggtagctgggattacaggcgcgtgccaccacacccagctaatttttatatttttagtagagacagggtttcaccatgttggccaggctggtctcaaattcccgatctcatgatccacctgccttggcctcccaaagtgttgggattacaggcgtgagccaccacacccagcccctttcttctatttttcttgaggtataacatacgtaaagtatataaagcccccagtcttttttctttctttctttctttttcccccgaaacagggtctcattctgtcgcccagactggagagcagtggcacgatcttggctcactgcagcctctgcctcccgaagtcccctagtcttatggtgaatttttacttgatgaattttcacttacataatcaccagccagaagaagatataatccttccagcatcccagaaaagctcctcttgctcctttcccatccctactcctgacctgacccaggtaactaccattttgatttctaaccctatagattagttgagctttatatgaatggattcatatggtatgtactgttttgtatctggcttcttttagtccacatactatatgtgagattaactggtgctattacatgtaacagtagtttgttcttttatatgtaaaacacagtattccattgcatgaacatgccacaatttatccattctccagtgatggacattgaactatttccaatttgagctatgaataagtctgctatgaacattcttgcacaagtctccatgtaaacataggcactcatttctctcgggtacatacctaggagtggaaattctagatcacagcataggtgtatgtttagattttgtagatgctggttttccaaagtggctgtaccaatttgctctgccgtcagcactgcaagaatttgttgctccacagcctctcaacattcagctctctttttctttttttgttagtttttatttcataatcataaactctgcaatccacctgggcatggaagggaacaaggaaaacatgaaacccaaagggaactgcagcgagagcacaaagattctaggatactgggagcaaatggggtggaagggtgctctcctgagctacagaaggaatggtctggtggtgaagataaaacacaagtcaaacttattggagttgtctacagtcagcaatggtgatcttcttgctggtcttgccattcctggacccaaagcgctccatggcctccacgatcttcatgccttctttcttctttcaccttgccaaagactacatgcttgccatccaaccactcagtcttggcagtgcagatgacaaactgggaaccgtttgtgttgggtccagcatttaccacggacaagatgccaggacctgtatgctttaggatgaagttctcatcatcagatttctccccacagatggacttgccaccagtgccattatggcatgtgaagtcaccaccctgacatataaatcctggaataattctgtgaaagcaggaaaccttttaaccaaatcctttctctccagtgctcacagcacgaaagttttctgctgtctttggaatcttgtctgcaaacagctcgaaggagtaggggcctaagggcgcgtcatcgacagtgatgtcaaagaacaaggtggggctgaccatggctgatagtatggggatcccagcggcatctgcaaagccagctctctctttttctaaacaagagcttccactacaagactcctcttgtcattcagtgttggatactgggtgtggctgccatggatgcattgatcctttagcctgtaagcagcaggatggtgggaggccacattcaggcctgttttgagtctcagctggaggagaaatggacatctccttgctttggatgtgacctcaggaactggatagccatcttgtggccatgagcataaaccagcacaaggacagaagataaaatgaacctcagtccttgatgacactgcctagccactgagtggcaggctacttatttttttaagccacttgatgtagttgtgtgtttaacttgcaacataaaagatacagtccaccaaccttctttattcccaaaccccaacggctccatttctgttctcaacagcatcagccccactgagcactccctccttcctgaaacctcctctctaggacccacactcacttggtcctctttctaccccactggccactgcttcttagtctcctttcccggatcctcctcttcttttctctccaccttctttcacttgcgttctcacccagcaccatgacctttgtattgatggcccccaaatatgtatctcctgccccagcctccgttcgcagcttctgtgtcacataaacctgcctactcaccctctctgcctgcatgttgccccgacatttcaaacttaacttctcaaagccgaacttgatcttccccctcagtccgttcctctttcaggctttattgtcttggtcaaggaatcttttaccctttcatttactcaaggctaaaacctagcgaggagttattgccaatgcctccacatccacccaagtccaatcttccacccttcccttcacctccccaagctaccaccctgtctgagtcagcattggcttttgtctggaaagctgcaaccacctcctaactggtctgcctacacccactcctgagtgctttccaagccatgcggcctgggtggcctttcagaaatcctaatttgctatcctcttcctgatgaaaatggcttccctgactctcaagagaaaagccaaattcagtatgtagctgacctgttttcttctgtgctcacctcaccccaactctgccgcttcccagctccagatctgggacaaatgttctttctgcctagaacatttcccctctcactcttaccctaatcgtcctttgtttctcaacctaaatgccatcttcccaaggaggttccaccctttccctacattagtactccattaatttctcctaacactctctacttcttctcacagcacttcccatgatgtgtaattatgtattgattaaagtcactaatatacagtgattatatgactgtctccccgcctacccgccattagactggcagtgccttgaggtcagggacagacccaggttaccgactctacctgcccttagcactgcgcttgggtacagtaagcgcccaaggaatatgcttaattagctaataaatgactacacggactcattcaagcctcataaaagccctaaggtgggcatttcaacagaagccgggtcggggtgggcgaggggctcgctggcccaaggtacggggcaagtgggggagccgaggcctgacccaaggcagtcccaagttctgagcccggacctttcagctcctgagccttggctgcatgatgaaacgctagggagggggtggactttgagccacgagaaggttttcccggagtccacggaccatccacgcgggcaagaacgaagcgggttcaccaacatgaacacaacccggcccgcccagcgctcacggagtaaggatcacaatctgctgcatatgcatgaggggacccggccgcgcttcggggctgtccacactgcgcctgataaaaattattcgggcttgaagatctcggggctcccagagttttgtaaaagtgcatacaaagtcctcaaaggtggtctgtggctgatatttacgggaaatggggcgaggatgagcccccacttcggaccttgtgatcaggcgtttgcggtagacagcccgatcccaggatgggtcctcggccggctcgactagaagactaagggggcgtctccccggcttcctgcggcgtcggtggcgagctgaggtggaggcaggctgcggcagacggcgacagtggcggcggcgccatggcagggcttgcaggtaccgtggcgtcaacctgcttggggcgggatgagaggccctccatgcggccgcgccgccatattgtcccttctgggtcaccttaggcgtcgccgggtccccgtcactggggttttccttccgcataccccgggaaggcagggcgcccctgtccggcttcaggtgattgccgtgattggacctagcctgggccttggggggtcccttcccagcccggaggtgggtcatagtactcctgggtgctggctctggccttgtccaaggtcagcgcccttgcaggatgagacaggcagagccgggggcacggggctgggagcgcgaccaccatctctgcagccccgggttccacggcagggtgcccagcttgtgagaggcctgtcattctgtccccatcagtttagttgcgttgctttagttgcttttttgggggggaggtggggggacgtgggggtgaggggagagagggtctcctgaggctccgcttcggtgtctggggtgataggctgacgctctgctaagagtcgcgggcgcttcttactccctccaactttacatcaagggtggacatcccttccctttccttctatagacgtggggagtggccctcaagggcagctgaaggaacggaatgcctggcgcactaatggcctggaaaggaagcatgggggatgggggacagttgttttttccttcccctttccaaatctcctttagtttccttccaggcctccgtgtcccatttcatcgccgaatgttgggagactggggtctgtcctcggaaagaaacagcctttctgtttataggtttggatcgtctatccctttcagggaactggtgtgttggggacggcttctctgccctgcctgacatggtccagtcatcccgtcagccttctggacggcaacaccaaagctgggaccaaaaaaaagttccagcttaagtgctaatgccaagtgttagatcttgtttgcttgtttgtt

SEQ ID NO: 1422 - DNA, 6000 bp, Homo sapiens
gtgtgagtggtgtccggaggaagtgagtggtggctggagggtgtgagacctggatggagggtctcagtggtggcagtagtgtgtgagcagtggccggagagtgtgagtggtggtcagagggagtgcacggtggccagagagcataagtggtgactggatggtatgagcggtggctggacggtgtgagccatggccggaggttttgagtggcacccgaagggtgtggccggagggagtgagctctggctggagggagtggccagtggcaggaaggtgtgagcaatggccagatggtgtgaggggtggtcagagggagtaagcggtggcttgagggagtgagtggtggccagagggtgtgagtggtggctgaagggtgtgggctgtggccggagggagtgagcagtgatcagatatgggacctggacggagggtttgagcggtggctggagggtgtgggcagtggctggagggtgtgggtggtgactggagggaatgagcagtggccacaggatgtaagacctgaacggagggttggagtggtggctgtagtgtgtgagcagtggctggagggtgtgagtggtcgttggagggagtgatccctgactggagggactgagcagtgaccggagggtgtgattggtggccagaaggagttggcggtggctggagggtgtgagcggtgtccggagggagtggatggtgtctggagggtgtaccaccaaggacgcctttctgatcgtcctgcgtccatgctcagtcctggatctcctcttccctttctgggtgtgtgtggctctggaagaagctggctaacctgacgaggttaccgccctactgtcaccatggaagcatagcgcctcagccactctccctggaggagcctggcctcacactccaatcattcccctctccttctgggttaatttgaggaatgtggtcccgctccatgctgtgggtctgtgcctcaagttccctggccaggaaagtacctgcctcctccaatacctgaggaccccaaccccagggcctcagctgggtgtccttgtaaagggtccctggggtggcagttgcttttttgaccagaggcctggcaggaaacgggcttcaccacagcggatctgggcaatgcgaggagagtgaagactgtaaaagtctccttgcggctggtaaaccccccaggctggggcaggggggtgaggggtctgctctggggcctggggaagatggtgtgtggagaggacgcccacctgggctgtggctgagagggggacgtggcctgtcccaggtgatcccaggagggatcctggaggagagcccggatccacttcctcccaaactcctccctccctccagggccacctacagaaccccctcctgccaaggcacaggtcaggggcagcgggcaggtggggagcgtcaggaggagactgactccccaactgcgcgtcccccttgtggggaatctgggcggctgcggggccccccactgaaaatgaggggctctcgccagaccgcagggaggtcggctgggcgcaggaaacaagcaatgcctgcacagccacagacgcccccacggccatagatgcctgccggagagggtctgaggtgcggagtcttcagatgtcctgtggcccagccactgcgtctttcagataagaaaactaagacccagagctgtgaaaatgctggcacagggtcccccactgatgatggactggcgcttgcctctgcattctctccctcgccacactggaattgtcttcaacaagtttttatggataaggttatgtatggtgtggtcttgggttccgcccactctcacagggataaagctcttgtcccgagaaacggagagtcccgggggcagctccagccgctccaaccctaatgtgggaggccaaactccggcacttggtagttatctcacagctctcccaaggagataggagctgggctttccaagaaagcaattgcaaacatgtacagaatgctagaacaacatccgtgaatctacgctgcccctcattaatggatgctaacctttttaccttatttccctcagattttcttcaacaaaagaaaacattacggagacatcgaaggcccctttgcgccctaccccgccaccttttcctgcttcctccttcctagacagacccatcatgctgaagtcagtgtctcgttcctgtctacactgtcatcattttgttcatctggatgcagttccaacagtatatcacattgtttcacatagtttggaaatctacattataaatgatatcctactttacaaaccattttaacggattttttcacttcgctttgttttcaatatttctcattatttattcattttcatcttctgaaagatactcacatacatacatatataatatatgtaaagtataatacatgtatgcaattagttctctatattcatgggttctacatccatggattccagtaatgtcagatcaaaactgttttaaaatccagctgggcacagtggctcacacttgtaatcccagcactttgggaggctgaggcgggtgcatcacctgaggtcaggagttcgagaccagcctggccaacatggtgaagccctgtctctactaaaaacacaaaaattagctgggcgtggtggcacatgcctgtaatcccagctactcaggaggctgaggcaggagaatcacttaaacctgggaggtggaggttgcagtaagctgagatcatgccaccgcactccagcctgggcgacagagcaagactctgtctcaaaaaaaaaaagtattttaaaatcttatttacaacatcttaaagatcaaaacttgggtgtgccgcaagtcaagtactatgtagaatctgcagaatgaaatgaggtgtaggtattgcatcaggtattataactaacctagagatggttaaagtgtaggagaggatgcacgtggtttctgcgcactatgtcattttataccagggacttgagcatttgtggattttggcatccctgggtggggggtcctgaaaccagtcccccaggggtactaagggacgactgcattgtattttaagttcattttccctttccctggttaatgaatatttattttgcttttctttccctcctttccttccttccttctttccctgtttccagctgttacaaacaatgctaaaaagaatatctttgcctgtgttttcttctgcccaagtatgaacatgtttctgggattaagagaccaggcctggaaacagaagaatttgctgagctgtaaaatctgtatggcttaaacctcaccgaacactgcccaccttttctccaaatgattgtgcaatttacatcccatttccaagagcccccattttgatccgagaaattagagcagcgaaaaccaccgtcactatgagcaccaccctgggcctggtgcccccgtcctgttttcaataaacttaagctgaccacagaggacaccaggcctcggcccctccctgggtcctgcggtcaggcccctcctggagaccctggcccaggagtggagaccccggtgcaggagtggcagccctggaggaggggctgggtcctgggatggagcgaagaggaacatggccgcccccattctggcccaggctcccctcccagaggggctgcagaaatgtactgactaggtcacccaagaaaagatagtacctttgttaggctagcatgcattttcctcagggcctaatttctcactgaagaagaaaagatttctcctgttgtccatttcttcatgcagctcttcaacagctgtttctcgaatgccaatcaaagccactgttctagggtctggggccacctcaaggcactaggagatgaggacttctgctcccatgcgccctcccgtctgctgcagggaggagtgcaatgaataaataaccaacataatgtgtcagtcacttgttttatccaccaggaggtaataagagctatgaaagagaaagctccgagcaggggaggggagtgaggcatggtacaggagagcaggaggctgtcctctaaaatacaggagtccaggggaccaactgggaaggtgtgggagggggagggagggagccccatagacacaggggagtgaaccacgttcactttgtcagtttttgatggcagctcgtatatactatttttttctccctcctgcccccagcccctcccagaaggagacttaatctgtcgctcaggctggagtgcagtagggtgatctcgactcactgcaacctccgcctcccaggttcaagtgattctcctgacttaacctccagagtagctaggattacaggcacccgccaccatgcctggctaatttttgtattttttttttttgtagagacggggtttcgccatgttggccaggctagtctcaaactcctgactttaagtgatccgcctgctttggcctcccaaagtgttgggattacaggcgtgagccactgcgccaggcctacaatttcattattaaaacaattccactgtaaaagaattagcttaggcctagacggaatgggcttcatgagctccttcccttccccctgcaaggtcacggtggccaccccgtgagccactgttgtcacggccaagcctttttccggccatctctcactatgaatcacttctgcagtgagtacagtatttaccctggcgggagggcctctcagatatgagtaggacctggattaaggtcaggttggaggagactcccatgggaaagagggactttctgaatctcagatccctcagccaagatgacctcaccacatgtcgtctctgtctatcagcaaatccttccatgtagcttgaccatgtctaggaaacacctttgataaaaatcagtggagattattgtctcagaggatccccgggcctccttaggcaaatgttatctaacgctctttaagcaaacagagcctgccctataaaatccggggctcgggcggcctctcatccctgactcggggtcgcctttggagcagagaggaggcaatggccaccatggagaacaaggtgatctgcgccctggtcctggtgtccatgctggccctcggcaccctggccgaggcccagacaggtaaggcgtgcttcttcctgctctgtggggccacagccagctctggcagcctccgccaggagccactgttttacatacatatttttgagcacctgttttgtgccaggtgctgttctaggcccttaaaagtatatccaatttacaggatcggcaaaagcaggtggagagtaactcagggtggcagggcccccggagaccttcgagaagtgcgacgaggagggggctgccttcagtcggggctgttttcctgtgttaggaagactatacaatcctcccaagtgtcatgtttcaaagaggaagtgttggcgtggggtctcagaatagtgcttttgactgttcatgccaacatctcccccaggggcagaccctcccaaggcccatccagataggcccaaatgccggtcccagtgatggccacctgggagaccctctcccacaggcccgaatgcccgtcccagtggtggccaactgggagaccctctcctacaggttcctgggctcccctgggatccatgctctgggagtcaaagccacctctctcatgagtgcgtggctggcaacccatattccctggtgttgtcaagtggatcggttgccctgggtccttctagggagtggaggaggaggccattcttgcttccttgggaagtgtttgcatctcaactcctttacctgcagaatggatcaacggtctgccctagggctgtcaggaaatgctgtgtggcagcatctgcgacttgcactttgccagctgtggggagctgaataacttatttgccgttattaggtacagtttcaaggtgggggcaggagaaagggctttctacgtttccaaagcaagggtttccagagaggcctgaagagggagcgcccagtggtgctgtccgtgcccccactg

SEQ ID NO: 1423 - DNA, 6000 bp, Homo sapiens
tattttcttcagttgcttttccatatatcaatatttttgcatgcatttaaaaaatgcaattaaaaaaaaaatttttttttgaggcggaatctcgctctgtcgcccaggctggagtgcagtggcgtgatcttggctcactgcaagctccgcctcccaggttttcacgccattctcctgcctcagcctcctgagtagctgggactacaggcatctgccaccaggcccggctaatttttttgtacaaaaaatacaattttttttaagacagggtctagctctgttgaccaggctggagtgtgcagtggtgtgattttggttcactgaaacgtccacctcctgggttcaagtgatcctcctgcctcagtcccccgagtagctgggactacaggggtgtgccaccatgcctggctaatatttttgtgtgtatttttagtagagatggggtttcaccatgttggccaggctggtatcgaactcctgacctcaagtgatcctcctgcctcagtcttccaaagtgctgggattacaggcgtgagccactgcacctggcctcttctttttttttttttttttaattatttttggctgggcgcagtggctcacgcctgtaatcccagcactttgggaggccgacgcgggtagatcatgaggtcaagaggtccagaccagcctcttgtaaaaatacaaaaattagctgggtgtggtggtgggcgcctgtaatcccagctactcaggaggctgaggcagagaattgcttgaacctgggaggcagaggttgcagcaagctgagatgatgccactgcactccagcctggatgacagagtgagactctgtctcaaaaaataaataaataaataaataaaaattttattttttaattaaaaatttacttatttattattattattattattattattattattggagacggagtttcactcttgtcacccaggctggagtgcaatggcaggatctcagctcactgcaacctccgcctctggagctcaagcaattctcctgcctcagcctcccaagtagctgggattacaggcatacgtcaccatgcctggctaatcttgtatttttagtagagacggggttttaccatgttggccaggcaggtctcaaacttctgaccttgggtgatccacccgcctcggcctcccaaagtgctgggattacaggagtgagccaccgtgcccatcctattaatttaattaattaatttatttatttattttctgagaccgagtctcactctgtcgcccagactggagtgcagtggtgtgatctgggctcactgcaacctccgcctcctgagttcaagcgattctctgcctcagccccccgaatagctgggattacaggtgcccgtcaccatgcctggctaatttttgtatttttagtagagacggggtttcaccatcttggccaggctggtgttgaactcctcacctcgtgatccacctgcctgggcctcccaaagtgctgggattacaggcgtgagccaccgcgcctggcctatttatttttttaaaatggagtcccactctgtcgcccaggctggagtgcagcggcaccacctcggctcactgcaacctctgcctcccaggttcaagcaactctcgtgctgcgcctcagcctgctgagtggctgggactacaggcatgtgacaccatgcttggctaattttttttttgagacggagtttcacttttgttgcccaggctggagtgcaatggtgcgatctcagctcaccgcaatctccgcctcccgggttcaagcaagtctcctacctcagcctcccgagtagctgggattacaggcatgcgcaatcacgcccagctaacttttcgtatttttagtagggacggggtttcaccataatggtcaggctggtctcgaactcccgacctcaggtgatctgcccgcctcggcctcccaaagtgttgggattacaggcatgagccactactcctggcctaatctacattccattatgtggactatttaaccccattgtgagaaatttgtatatgcttttttctttttttttttttgatacggagtcttgctctgttgcccaggctggagtgcaatggcaggatctcagctcactgcaacctccgcctctggagttcaagcaattctcctgcctcagcctctcaagtagctgggattacaggcatacgccaccatgcccagctaattttgtattttcagtagagacggggttttaccatgttggccaggctggtctcaaactcctgacctcaggtgatcctcccgcctcagcctcccaaagtgctgggattacaggcgtgagccaccgcctgtatatgctttctttcactattatacatgacacttaaaaaatattatcatatattagttatcttttttgttgttttttgagaccgagtctccctctgttgcccaggctggagtgtcatggcatgatctcagctcactgcaacctcagcctcccagattcaagcaattctcctgtctcagcctcccgagtaattgggactacaggcatgcacctcgatatccggctaatttttgtatttttagtagagacggggtttcaccatgttggccagggtggtctcaaagtcctgacctcaggcgatctgccggccttggcctcccaaagtgttgggattacaggcatgagccagccacattagttttcaaatgcagatgaaacaagggaccgtggaatgcctgttgtctcaggtgtgctcctaggcatgggttccaaacttacaggtacaaacttacttatgggtagagagacagataataagtacgtggtctgcaaacgtggctaatttccccagaacagaatcctggaatactggtctgagagggtataattattttaaaatatttttggggccaggtgcgttggcttatgcctgtaatcccagcactttggaaggcaggaggatcacttgatcccaggagtttgaggctacactccagcctgggcaacagagtgagactccgagtctccaaaaaacaaaaaaagacaaaagaaccccaaaaaaacaacttttggctcataccgccaaactcatgtccaggaattttgaggtgatttatgtgcttccaaaagtatatgagagtgattacctatcagaccttgtgtttgaaggttatcacttgaaactgatttttaatttgtttaggagaaaacccagcttcttatagttttattttatttatttatttatttttttgagacggagtctcgctgtcgcccaggttggagtgcagtggcacgatctcggctcactgcaggctccgccccccggggttcacgccattctcctgcctcagcctcccgagtagctgggactacaagcgcccgccacctcgcctggctaattttttgtatttttagtacagacggggtgtcaccgtgttagccaggatggtctcgatctcctgacctcgtgatccgcccgccttggcctcccaaagtgctgggattacaggcgtgagccaccgcgcccggcctatagttttaatttatatgtcttgggttagtagaatggttgactttttttttcagtcgttccttcaaatagtgagtcctctgctaggctctatttgtggaatattcttgttcttcttcagggatgtttgatagctcttttttttccacagatgtttgatatttcctttttcatctattgtgttcttaccatttctaggatgtttctaggctttctattctatttcctgttctgtaccacactgaaatgcctgcggtagctttacaatttgttttgatatctgttagggcaagtctaccctcatgcctgcttttgttcccaaggggggaaaaccatagctgttttcggctatttatttttccaggtgaacttagaattttgtgaagtctaagaaatgttgttaggatgacattaaacctatacatccattaggaaagaaaggttgcatcatcagcttggcgaagggttattgaaactggtttttgatcttgactggagctggggcacaacttccctgtaaggcagacctgggctcctcttggacttgggcgacctcgatagtggtgtgttcctttgtttggtgttcaaagtagagagcggtccattaactagctccctagagaagcagtggcggctcaggccagcccagcccctgggaaggctatctgcatggcggccgggagcccgggtcctggtgggccggctcgggcaggcgcttgacccctggggcctgcgaggggctgcggccaccggaaggggctggctgagcgcagcgtgctgggtcctccgcgccctcggagcaggtagggttcgcgggggtgcgcccgcgggggcccgaggggcgctggggtcacgggaggggcgccccttctcttttgcacccaaccagcccgggcttccccaggagcccagacccccgagcttgcagtcactgctggctgcgcctttgagcctcgggcaaccgcagggagcgtcgagcaggggtcgcaaaggggtcggggagggggcgcgtaggccgatagaggtccctaattcggggctcctaggggtcagggtagggctaaaagggggtaagtccaccagagtttgagggggtgggcgtcagcctgtcggggggggccagggtccctgtcccgggggccggtatgcggtccgggtatttcaggggcgaggtcgcggtcctgccctggcgcttgaggtcggagtccggttagatgtccggggtctgggtccccggctcctcccgcgcacccctcccccacggcgccggaccccggcagcccgccccgcctagtgctgggaccgctgtccggcccggccccgcccccgcaggccccgcccctgttcacaggccacgcccccagctgccccctgtccccgccccgccgctcgcccattcagatgtgggtcaggggtgagcgggcggcgccgacgtcacaagcttccaagatggcgctgggcgggcggctgtgagcggcgctcggggcgcgctaggcggggagccgagccgggctggcggcaggcggacggggcgggcgcgtgcggcgcgagccgggcgctgaggacaagggccgctggtagggccggccggccggcgggcggagcgccgccgccgacgcacacgaggtgaggggcggccttgtggggcggggggcgcggggagcgggcgggggccggggccgcgggctgggcgcgtccccggggagaggggcgtggacgcgcgcgcgcccgggcgacgtgggactgcgcgcgtgggggacgcgctagcgtctggcgggcctgggctggggcgcacgcgggacccctggcaggcccgggctttgtgggccagatgcccggaggggcgcgggcggtggggcacccggggcacaaagcccaccgggccgcgccaggcccaggcggcgcgggtctgcggagcgggggtcggcgggcgagcgggcgccggctctttgtgccttttcattagcaatctaatccgaacagcgtcgggcgagctgcgctgcctgacaggcgggagggctcccattatgcaaacggccctgcgcccgcgttcgccccctcgctagaggattttgcgatttccaggactgcggtcctgcaccgtctgcggtctcctctcctcttgcctcctccccgcgggaagactggccacggcaggggcaggggcgggcctggaggggccgctcccagagggccgggctctgcggctggtgggctcgctgccctgcccccagacctctcctgtaggcagccgcttggcaggaagagagatgggcttgggggagggggtcggctttcagggggaagggaccggctggctgagggagggggctgaggggccccagcttgtcactctctgtttatcttccaagatggttcatattcacacaggcctgggtgtgtgcgtggttggggggggtgggggggaatgcctctccctggggggcagtgacttgctgagaggaggga

SEQ ID NO: 1424 - DNA, 6000 bp, Homo sapiens
cgctgtcgcccaggttggagtgcagtggcacgatctcggctcactgcaggctccgccccccggggttcacgccattctcctgcctcagcctcccgagtagctgggactacaagcgcccgccacctcgcctggctaattttttgtatttttagtacagacggggtgtcaccgtgttagccaggatggtctcgatctcctgacctcgtgatccgcccgccttggcctcccaaagtgctgggattacaggcgtgagccaccgcgcccggcctatagttttaatttatatgtcttgggttagtagaatggttgactttttttttcagtcgttccttcaaatagtgagtcctctgctaggctctatttgtggaatattcttgttcttcttcagggatgtttgatagctcttttttttccacagatgtttgatatttcctttttcatctattgtgttcttaccatttctaggatgtttctaggctttctattctatttcctgttctgtaccacactgaaatgcctgcggtagctttacaatttgttttgatatctgttagggcaagtctaccctcatgcctgcttttgttcccaaggggggaaaaccatagctgttttcggctatttatttttccaggtgaacttagaattttgtgaagtctaagaaatgttgttaggatgacattaaacctatacatccattaggaaagaaaggttgcatcatcagcttggcgaagggttattgaaactggtttttgatcttgactggagctggggcacaacttccctgtaaggcagacctgggctcctcttggacttgggcgacctcgatagtggtgtgttcctttgtttggtgttcaaagtagagagcggtccattaactagctccctagagaagcagtggcggctcaggccagcccagcccctgggaaggctatctgcatggcggccgggagcccgggtcctggtgggccggctcgggcaggcgcttgacccctggggcctgcgaggggctgcggccaccggaaggggctggctgagcgcagcgtgctgggtcctccgcgccctcggagcaggtagggttcgcgggggtgcgcccgcgggggcccgaggggcgctggggtcacgggaggggcgccccttctcttttgcacccaaccagcccgggcttccccaggagcccagacccccgagcttgcagtcactgctggctgcgcctttgagcctcgggcaaccgcagggagcgtcgagcaggggtcgcaaaggggtcggggagggggcgcgtaggccgatagaggtccctaattcggggctcctaggggtcagggtagggctaaaagggggtaagtccaccagagtttgagggggtgggcgtcagcctgtcggggggggccagggtccctgtcccgggggccggtatgcggtccgggtatttcaggggcgaggtcgcggtcctgccctggcgcttgaggtcggagtccggttagatgtccggggtctgggtccccggctcctcccgcgcacccctcccccacggcgccggaccccggcagcccgccccgcctagtgctgggaccgctgtccggcccggccccgcccccgcaggccccgcccctgttcacaggccacgcccccagctgccccctgtccccgccccgccgctcgcccattcagatgtgggtcaggggtgagcgggcggcgccgacgtcacaagcttccaagatggcgctgggcgggcggctgtgagcggcgctcggggcgcgctaggcggggagccgagccgggctggcggcaggcggacggggcgggcgcgtgcggcgcgagccgggcgctgaggacaagggccgctggtagggccggccggccggcgggcggagcgccgccgccgacgcacacgaggtgaggggcggccttgtggggcggggggcgcggggagcgggcgggggccggggccgcgggctgggcgcgtccccggggagaggggcgtggacgcgcgcgcgcccgggcgacgtgggactgcgcgcgtgggggacgcgctagcgtctggcgggcctgggctggggcgcacgcgggacccctggcaggcccgggctttgtgggccagatgcccggaggggcgcgggcggtggggcacccggggcacaaagcccaccgggccgcgccaggcccaggcggcgcgggtctgcggagcgggggtcggcgggcgagcgggcgccggctctttgtgccttttcattagcaatctaatccgaacagcgtcgggcgagctgcgctgcctgacaggcgggagggctcccattatgcaaacggccctgcgcccgcgttcgccccctcgctagaggattttgcgatttccaggactgcggtcctgcaccgtctgcggtctcctctcctcttgcctcctccccgcgggaagactggccacggcaggggcaggggcgggcctggaggggccgctcccagagggccgggctctgcggctggtgggctcgctgccctgcccccagacctctcctgtaggcagccgcttggcaggaagagagatgggcttgggggagggggtcggctttcagggggaagggaccggctggctgagggagggggctgaggggccccagcttgtcactctctgtttatcttccaagatggttcatattcacacaggcctgggtgtgtgcgtggttggggggggtgggggggaatgcctctccctggggggcagtgacttgctgagaggagggaatgaggccagataatgctcccaacggccccacccagaactgcctgggactgcctgtgtaagggagcccagtgctgagccggatgggttggagcggtgttaaagttatttatccatgtcttctcctgtcccccgcacccctagtcttttctagtaggagttgccaagcacatctggaaagctgtgttccccgaccccccactcccccaacagcaggaggggtgtaacccagggaagccacccctctgacatatgtgctggggggaggggcagagccttgcccctaggaatcctgtggcggtgggttgttgactgatgtgggattgctgtgtctcttgtgctgtcggagagctggcaggtagtggaggggccttgggagctcctaggctgaacttggggctgtcctccaaggatccaggatggagggatggagctgggtcactcaaacctaaggcctttctgggtctagcatttattgcttcctggcttctggcttggcttcttttcgtccattctcatctgccagtgtctggactccctgggccttcaggcaggcattttcaggagcacaggccatgtggttggtctggagccctgtgtcaaggagagtgtgcgtgcttggtggagcagggttgctggagtagtgtgaaaaaaagcagatgagctggcctctggagacaaagctgtgtggcaagactgctggtttagtgggctctgaacaccaagaacagggccgggagtctgatacttgggggctgaactgagtcctgtggcgcaggattgttgcctggaagtgaacgttccgtcttgtgccattgagactgtgaagatctctgggtcccacaggacgagcagtagacttggaaggctgggaagaggctccccagctgcctgccttgggaggtcagagctctcaggtgggtcggcaggccagtgtcgggctgggggagggaggttgtagtagagtgcctgtggcccagcttctctggtcagttggctctgagtgctgctgtgtgcccagcaacctctccctgcggtgtttttctgccagttgttggaacttgtagattagtcactgagtttttacgaccgattcctgaaaagaaaaatctccctctggttgctgcctctgtgtagaggaagaagcagcccgagggagtcaggcctttaattaaagcaaaaccgaaatgattgtcgaagttgctggaaggagaagagaaggcgcaggtggggcaggggtgatgagtcctgttgtgctgcatgatacctgctctggggacaggtaggcacgatcccatcctcgatccttggtcttggccagcagcccagccttctccacaagctgcagtcgcagattaatcctcacgtagtgttttctttccgtagatcagatttctcattttgttaataagcgcagcctcccatccacttgaagtcagctgttgtggacgaggagcaacagggttttgcattattgagctgatagcctgccgcctcccctcaagtccttattgtttgcggggtcagatctgaggggtggggaagtgccatttaatcagcagccagcccctggagaagagctggcggggcagttctggagagtgagagccgtgaggaaggaataaagttcagtttacccaggggacttgtggttccaaccttattgcttggtctgttggcctggagcagtcagccccaccccataccttgtcctgcccgctgcccccagtacctgatccctgggagagtggggcacttcttctgggctgctcttgctggcctgggaggcagctttcaccgcgggaagaaagaacacattgggttcctcccttcttgtctcctccgagcctggcctaggacggacccctgtggggcagtgagaggggaactggacttggtcggtcgcaaagtctgtagtgcattgctggctctgccatttactcccgtcatgaccttgagcagtgattgactctcctgccgggtttctacaatgggaacagaactggagtttacattcatgtatcgctgttttctggagctcagcctagggaaggcagacactcaacaaatgattataagatggggtgataagggctggcatctagcggagcgcagagggcatagcggtggcgtgggaggagccggccgtgggctggctgagaaccctggatgccatgtgggttggggttggcctggaggggaggggttttaaccaggaagtgactgctactgggttttaaaaggcagtggtagggtagagggtggcagtggagacagctggagagcactgaggacgcggacccacgggtactgtgtgagctgtgaagcccgcttgggagaccccactgccagccaggcatgtatgtggctctttttcaagctttttattcattccgccacattttctgagcgcaaagtcagtgcctggcccccttggtttagaccaagtcatgttggcccctgctttctggtgctcacagacttgcctgggcggggtgatagaggcgcttgcagttcagcacgcggcccgttctcctctggaggagggaaggagctgcttttggaagttaagtagcttgctgggggctggagggtaaatgcctttgactccaccgcctgtggaggcccatatagtgtggtgtctggagagatctgagatcgcactagggaggatggggctgaaagccccctccctaagagaggtcctggctcccatttaggggcttctgaaccagcccttccagtttgactctgcctggcaccgccagggttcgcttcctgctgggaggggccttgccctaagggttagggacctgggctgggggagggctctgaggaggggctgggccccgagggactgagggactgcaggcttgcttgccttgagcccagttttagctgggagtggcaaagcgagaaaagctggtggggatgggagctctgtgtgggcccccagtgagcttgataagggaggcgaggctgggagctggttccagcccgccaaagttcaggagggaagggccagactgcctgagaggggtgtggcgggactgagtggggagagggactccaagaaactgcttgggaccctcgggaaggtggccaggctttggggagcccctccttctaactattcaatttattttttatggtaatgttagtgggtggagagtgggagtgcagcctcggtgttagaacagggggacttgggggtccttctaatggtgagagggaacagggatgggtcagctaggtgcctcttacct

SEQ ID NO: 1425 - DNA, 6000 bp, Homo sapiens
acagacgtgagccattgtgcccggccggaaacttccctttttaaaaccatcagatctcttgagactcactcactatcacaagaagagtgcagaaaagacctgcccacataattcgatcaccttccaccaggttcctcccacgatgtgggaattgtgggagttacgactcaagatgagatttgggtggagacacagccaaaccatatcagccaggtatcttcactccttggtatttactctggggaacccagcagagaaaagggtggggatttatatacaagtgtagtttataaaactttagcatggtaaacaagataaggatctatcaaaaagggcatggctaaatactttgcggtacaggagttccatggaccacaggcaataactgaaaatcatgcttctgaactatctttaataggaaaatgctcaaaattcaatgtgctgttatggttacaaaatattcataaggtaaaaaatattttgtagaacatatcatagaaaaatgactggatggaagtacagaaatattactatctctacgttacatatatatgtattactatttgctatctttaggtggagggagtctgagtagtataaagttttttttacttctcttacatcaagatttgttacattaaatttatattcaaatcacaataagggcctgatgcagtggctcacgcctgtaatcccagaactttgggaggccaaggcaggcggatgccctgaggtcaggagttggagactggccaggccaacaaggtgaaaccccgtctctactaaaaatacaaaaattagccgggcatggtagcacgcgcctgtaatcccagttacttgggtggctgaggcagaagaatcgcttgaacccgggaggcggaggttgcagtgactcaggatcgcgccactgcactccagcctaggcgacagagcgagactccgtctcaaaaaaaaaaaaaaataagaagaacagtaaatcatcaaaaaaataaacccaatgacaaccacagaaagagccttgcaagccctcttgggaggaatgactgggagaacaccaggtacccgccctgatgaagacgccgcagcaactacagtcttccccgattggcagcagcccgagttggggggtgggggggggtgggactttgtgcatcacttccgggggcggggcagcggtcgtctccgcacgcgcgggagcggtcggtatccatggcaaccagcggggccagcctaaggcccgcccgccaccgccaccgcgccggccccgcccgcacaaaggccgcgcggtgacccgccctctgccgcgaccccggccccgcccctgccccggccccggcctggcccggtccctgcacctgccggaggccgcccgccgccatcgccagcgccgtcgcttggctgcgctgaccgggaagcagttctcggcggtccgcgcggtgattcatcggcctggccgcgtcccccgcgcgggccatcttggtcacggccggcggcggacagagccgcggaggaaccgcgagaccccaggtacgcgtgcccccggccccctgcccggccgggccccgccactgtggtggcccccaggcccgcggccgccaaggagcagccccctttgttctcccccgggcgggcgcggggcgggcgccgcggggctttgtgcagcctcgccacccacgcgcgggccctccacgccgcccctcaccctcctgcccgctagtcgcaactgaaaccttgaaaacatcttttcttaatcctccagggcccagagcaggtccagccacccgtctggctccgtagtccgcgaagtctgcagtaaaggagccgcgtgggaccggggccgaagtccctagggcctggcaccgcgtgcccctctctcgggccctcggcttgggggtctcgcagcgccctgccgtcgtgcaccccacactgcccccatttctacaggggcccacctggtcaccacaccctcttggtccacccgcggatctcagcgtgtggctgacctctggccagcatggtgcagccgcagacgtccaaagctgaaagcccagccttggcagcgtctccgaatgcccagatggatgacgttattgacaccctgacctccctgcgcctcaccaactcggcgctgaggcgggaggcttccaccctgcgggcggagaaggccaatctcaccaacatgctggagagcgtgatggcagagctgaccttgttacgcaccagggcgcggatcccgggggctctgcagatcaccccgcccatctcctcaattacttcaaacgggactcgacccatgaccacacctccaacctctctgcccgagcccttttccggggacccaggccggttggcggggttcctgatgcagatggacagattcatgatcttccaggcctcccgcttcccgggtgaggccgagcgtgtggccttccttgtgtctcgactgactggggaggcggagaagtgggctatcccccacatgcaacctgacagccccttgcgcaacaactatcaggggttcctggcagagttgcggagaacctacaagtctccgctccggcatgcgcggcgcgcccaaatcaggaagacttctgcctctaatagggctgtgcgagagaggcagatgctctgccgccagctggcctctgcgggcacggggccttgcccagtgcatccagcttccaacgggactagtccagcgccagccctgcctgcccgagcacggaatctttaagaatccgccagcacttggtagcgtctgcagccacccaggtagcatacgctctttgctgtgtagaagaaatgcccatacgacagctttgcccctgtttgaagacctcccttcttgcctctccagacgtgttccccgaggagatcttccttccgtccttcctggcgccctggttgcccaccttgccgtgcttcctcttacgtgctagctttgtacctatcgctcactgcatgctcgcctccctcttgctggcatcccggcctgtttcaatgactaccgctctgctacttaggcacagggactccgccgcacgctgacggaccacgagggctgaccccttccagcctgacttggttcatggaggctcctactctgccctctccaagctcccctggcggctccccacctggttgcccagttcctattgatgagctctggacagaaagatgcccgtttggccaggctggtggcttgatgggtgtacctggagagggggtctggcttcctgcccaagatgcctcccagccctgccagggcccggtgcagcgggcagggcctcatctgtgctgtagtggtcgagtggttgctgcaaggagcgtagttctgccatgtctgggggccaggttccactctgcacatgaatatgcagtctgggaggccccactgctctcactgggaaggaccaatgttgcacctctgttaatgcctgacttcagctgctggtgttctgatggagccagaggcttggggaatctggaacttgcctgctaaataaggtcgtggtggactctcagccattgggcaggtctatcaggctgcaggttcctacacacccacgcctgagggtcatagcaggctaagggtggataccagcgactccctttgctgcccaggatctccatgggcagtgccacagcggctgatgctcagtcactcctgcttctaccccctgtcactgatggcgagccttgcccagcttgagacctgttcccatctctattcaggtgccatgtggccttcactgcagccctgcagccacccacgcaccatctgtgggtctccaaaggcaccttgtagcatgtactccccgtgcctgggcaatcagatgggctgcctttgtccaagggaaaacagactcccttcgggaaacatccttaagcacttaaggccggggggggtgtctgcctctggcaacccagccagggtcttggtggcatttgtaaaagcaaagagctgtggactgccgtggtcctagtgtggtgacaatgcagcactggcatgcatgtcctccttctgaaggacctcatccttcctcacagggggatgaccaagaaatcattttgtggctgagtttggccacgccctttggactgtgctgttccgccatatttcaatgccaaatgaaccacattgacatgacctggaccatagggcttcctatcctgggctcagctgcccctgtctgaagggtcttggcttgattgcagaaggacaacctccgcacccacctaaagacatgtatatgtcttgggatcccagagattgggtccttgggcctggcttcttaagagttttgatgatgctgggaaaagtgactgcgattctgaagaaccgctgccttgcaaggtcaaggacattcagtggttgctggggtccgcagactactgccacccactcaccatcaactctgttagcccaattgccctgctgaacaactgcctgaatacaggctttaggttcccctggactccagccaaggctgttcaggtgggaccatggtgctctttaagcgtgatcggagggaagacacacagcagggccaccattccatgaatgggaggtgtacagatcactttctctttgtgctcagttctgttctgtctccagcagctatattggtaagactagtacctgccagggagaggtgcccccaagtgaaggggtacagtggcacctgggaaaaggcacctggaaggtttccatgtggcccagcccagcatggaagcagggtgggaactctgctgtgtcgccagcgctcactctactcgagtggctttttgaaagccctaccatgtctgtgtcaggcctgtgctgcttcacatcctacagctgcctaggaaaggccggccacgctccctgtccacacactccctgtccacacactccctgtccacacactccctgtccacaactgcagccgggccctctgcctatgggcacccaatccaagcagctgctccacctttgtttggcatggtgatttgtgttttttctcttggtgcttatgtgtgtgggcttgggacgagtgctggtatgcacttaggaccttcttgatagctccctgcactttggaacacggagcagatgagagagggtcggggcttgccctccaccttggacttggaagaagcccacattggagaggtgaggaccccatggtggctctagtggaagatacgttagtctccagctaaggaggatgaggcgcagccccagagggagacctcagtgataggggatcaggctaagaaagtgggggaagggagatgctttgtacatattttggggttataatttctctaaattttaggagaacgggtattgattgataaaagggacaggcagtagtgttcaacagtgcatgtgaaggaaagttctgttttccatggttttgacattctttggactgtattgtgactgctgtctggtccacatggtacccctttggtaagtaggcttcagtgcataccagggtatcactggagatgggagttagtgaaggggtgactccctggcctagtatagtgtgaccctgggactaacttaatgtcctaaagcattttggtgacttctagggaatagcaaagacctatttcattgtccccaggtaagtatgtgatgagcaatgaggaggagtggaaaacaaaacccagaaagtgcggcaggaccagcctgacgcacacgctcctgttgtcatggcagacagccgccttgggtgggcaccaccctggcagttccagcctgtaggggagtgaagggacatggctgagctgggcatgtgctgaggttgacttagggaacaagccctgggattggacaaaagggcccatgctgcagccactgactgggggcagagctctgggtggaagagggaagagatcctaatggaggcgcctccatctgcaaccacagttgtaaggctcatggcacctctgcttggaaagcactggtttagggacttagagaggtaggcacaaggtgggtctcct

SEQ ID NO: 1426 - DNA, 6000 bp, Homo sapiens
tggaccattgtgaagtttatcttgtttatcgattggagcccacttatatcctttcaatattttctttgcatattttattgttctgtgttcacagcccagacaggcacctcagggcatgaatcatagcttcatctggatgagaagccaaatattcttctcctgtttttacttttaaaagtccattaatttttattttgctctattttatgggctgccatctaatttccccttggaagtaaagtgaaatacagataaattatttatttctttaaatgttttatcatttctgaaattggggtgcatcttatattcaatgcacctgggaatttaagattcatggtgtcaaccacacttagaattgcagcagacacttcactaatgtgcccagtatccaggggcctagacagacagagagacagagagacagatggagtgactcccacgagtggatgggattcctctgtgtgtttagaagaacctggaggggtagaaggctgcaggctcatttctgcttttgaagtcattgacctcagtcaaggttaacacagctcctgcccccatctgatttagaaggtctcatggaagaagtttaaggacacacagtcttctttatttccctcttgcttcatgctctagaagttttcacctggtcacaaagggtgcacactttggcacactggggtacaagtatcctttccaagttctgacactgtagttgtgggaccagcccaaactgggcctaccctgttggtaacaaaatgtcaagctgccttttaggtagaacagagcccaaaactgcaagtcatgtagcctgggcatgtgccgtagaaaaaactttgacctccaacaacacccagaaccaatgattcgtcctcttagaaccaagaagactgggacatgaccagaagttgaaaaccagaactcattcacaagcaaaggggtccatcagcctggaaggtctggggctaaaatctactttaatatacattaccacatatggtcaaatttgaagccctccaatcagaccctggcaagccagcattgataaatactttctcttgccacctgatcccttaaaacttgccccatacctcaaatcagggagacggatttgagcccacctcctctctccttgctggtcagttttgcaataaagcttttcttttctcaaaagctggtgccatatgtatcggcttccgtgtgcatcaggcagcaagaccacttgctcagtaacaacatccttatgccctaattcccttgagtgaaaactgcaggtctgagtgaatccagctctgtcccaggcctgcctaaagagtgcagatggttcccagcttcagcctccttgaatactgtgtcctcaaaagactggcatactgggtattgttaactgaagaatgacgaggttcataaacctggaaaggagagttttatttatcataaaaggttgcaccctgcagagtggccatttgaataggctgggaagtgtagcctctggccagaagccataaacaggcacttcaagggttggaagagtaagacaggaatttatgttgatcagggtggccaaatatacatattcaataagctacaggaggagttataaatatttatgagaagagaaatatgcacatgtgcaactgagcttcatcccccttcatgggtagcacctacaaaaaatggcagtgttagcgtgatctgaaggtggagttttcagccctctaatgtcaaaaggtgtatcagaggacacaaaagctttcactgcacatcctccacaggctggccagaaccactccagggttggtggtctcttactaggaaagaatgctggtcagttgttgtgtgccacaaaaagggaggggcagtgtcagatggttggttggtatcaatgttgaagtctttcaaagaggcttgtttctgtttaactcttaaggaaaaaagcctaatggtggttatcggttatggagcgggggcagataatgaagtgtgtccaacctcccatcccatcatggccaggaactcggcttcccaggtttctctggggtcccctggccaagagggggtctgttcagttggttggggggggggggcttaaatttttatttttatttctcagtatcttttctctccagccatgccagcttgaaactgaccatgcagaaggatcacctaggtcaagctgggaatccagacccggaatcaaacagttcttaccctttggccagtgtattagtctgttttcacgctgctgataaagacatacctgagactgggcaatttacaaaagaaagaggtttattggacttacagttctgtgtggtggggaggctcacaatgacggcagaaggtgaaaggcacggaggagcaagtcaggtcttacatggatggcggcaggcaaagagagaacttgtgcagggaaacttcccttttttttttttttaatttttttttgagatggacttttgctctgttgcccaggctggagtacagtggtgcaatgtctgctcactgcaagctccgcctcctgggttcacgccattctcctggctcagcctcccaagtagctgggactacaggcgcccaccaccacgcctggctaattttttgtatttttagtagagacggggtttcaccatgttagccaggatggtctcgatctcctgacctcgtgatccacccgccttggcctcccaaagtgctgggagtacagacgtgagccattgtgcccggccggaaacttccctttttaaaaccatcagatctcttgagactcactcactatcacaagaagagtgcagaaaagacctgcccacataattcgatcaccttccaccaggttcctcccacgatgtgggaattgtgggagttacgactcaagatgagatttgggtggagacacagccaaaccatatcagccaggtatcttcactccttggtatttactctggggaacccagcagagaaaagggtggggatttatatacaagtgtagtttataaaactttagcatggtaaacaagataaggatctatcaaaaagggcatggctaaatactttgcggtacaggagttccatggaccacaggcaataactgaaaatcatgcttctgaactatctttaataggaaaatgctcaaaattcaatgtgctgttatggttacaaaatattcataaggtaaaaaatattttgtagaacatatcatagaaaaatgactggatggaagtacagaaatattactatctctacgttacatatatatgtattactatttgctatctttaggtggagggagtctgagtagtataaagttttttttacttctcttacatcaagatttgttacattaaatttatattcaaatcacaataagggcctgatgcagtggctcacgcctgtaatcccagaactttgggaggccaaggcaggcggatgccctgaggtcaggagttggagactggccaggccaacaaggtgaaaccccgtctctactaaaaatacaaaaattagccgggcatggtagcacgcgcctgtaatcccagttacttgggtggctgaggcagaagaatcgcttgaacccgggaggcggaggttgcagtgactcaggatcgcgccactgcactccagcctaggcgacagagcgagactccgtctcaaaaaaaaaaaaaaataagaagaacagtaaatcatcaaaaaaataaacccaatgacaaccacagaaagagccttgcaagccctcttgggaggaatgactgggagaacaccaggtacccgccctgatgaagacgccgcagcaactacagtcttccccgattggcagcagcccgagttggggggtgggggggggtgggactttgtgcatcacttccgggggcggggcagcggtcgtctccgcacgcgcgggagcggtcggtatccatggcaaccagcggggccagcctaaggcccgcccgccaccgccaccgcgccggccccgcccgcacaaaggccgcgcggtgacccgccctctgccgcgaccccggccccgcccctgccccggccccggcctggcccggtccctgcacctgccggaggccgcccgccgccatcgccagcgccgtcgcttggctgcgctgaccgggaagcagttctcggcggtccgcgcggtgattcatcggcctggccgcgtcccccgcgcgggccatcttggtcacggccggcggcggacagagccgcggaggaaccgcgagaccccaggtacgcgtgcccccggccccctgcccggccgggccccgccactgtggtggcccccaggcccgcggccgccaaggagcagccccctttgttctcccccgggcgggcgcggggcgggcgccgcggggctttgtgcagcctcgccacccacgcgcgggccctccacgccgcccctcaccctcctgcccgctagtcgcaactgaaaccttgaaaacatcttttcttaatcctccagggcccagagcaggtccagccacccgtctggctccgtagtccgcgaagtctgcagtaaaggagccgcgtgggaccggggccgaagtccctagggcctggcaccgcgtgcccctctctcgggccctcggcttgggggtctcgcagcgccctgccgtcgtgcaccccacactgcccccatttctacaggggcccacctggtcaccacaccctcttggtccacccgcggatctcagcgtgtggctgacctctggccagcatggtgcagccgcagacgtccaaagctgaaagcccagccttggcagcgtctccgaatgcccagatggatgacgttattgacaccctgacctccctgcgcctcaccaactcggcgctgaggcgggaggcttccaccctgcgggcggagaaggccaatctcaccaacatgctggagagcgtgatggcagagctgaccttgttacgcaccagggcgcggatcccgggggctctgcagatcaccccgcccatctcctcaattacttcaaacgggactcgacccatgaccacacctccaacctctctgcccgagcccttttccggggacccaggccggttggcggggttcctgatgcagatggacagattcatgatcttccaggcctcccgcttcccgggtgaggccgagcgtgtggccttccttgtgtctcgactgactggggaggcggagaagtgggctatcccccacatgcaacctgacagccccttgcgcaacaactatcaggggttcctggcagagttgcggagaacctacaagtctccgctccggcatgcgcggcgcgcccaaatcaggaagacttctgcctctaatagggctgtgcgagagaggcagatgctctgccgccagctggcctctgcgggcacggggccttgcccagtgcatccagcttccaacgggactagtccagcgccagccctgcctgcccgagcacggaatctttaagaatccgccagcacttggtagcgtctgcagccacccaggtagcatacgctctttgctgtgtagaagaaatgcccatacgacagctttgcccctgtttgaagacctcccttcttgcctctccagacgtgttccccgaggagatcttccttccgtccttcctggcgccctggttgcccaccttgccgtgcttcctcttacgtgctagctttgtacctatcgctcactgcatgctcgcctccctcttgctggcatcccggcctgtttcaatgactaccgctctgctacttaggcacagggactccgccgcacgctgacggaccacgagggctgaccccttccagcctgacttggttcatggaggctcctactctgccctctccaagctcccctggcggctccccacctggttgcccagttcctattgatgagctctggacagaaagatgcccgtttggccaggctggtggcttgatgggtgtacctggagagggggtctggcttcctgcccaagatgcctcccagccctgccagggcccggtgcagcgggcagggcctcatctgtg

SEQ ID NO: 1427 - DNA, 6000 bp, Homo sapiens
ctgttcttttcacaaatattattccttccttgttctcactgagcatcccaaatatacttactttaaagtctgtttttttcagactcttctattattttaatttcctctggagttaattcaccttacagttattgatttttcttgactattattcttagcataagatgtcttcatgggcttcagaattttgaatctcagactcattttgtgttgaaagactttgtctctctttctctcttggtactcccttcccccatctagcagtttggggtgggtccacttgatgtctggtctgtggtaaagaaatatatatatatacacacacatatatgcatattatatatacacacacatacacatatacatacatatatacatatatgtgtataatatatatgtgtatatatattttgttggtggtttggaatcctgaccctcttggtctacttgttaaaccaggggacaagagattaagatgactatatctgtgttctcctttgacccagggccacactttcacataaactgtcacaccccacccccatgaaatgactgaatccaatttttcagactttttttctgacacaggggtgactcctctctcctccatcccctggattcaaataggaagcctggctgtgttcccagccttgggtccctattatgtctcaggtccagagcccggcaggcccacgtcaatactcagaagtttgtgtttctggaccattgtgaagtttatcttgtttatcgattggagcccacttatatcctttcaatattttctttgcatattttattgttctgtgttcacagcccagacaggcacctcagggcatgaatcatagcttcatctggatgagaagccaaatattcttctcctgtttttacttttaaaagtccattaatttttattttgctctattttatgggctgccatctaatttccccttggaagtaaagtgaaatacagataaattatttatttctttaaatgttttatcatttctgaaattggggtgcatcttatattcaatgcacctgggaatttaagattcatggtgtcaaccacacttagaattgcagcagacacttcactaatgtgcccagtatccaggggcctagacagacagagagacagagagacagatggagtgactcccacgagtggatgggattcctctgtgtgtttagaagaacctggaggggtagaaggctgcaggctcatttctgcttttgaagtcattgacctcagtcaaggttaacacagctcctgcccccatctgatttagaaggtctcatggaagaagtttaaggacacacagtcttctttatttccctcttgcttcatgctctagaagttttcacctggtcacaaagggtgcacactttggcacactggggtacaagtatcctttccaagttctgacactgtagttgtgggaccagcccaaactgggcctaccctgttggtaacaaaatgtcaagctgccttttaggtagaacagagcccaaaactgcaagtcatgtagcctgggcatgtgccgtagaaaaaactttgacctccaacaacacccagaaccaatgattcgtcctcttagaaccaagaagactgggacatgaccagaagttgaaaaccagaactcattcacaagcaaaggggtccatcagcctggaaggtctggggctaaaatctactttaatatacattaccacatatggtcaaatttgaagccctccaatcagaccctggcaagccagcattgataaatactttctcttgccacctgatcccttaaaacttgccccatacctcaaatcagggagacggatttgagcccacctcctctctccttgctggtcagttttgcaataaagcttttcttttctcaaaagctggtgccatatgtatcggcttccgtgtgcatcaggcagcaagaccacttgctcagtaacaacatccttatgccctaattcccttgagtgaaaactgcaggtctgagtgaatccagctctgtcccaggcctgcctaaagagtgcagatggttcccagcttcagcctccttgaatactgtgtcctcaaaagactggcatactgggtattgttaactgaagaatgacgaggttcataaacctggaaaggagagttttatttatcataaaaggttgcaccctgcagagtggccatttgaataggctgggaagtgtagcctctggccagaagccataaacaggcacttcaagggttggaagagtaagacaggaatttatgttgatcagggtggccaaatatacatattcaataagctacaggaggagttataaatatttatgagaagagaaatatgcacatgtgcaactgagcttcatcccccttcatgggtagcacctacaaaaaatggcagtgttagcgtgatctgaaggtggagttttcagccctctaatgtcaaaaggtgtatcagaggacacaaaagctttcactgcacatcctccacaggctggccagaaccactccagggttggtggtctcttactaggaaagaatgctggtcagttgttgtgtgccacaaaaagggaggggcagtgtcagatggttggttggtatcaatgttgaagtctttcaaagaggcttgtttctgtttaactcttaaggaaaaaagcctaatggtggttatcggttatggagcgggggcagataatgaagtgtgtccaacctcccatcccatcatggccaggaactcggcttcccaggtttctctggggtcccctggccaagagggggtctgttcagttggttggggggggggggcttaaatttttatttttatttctcagtatcttttctctccagccatgccagcttgaaactgaccatgcagaaggatcacctaggtcaagctgggaatccagacccggaatcaaacagttcttaccctttggccagtgtattagtctgttttcacgctgctgataaagacatacctgagactgggcaatttacaaaagaaagaggtttattggacttacagttctgtgtggtggggaggctcacaatgacggcagaaggtgaaaggcacggaggagcaagtcaggtcttacatggatggcggcaggcaaagagagaacttgtgcagggaaacttcccttttttttttttttaatttttttttgagatggacttttgctctgttgcccaggctggagtacagtggtgcaatgtctgctcactgcaagctccgcctcctgggttcacgccattctcctggctcagcctcccaagtagctgggactacaggcgcccaccaccacgcctggctaattttttgtatttttagtagagacggggtttcaccatgttagccaggatggtctcgatctcctgacctcgtgatccacccgccttggcctcccaaagtgctgggagtacagacgtgagccattgtgcccggccggaaacttccctttttaaaaccatcagatctcttgagactcactcactatcacaagaagagtgcagaaaagacctgcccacataattcgatcaccttccaccaggttcctcccacgatgtgggaattgtgggagttacgactcaagatgagatttgggtggagacacagccaaaccatatcagccaggtatcttcactccttggtatttactctggggaacccagcagagaaaagggtggggatttatatacaagtgtagtttataaaactttagcatggtaaacaagataaggatctatcaaaaagggcatggctaaatactttgcggtacaggagttccatggaccacaggcaataactgaaaatcatgcttctgaactatctttaataggaaaatgctcaaaattcaatgtgctgttatggttacaaaatattcataaggtaaaaaatattttgtagaacatatcatagaaaaatgactggatggaagtacagaaatattactatctctacgttacatatatatgtattactatttgctatctttaggtggagggagtctgagtagtataaagttttttttacttctcttacatcaagatttgttacattaaatttatattcaaatcacaataagggcctgatgcagtggctcacgcctgtaatcccagaactttgggaggccaaggcaggcggatgccctgaggtcaggagttggagactggccaggccaacaaggtgaaaccccgtctctactaaaaatacaaaaattagccgggcatggtagcacgcgcctgtaatcccagttacttgggtggctgaggcagaagaatcgcttgaacccgggaggcggaggttgcagtgactcaggatcgcgccactgcactccagcctaggcgacagagcgagactccgtctcaaaaaaaaaaaaaaataagaagaacagtaaatcatcaaaaaaataaacccaatgacaaccacagaaagagccttgcaagccctcttgggaggaatgactgggagaacaccaggtacccgccctgatgaagacgccgcagcaactacagtcttccccgattggcagcagcccgagttggggggtgggggggggtgggactttgtgcatcacttccgggggcggggcagcggtcgtctccgcacgcgcgggagcggtcggtatccatggcaaccagcggggccagcctaaggcccgcccgccaccgccaccgcgccggccccgcccgcacaaaggccgcgcggtgacccgccctctgccgcgaccccggccccgcccctgccccggccccggcctggcccggtccctgcacctgccggaggccgcccgccgccatcgccagcgccgtcgcttggctgcgctgaccgggaagcagttctcggcggtccgcgcggtgattcatcggcctggccgcgtcccccgcgcgggccatcttggtcacggccggcggcggacagagccgcggaggaaccgcgagaccccaggtacgcgtgcccccggccccctgcccggccgggccccgccactgtggtggcccccaggcccgcggccgccaaggagcagccccctttgttctcccccgggcgggcgcggggcgggcgccgcggggctttgtgcagcctcgccacccacgcgcgggccctccacgccgcccctcaccctcctgcccgctagtcgcaactgaaaccttgaaaacatcttttcttaatcctccagggcccagagcaggtccagccacccgtctggctccgtagtccgcgaagtctgcagtaaaggagccgcgtgggaccggggccgaagtccctagggcctggcaccgcgtgcccctctctcgggccctcggcttgggggtctcgcagcgccctgccgtcgtgcaccccacactgcccccatttctacaggggcccacctggtcaccacaccctcttggtccacccgcggatctcagcgtgtggctgacctctggccagcatggtgcagccgcagacgtccaaagctgaaagcccagccttggcagcgtctccgaatgcccagatggatgacgttattgacaccctgacctccctgcgcctcaccaactcggcgctgaggcgggaggcttccaccctgcgggcggagaaggccaatctcaccaacatgctggagagcgtgatggcagagctgaccttgttacgcaccagggcgcggatcccgggggctctgcagatcaccccgcccatctcctcaattacttcaaacgggactcgacccatgaccacacctccaacctctctgcccgagcccttttccggggacccaggccggttggcggggttcctgatgcagatggacagattcatgatcttccaggcctcccgcttcccgggtgaggccgagcgtgtggccttccttgtgtctcgactgactggggaggcggagaagtgggctatcccccacatgcaacctgacagccccttgcgcaacaactatcaggggttcctggcagagttgcggagaacctacaagtctccgctccggcatgcgcggcgcgcccaa

SEQ ID NO: 1428 - DNA, 6000 bp, Homo sapiens
taatgagaagacctagtaggtttggtgcttgtgtatgcaaaggcatgaggcacacggaagtgaggagctgggtttcctcccatctctaccgcatctgcgctgtgccaactgccaccccacccaaactcaggtccccaagagacagagacacaggggctgtctgttccacgtggaaggccctacaccccaaccttctcccctactctggggagcttctcctgttggcccaacagtctgctcttgcttcccttacccaggagacccaccttgtgcctacctctctaagtccctaaaccagtgctttccaagcagaggtgccatgagccttacaactgtggttgcagatggaggcgcctccattaggatctcttccctcttccacccagagctctgcccccagtcagtggctgcagcatgggcccttttgtccaatcccagggcttgttccctaagtcaacctcagcacatgcccagctcagccatgtcccttcactcccctacaggctggaactgccagggtggtgcccacccaaggcggctgtctgccatgacaacaggagcgtgtgcgtcaggctggtcctgccgcactttctgggttttgttttccactcctcctcattgctcatcacatacttacctggggacaatgaaataggtctttgctattccctagaagtcaccaaaatgctttaggacattaagttagtcccagggtcacactatactaggccagggagtcaccccttcactaactcccatctccagtgataccctggtatgcactgaagcctacttaccaaaggggtaccatgtggaccagacagcagtcacaatacagtccaaagaatgtcaaaaccatggaaaacagaactttccttcacatgcactgttgaacactactgcctgtcccttttatcaatcaatacccgttctcctaaaatttagagaaattataaccccaaaatatgtacaaagcatctcccttcccccactttcttagcctgatcccctatcactgaggtctccctctggggctgcgcctcatcctccttagctggagactaacgtatcttccactagagccaccatggggtcctcacctctccaatgtgggcttcttccaagtccaaggtggagggcaagccccgaccctctctcatctgctccgtgttccaaagtgcagggagctatcaagaaggtcctaagtgcataccagcactcgtcccaagcccacacacataagcaccaagagaaaaaacacaaatcaccatgccaaacaaaggtggagcagctgcttggattgggtgcccataggcagagggcccggctgcagttgtggacagggagtgtgtggacagggagtgtgtggacagggagtgtgtggacagggagcgtggccggcctttcctaggcagctgtaggatgtgaagcagcacaggcctgacacagacatggtagggctttcaaaaagccactcgagtagagtgagcgctggcgacacagcagagttcccaccctgcttccatgctgggctgggccacatggaaaccttccaggtgccttttcccaggtgccactgtaccccttcacttgggggcacctctccctggcaggtactagtcttaccaatatagctgctggagacagaacagaactgagcacaaagagaaagtgatctgtacacctcccattcatggaatggtggccctgctgtgtgtcttccctccgatcacgcttaaagagcaccatggtcccacctgaacagccttggctggagtccaggggaacctaaagcctgtattcaggcagttgttcagcagggcaattgggctaacagagttgatggtgagtgggtggcagtagtctgcggaccccagcaaccactgaatgtccttgaccttgcaaggcagcggttcttcagaatcgcagtcacttttcccagcatcatcaaaactcttaagaagccaggcccaaggacccaatctctgggatcccaagacatatacatgtctttaggtgggtgcggaggttgtccttctgcaatcaagccaagacccttcagacaggggcagctgagcccaggataggaagccctatggtccaggtcatgtcaatgtggttcatttggcattgaaatatggcggaacagcacagtccaaagggcgtggccaaactcagccacaaaatgatttcttggtcatccccctgtgaggaaggatgaggtccttcagaaggaggacatgcatgccagtgctgcattgtcaccacactaggaccacggcagtccacagctctttgcttttacaaatgccaccaagaccctggctgggttgccagaggcagacaccccccccggccttaagtgcttaaggatgtttcccgaagggagtctgttttcccttggacaaaggcagcccatctgattgcccaggcacggggagtacatgctacaaggtgcctttggagacccacagatggtgcgtgggtggctgcagggctgcagtgaaggccacatggcacctgaatagagatgggaacaggtctcaagctgggcaaggctcgccatcagtgacagggggtagaagcaggagtgactgagcatcagccgctgtggcactgcccatggagatcctgggcagcaaagggagtcgctggtatccacccttagcctgctatgaccctcaggcgtgggtgtgtaggaacctgcagcctgatagacctgcccaatggctgagagtccaccacgaccttatttagcaggcaagttccagattccccaagcctctggctccatcagaacaccagcagctgaagtcaggcattaacagaggtgcaacattggtccttcccagtgagagcagtggggcctcccagactgcatattcatgtgcagagtggaacctggcccccagacatggcagaactacgctccttgcagcaaccactcgaccactacagcacagatgaggccctgcccgctgcaccgggccctggcagggctgggaggcatcttgggcaggaagccagaccccctctccaggtacacccatcaagccaccagcctggccaaacgggcatctttctgtccagagctcatcaataggaactgggcaaccaggtggggagccgccaggggagcttggagagggcagagtaggagcctccatgaaccaagtcaggctggaaggggtcagccctcgtggtccgtcagcgtgcggcggagtccctgtgcctaagtagcagagcggtagtcattgaaacaggccgggatgccagcaagagggaggcgagcatgcagtgagcgataggtacaaagctagcacgtaagaggaagcacggcaaggtgggcaaccagggcgccaggaaggacggaaggaagatctcctcggggaacacgtctggagaggcaagaagggaggtcttcaaacaggggcaaagctgtcgtatgggcatttcttctacacagcaaagagcgtatgctacctgggtggctgcagacgctaccaagtgctggcggattcttaaagattccgtgctcgggcaggcagggctggcgctggactagtcccgttggaagctggatgcactgggcaaggccccgtgcccgcagaggccagctggcggcagagcatctgcctctctcgcacagccctattagaggcagaagtcttcctgatttgggcgcgccgcgcatgccggagcggagacttgtaggttctccgcaactctgccaggaacccctgatagttgttgcgcaaggggctgtcaggttgcatgtgggggatagcccacttctccgcctccccagtcagtcgagacacaaggaaggccacacgctcggcctcacccgggaagcgggaggcctggaagatcatgaatctgtccatctgcatcaggaaccccgccaaccggcctgggtccccggaaaagggctcgggcagagaggttggaggtgtggtcatgggtcgagtcccgtttgaagtaattgaggagatgggcggggtgatctgcagagcccccgggatccgcgccctggtgcgtaacaaggtcagctctgccatcacgctctccagcatgttggtgagattggccttctccgcccgcagggtggaagcctcccgcctcagcgccgagttggtgaggcgcagggaggtcagggtgtcaataacgtcatccatctgggcattcggagacgctgccaaggctgggctttcagctttggacgtctgcggctgcaccatgctggccagaggtcagccacacgctgagatccgcgggtggaccaagagggtgtggtgaccaggtgggcccctgtagaaatgggggcagtgtggggtgcacgacggcagggcgctgcgagacccccaagccgagggcccgagagaggggcacgcggtgccaggccctagggacttcggccccggtcccacgcggctcctttactgcagacttcgcggactacggagccagacgggtggctggacctgctctgggccctggaggattaagaaaagatgttttcaaggtttcagttgcgactagcgggcaggagggtgaggggcggcgtggagggcccgcgcgtgggtggcgaggctgcacaaagccccgcggcgcccgccccgcgcccgcccgggggagaacaaagggggctgctccttggcggccgcgggcctgggggccaccacagtggcggggcccggccgggcagggggccgggggcacgcgtacctggggtctcgcggttcctccgcggctctgtccgccgccggccgtgaccaagatggcccgcgcgggggacgcggccaggccgatgaatcaccgcgcggaccgccgagaactgcttcccggtcagcgcagccaagcgacggcgctggcgatggcggcgggcggcctccggcaggtgcagggaccgggccaggccggggccggggcaggggcggggccggggtcgcggcagagggcgggtcaccgcgcggcctttgtgcgggcggggccggcgcggtggcggtggcgggcgggccttaggctggccccgctggttgccatggataccgaccgctcccgcgcgtgcggagacgaccgctgccccgcccccggaagtgatgcacaaagtcccacccccccccaccccccaactcgggctgctgccaatcggggaagactgtagttgctgcggcgtcttcatcagggcgggtacctggtgttctcccagtcattcctcccaagagggcttgcaaggctctttctgtggttgtcattgggtttatttttttgatgatttactgttcttcttatttttttttttttttgagacggagtctcgctctgtcgcctaggctggagtgcagtggcgcgatcctgagtcactgcaacctccgcctcccgggttcaagcgattcttctgcctcagccacccaagtaactgggattacaggcgcgtgctaccatgcccggctaatttttgtatttttagtagagacggggtttcaccttgttggcctggccagtctccaactcctgacctcagggcatccgcctgccttggcctcccaaagttctgggattacaggcgtgagccactgcatcaggcccttattgtgatttgaatataaatttaatgtaacaaatcttgatgtaagagaagtaaaaaaaactttatactactcagactccctccacctaaagatagcaaatagtaatacatatatatgtaacgtagagatagtaatatttctgtacttccatccagtcatttttctatgatatgttctacaaaatattttttaccttatgaatattttgtaaccataacagcacattgaattttgagcattttcctattaaagatagttcagaagcatgattttcagttattgcctgtggtccatggaactcctgtaccgcaaagtatttagccatgccctttttgatagatccttatcttgtttaccatgctaaagttttataaactacacttgtatataaatccccacccttttc

SEQ ID NO: 1429 - DNA, 6000 bp, Homo sapiens
agcagggaagataaaatcaccaggtgtacatgtaattcaggtgggagctctcagttgcacctgtttaattaaagctgagtaaagcaaaacgatggagtctaacttctactgacagactgacatacacacatgccacaaacatacacatgcatagatcagtagttctcaactggaggtgactgccccccaggagacatttggcaatgtctggaaacatttttaattcacaacaaagggatgctgctaaacatcttgtagtgcacaagatgatctccacaatgaacaaattatctggccccaaatatcaacagtgctgaagatggagaaaccctggcatagattatccctgtataaaggcacataaactggaactattaatggaaaaaggagtcataatttgactacacagctcttagggaatgaattttagatctgcagagttctgcacctcaaggtctatgctactttgaagatcataaaaacctggttaaaagcaatcaaaatcattgatctgctttggctagcaaaccgagagttcatgataacctgcattagcatataatgcaagtatcaatgctaaatcctgtacatatgcaaagaaaaataatggagacagaaaattaagttactgtgttgtctaaaatccattcctactcaaagtaggaagcaggcttaggaggctcaactccacaccctcctcaccctataccttcttcaagaccaaaaactagcctcaaacttcaaccttcaaatgctcctggatacaaggcaagaaataacgatttagggtggaccattcatcactatcagaagtgctaattccttcaaattcagtagcataaccagctgtctttccctctctctgacacacatgtacaaccacacaatgtgtaacagcattacacgcaagcaactggctctgaaaagattccatcagggcctcctgctctcagttctcactggttccttgtcctgagctcccaagttgatggctatgggtatagttttttctgcatataaattcttgtttaccttcccgacaggctttactagactagacagctgactgtcctatggtgcgctcatgagagtggcccaagaaaatagcaggttattggaaaacaagtagtaaggaaatgcttagagaaaatgcattcaaataatcagacagaacttggggaacagatggggatgccaactaatttacaaaaaccatgaaaaagatgcttatgtttgcatcatgctgaaaaatacgcaacatgccccaggctgaaaaatatgcatcatgcctactccaaaaacactgaacaaaatggaagcaactgaatttttttctaaaccttttttgcaggttactgcactgcactcactaatcaccattcccttttaatactcttttaattatactgcaaaacaatcttccctcccttatatcctaagaaaacacacccccttctcataaaaatgacatagcacatgctataatttaataagttgaaaataaatatttaaaagcttttgtgaaactgttctctaataaaactgtaagaactgtggtgtagagaggggaaaaatatttcactgtaattatgctcaaggcattgtcaaaaccattacatcgaatgaattctaatgctaaggcaggagaaagaagcactttgccaaagttttttttaactatttcaccaccaaagcagtttacccatggactctgccactgggttgagaagtcccatgaccatttgagaagaagctgctatgcttatcttttcaggctctcatgtgtctcagatagggatggggcatggccagaaaccatgggcaagccttttgccaagaccttggatgagatcatcatcaacgacaccccagcatcctgcctagcatcttctgaattttataagccacagcccttgggccagcctcctgttaagttctcaaaacagaaaaaactaaaagtggactcccacaaaaaagatgcagaattcttatacaattattttcaacatgttcctcctatggaatgtaattacagaaaattacagaaaagagcagattagaatctcaaaaagaaggactcaatttccaagacgatgaccctaaattagtttccttttaaaatgttctctcagccggcacggtggctcacacctgttatctcagcactttgggaggccgaggcaggtggatcacaaggtcaggagatcgagaccatcctggccaacatggtgaaaccctgtctctactaaaaatacaaaaattagctgggcgtggtggtgcgtgcctataatcccagctactcgggaggctgagacaggagaattgcttgaaccagggagtcagaggttgcagtgagtcgagatcgccccactgcactccagcctggcgacagagtgagactcaatttcaaaaaataaaataaaataaaataaataaaaagttctctcaaatccttacacaactttcaaaaagtaagttctgtgataaggatgatagacatgcatttgataattaactcattcctaatagaaaagatacattaaagttttatgaattctctatacctatcagaatgtaagtagtcataacttcatccatgacaagtcctttggttcaattccttagggattccattctattttagcttctgtataacagtactgcaaagctgtaattacatcctctataatcagcccattcgcagtataattgagagtgccacaaatttaaaactttgacctcactacttaagtggaagagatagtttatactacatgtaaaataccctcctgttatgctgacaaatttaaaacataaaagaagaaaatagcatgtcatagtagtcatcatttaagagggaattattatgttcctgataacagagtttctcttctgtcatgtctagcatcagactctcatcaataagcactttcctaccaaaccgcatgctcttctcaaatgttatgaaaacaccaaacccatacagatgtctctcaattctcctcatttaattgctatccactatgaggataagatatatgtgaagtagttcctagaataatgttgtgctagtgcaaaccaagttttaattggcacagaggtctatcagtgaagtgcataacttctaagcaatgtgactaaattttttcttaactaagaatcaaggacttgaacatcaaacattaattgaacactttggttcaagcaagccatttgataaatataataaccatattaataaagacagcagcaacaactaataccaaatgcttaccatgtgccaggacaatgagaatcttagatgaattaccgcatttaattttcataaaaagcccctgaagtaaataaaattattgcccccatttttcatatgaggaaattgaggctcagagatgttaaataactgcccagatcaattagttggtaagagtagggtcggccttgaagccaggtctaactgcatcatctcaagcttgtggctattttcacagccttcaggccagactgcctactaattacatgttacccaagcaatttaaactaaatattcttgcccttactcttttactaaggctcctggtgaaatgcagctgttactgatcaatggtagtcaaataaaaaagcaagataactttatcaagattttcctctgtcatcaaattcaggaactcttttgcatattgtatatgaactgacacagctcatataattacataatttctaaattacatatatatttaagtacattcgatgagttactaaagcatcaatcacaaaataaaatgcactttacatttttcagattaaagaagctaattgatcaagaaatcaagtctcaggaggagaaggagcaagaaaaggagaaaagggtcaccaccctgaaagaggagctgaccaagctgaagtcttttgctttgatggtggtggatgaacagcaaaggctgacggcacagctcacccttcaaagacagaaaatccaagagctgaccacaaatgcaaaggaaacacataccaaactagcccttgctgaagccagagttcaggaggaagagcagaaggcaaccagactagagaaggaactgcaaacgcagaccacaaagtttcaccaagaccaagacacaattatggcgaagctcaccaatgaggacagtcaaaatcgccagcttcaacaaaagctggcagcactcagccggcagattgatgagttagaagagacaaacaggtctttacgaaaagcagaagaggagctgcaagatataaaagaaaaaatcagtaagggagaatatggaaacgctggtatcatggctgaagtggaagagctcaggaaacgtgtgctagatatggaagggaaagatgaagagctcataaaaatggaggagcagtgcagagatctcaataagaggcttgaaagggagacgttacagagtaaagactttaaactagaggttgaaaaactcagtaaaagaattatggctctggaaaagttagaagacgctttcaacaaaagcaaacaagaatgctactctctgaaatgcaatttagaaaaagaaaggatgaccacaaagcagttgtctcaagaactggagagtttaaaagtaaggatcaaagagctagaagccattgaaagtcggctagaaaagacagaattcactctaaaagaggatttaactaaactgaaaacattaactgtgatgtttgtagatgaacggaaaacaatgagtgaaaaattaaagaaaactgaagataaattacaagctgcttcttctcagcttcaagtggagcaaaataaagtaacaacagttactgagaagttaattgaggaaactaaaagggcgctcaagtccaaaaccgatgtagaagaaaagatgtacagcgtaaccaaggagagagatgatttaaaaaacaaattgaaagcggaagaagagaaaggaaatgatctcctgtcaagagttaatatgttgaaaaataggcttcaatcattggaagcaattgagaaagatttcctaaaaaacaaattaaatcaagactctgggaaatccacaacagcattacaccaagaaaacaataagattaaggagctctctcaagaagtggaaagactgaaactgaagctaaaggacatgaaagccattgaggatgacctcatgaaaacagaagatgaatatgagactctagaacgaaggtatgctaatgaacgagacaaagctcaatttttatctaaagagctagaacatgttaaaatggaacttgctaagtacaagttagcagaaaagacagagaccagccatgaacaatggcttttcaaaaggcttcaagaagaagaagctaagtcagggcacctctcaagagaagtggatgcattaaaagagaaaattcatgaatacatggcaactgaagacctaatatgtcacctccagggagatcactcagtcctgcaaaaaaaactaaatcaacaagaaaacaggaacagagatttaggaagagagattgaaaacctcactaaggagttagagaggtaccggcatttcagtaagagcctcaggcctagtctcaatggaagaagaatttccgatcctcaagtattttctaaagaagttcagacagaagcagtagacaatgaaccacctgattacaagagcctcattcctctggaacgtgcagtcatcaatggtcagttatatgaggagagtgagaatcaagacgaggaccctaatgatgagggatctgtgctgtccttcaaatgcagccagtctactccatgtcctgttaacagaaagctatggattccctggatgaaatccaaggagggccatcttcagaatggaaaaatgcaaactaaacccaatgccaactttgtgcaacctggagatctagtcctaagccacacacctgggcagccacttcatataaaggttactccagaccatgtacaaaacacagccactcttgaaatcacaagtccaaccacagagagtcctcactcttacacgagtactgcag

SEQ ID NO: 1430 - DNA, 6000 bp, Homo sapiens
agaaatgagatgggtaccagagggatatgtatttacagatttcgttaggttgaaaaatgaagtcagacttttcctgaatgactggtttggctgtccgatttgttaatgaggacttttacattagatggcaaatgttaaaatatatccttttacaactatttaaacattgaatgaaagaatctagatgccagttaaaaatgtgaaaaggagtacttagtttttcaacattcttttggcagatataagaacaaacatttaaaaacccctgctctgagagatacacactttttaaaaagaatacaaatgcaatgttaagtaagattttttaagttgatagttctccattcagagtgttcttgataaaaatccttgtgtgtggaccagccctatgcaatggtttgtgttctttgcaatataatgtggggaaatcgcacaggctttgctccttcttgacctttgtgagcctcaattttcacagctataaaatggagataatcctaaaccctgtaaatttgtcatgagaattagaaccgacagatgtacagactcagctcactgcttggcaacacatcactggcactaagtaaagaatggcagctattatatatatattttagtctttgtgctgtgtgagaaaaaccacaaattggaactaaaatcatttaacgccctttttgcatgaaaatgtagctactgacccaccaactatggtatgcattttgagtcattttgttccccagaaatgtggacagattttagttaatttagccatattctctcacctggtatcttctttgaaaaaaatgggtggtcatgtaggtcaggaatacaggctgtggtactgcagactgggtataaatcaataatgaacaacaattggcagagttaatattcaaacagtatcccatttccaggaaacatctgacatgtaaatggtaaagccttgttacccacagtcagtctaagggccagcagacttgacatcatctgggagtttgttataaggcaaattgtgaggcccaccccagacctactgaattggagtctgcagtttaacaagattcctatgtgattcaaatgcactttacactgtgagaagcattggtaaagaataggccactagcagggaagataaaatcaccaggtgtacatgtaattcaggtgggagctctcagttgcacctgtttaattaaagctgagtaaagcaaaacgatggagtctaacttctactgacagactgacatacacacatgccacaaacatacacatgcatagatcagtagttctcaactggaggtgactgccccccaggagacatttggcaatgtctggaaacatttttaattcacaacaaagggatgctgctaaacatcttgtagtgcacaagatgatctccacaatgaacaaattatctggccccaaatatcaacagtgctgaagatggagaaaccctggcatagattatccctgtataaaggcacataaactggaactattaatggaaaaaggagtcataatttgactacacagctcttagggaatgaattttagatctgcagagttctgcacctcaaggtctatgctactttgaagatcataaaaacctggttaaaagcaatcaaaatcattgatctgctttggctagcaaaccgagagttcatgataacctgcattagcatataatgcaagtatcaatgctaaatcctgtacatatgcaaagaaaaataatggagacagaaaattaagttactgtgttgtctaaaatccattcctactcaaagtaggaagcaggcttaggaggctcaactccacaccctcctcaccctataccttcttcaagaccaaaaactagcctcaaacttcaaccttcaaatgctcctggatacaaggcaagaaataacgatttagggtggaccattcatcactatcagaagtgctaattccttcaaattcagtagcataaccagctgtctttccctctctctgacacacatgtacaaccacacaatgtgtaacagcattacacgcaagcaactggctctgaaaagattccatcagggcctcctgctctcagttctcactggttccttgtcctgagctcccaagttgatggctatgggtatagttttttctgcatataaattcttgtttaccttcccgacaggctttactagactagacagctgactgtcctatggtgcgctcatgagagtggcccaagaaaatagcaggttattggaaaacaagtagtaaggaaatgcttagagaaaatgcattcaaataatcagacagaacttggggaacagatggggatgccaactaatttacaaaaaccatgaaaaagatgcttatgtttgcatcatgctgaaaaatacgcaacatgccccaggctgaaaaatatgcatcatgcctactccaaaaacactgaacaaaatggaagcaactgaatttttttctaaaccttttttgcaggttactgcactgcactcactaatcaccattcccttttaatactcttttaattatactgcaaaacaatcttccctcccttatatcctaagaaaacacacccccttctcataaaaatgacatagcacatgctataatttaataagttgaaaataaatatttaaaagcttttgtgaaactgttctctaataaaactgtaagaactgtggtgtagagaggggaaaaatatttcactgtaattatgctcaaggcattgtcaaaaccattacatcgaatgaattctaatgctaaggcaggagaaagaagcactttgccaaagttttttttaactatttcaccaccaaagcagtttacccatggactctgccactgggttgagaagtcccatgaccatttgagaagaagctgctatgcttatcttttcaggctctcatgtgtctcagatagggatggggcatggccagaaaccatgggcaagccttttgccaagaccttggatgagatcatcatcaacgacaccccagcatcctgcctagcatcttctgaattttataagccacagcccttgggccagcctcctgttaagttctcaaaacagaaaaaactaaaagtggactcccacaaaaaagatgcagaattcttatacaattattttcaacatgttcctcctatggaatgtaattacagaaaattacagaaaagagcagattagaatctcaaaaagaaggactcaatttccaagacgatgaccctaaattagtttccttttaaaatgttctctcagccggcacggtggctcacacctgttatctcagcactttgggaggccgaggcaggtggatcacaaggtcaggagatcgagaccatcctggccaacatggtgaaaccctgtctctactaaaaatacaaaaattagctgggcgtggtggtgcgtgcctataatcccagctactcgggaggctgagacaggagaattgcttgaaccagggagtcagaggttgcagtgagtcgagatcgccccactgcactccagcctggcgacagagtgagactcaatttcaaaaaataaaataaaataaaataaataaaaagttctctcaaatccttacacaactttcaaaaagtaagttctgtgataaggatgatagacatgcatttgataattaactcattcctaatagaaaagatacattaaagttttatgaattctctatacctatcagaatgtaagtagtcataacttcatccatgacaagtcctttggttcaattccttagggattccattctattttagcttctgtataacagtactgcaaagctgtaattacatcctctataatcagcccattcgcagtataattgagagtgccacaaatttaaaactttgacctcactacttaagtggaagagatagtttatactacatgtaaaataccctcctgttatgctgacaaatttaaaacataaaagaagaaaatagcatgtcatagtagtcatcatttaagagggaattattatgttcctgataacagagtttctcttctgtcatgtctagcatcagactctcatcaataagcactttcctaccaaaccgcatgctcttctcaaatgttatgaaaacaccaaacccatacagatgtctctcaattctcctcatttaattgctatccactatgaggataagatatatgtgaagtagttcctagaataatgttgtgctagtgcaaaccaagttttaattggcacagaggtctatcagtgaagtgcataacttctaagcaatgtgactaaattttttcttaactaagaatcaaggacttgaacatcaaacattaattgaacactttggttcaagcaagccatttgataaatataataaccatattaataaagacagcagcaacaactaataccaaatgcttaccatgtgccaggacaatgagaatcttagatgaattaccgcatttaattttcataaaaagcccctgaagtaaataaaattattgcccccatttttcatatgaggaaattgaggctcagagatgttaaataactgcccagatcaattagttggtaagagtagggtcggccttgaagccaggtctaactgcatcatctcaagcttgtggctattttcacagccttcaggccagactgcctactaattacatgttacccaagcaatttaaactaaatattcttgcccttactcttttactaaggctcctggtgaaatgcagctgttactgatcaatggtagtcaaataaaaaagcaagataactttatcaagattttcctctgtcatcaaattcaggaactcttttgcatattgtatatgaactgacacagctcatataattacataatttctaaattacatatatatttaagtacattcgatgagttactaaagcatcaatcacaaaataaaatgcactttacatttttcagattaaagaagctaattgatcaagaaatcaagtctcaggaggagaaggagcaagaaaaggagaaaagggtcaccaccctgaaagaggagctgaccaagctgaagtcttttgctttgatggtggtggatgaacagcaaaggctgacggcacagctcacccttcaaagacagaaaatccaagagctgaccacaaatgcaaaggaaacacataccaaactagcccttgctgaagccagagttcaggaggaagagcagaaggcaaccagactagagaaggaactgcaaacgcagaccacaaagtttcaccaagaccaagacacaattatggcgaagctcaccaatgaggacagtcaaaatcgccagcttcaacaaaagctggcagcactcagccggcagattgatgagttagaagagacaaacaggtctttacgaaaagcagaagaggagctgcaagatataaaagaaaaaatcagtaagggagaatatggaaacgctggtatcatggctgaagtggaagagctcaggaaacgtgtgctagatatggaagggaaagatgaagagctcataaaaatggaggagcagtgcagagatctcaataagaggcttgaaagggagacgttacagagtaaagactttaaactagaggttgaaaaactcagtaaaagaattatggctctggaaaagttagaagacgctttcaacaaaagcaaacaagaatgctactctctgaaatgcaatttagaaaaagaaaggatgaccacaaagcagttgtctcaagaactggagagtttaaaagtaaggatcaaagagctagaagccattgaaagtcggctagaaaagacagaattcactctaaaagaggatttaactaaactgaaaacattaactgtgatgtttgtagatgaacggaaaacaatgagtgaaaaattaaagaaaactgaagataaattacaagctgcttcttctcagcttcaagtggagcaaaataaagtaacaacagttactgagaagttaattgaggaaactaaaagggcgctcaagtccaaaaccgatgtagaagaaaagatgtacagcgtaac

SEQ ID NO: 1431 - DNA, 6000 bp, Homo sapiens
gggtaggaagtctcttaccaacagatgattccttattaaatagacttccttgctttgtttgatgaggaacaagaccgtggcaatgttagggggccaacaggcagtagttggctttgtgaccaccaatgctagggagaatatgtaaacatgcgcttttaaatagcccaatgtctacagaaaagccactaacatgattcagaaatatataataaaggcaaaaagaaacataatatacatacacatatacatacacatacagggtccatccacactacgaaaatgatgctttataaatgcttagaaaaagactaaaagaaacacagtacattgaattgttaatagttggcagtattcatgtggtaggactacatgtaaaattttttacttttatgcattttccaaattatgaagggtgcctattaattttaaaataaaaaaaattttaaattaattttaaaacaaaaaaattttaaattaattttaaaaccacaaaatatcatcattttaatgttttaataacaaaggacttcccattccctagcatcacatggacactactactgtaatcacttctcaaggtacatatgtcactgttctagagtcatagtcagctgaagtatgagcagaataattggaagccttctggaaactctgcggaccatatataggcctgggaccagagattcaggctacagataaaagtaaagagggtctatatatatagacctgcagttcatatatatattcagttactgcagtttatatgtatattaaggtctgctggttaaaggctcttttaagtacagtttaagtgcggagatatggtatatttcatgtgggtatctacatgtacagagccagacaggtggcacccaaagaactgaaagaagagtgaaagaagagtgaagaaatgaggttgattagaaaaatgattgtctagggcatggagagaaggttcttttaccacagacatcccctttggctccacattcacagttgcctacaggtcccttcagccttcgtcctaagttgtgtagcagcagaggagaagggatcggagagtagaagcacaggatcggatccatggcaaggttatccagtgctcagtggcaaagctgctttgcaagaaggctgtgggtaaggtggtagaaggtagcgtggggtgcaataaacaccgaaagctcatattctggccaatccaactgtagtctgaagcaatgcaggaccatggaactatacctctccctatgcaatcctgggtctgttcccactctgttcagcttcttatacaggaccaggtccataagaccaggtcttatacaggtcttgctgtttttctttgtacatgacagtgtttccatatatactatctcacagaggcaaagaagcaaacatgtcatatacaaagttagcattaccatctcatagctcaaagcagagctcctagggagcagagcgtaccaactgcttaaatgaccaaaggaccagcaatgaaaattttgggtagctgcaagaaacatcctattaattactgcttctttggcacttactatacttggatgactgaaagacatgaccagtcaaaagaagaaacaaaggcagggagagaagacatgaaagaaaataagagcagttacttcaaaaagaggaactggcttgatgtgattagcagtatattaatggtattttttaaaagttaaataatgatgatgttgtaattatggtcagtagcaactgacttcactaataacacctgttaatgtggtcattgtcatggcctcctgacaattagctcgaaccagggaaactggtgatattaagctgtctttgacataatataatatggctaaatctagttggtatctccttgtttcttgccttgttacctacaaaccccttctcccgcattagaaagcaatgaacttggtagaaaaatttctttgtatcatttctaaataacagtttaaagctagtgctgatttagatcataaactcagattactaattgtagaaaggaccttggtgtctaggtatgcttatttgtagtaaattcctgattaaaaaatgaaaagaaagtcacaaaagtaattggacagaacaaggttaggaagtaaaactctctcatccaattttgaggcacagtgatcataactctactattttcacaaatgaaaccaagagaatttcacaaatgaagaaaatttcagaaaccaagagaataaaaattacatctcagaaagaattttggttgaaagagggaaggaaataaaagtctactcatctacttatgtggccaatggcgcacaatgccaacagctggttggagtttgcaatacaccacccagggtactcttgtatcagttaaaggtcctgctccctcaaaacccttgactttcgtttgaagtgaaatggtgatgatattctaattttactagaacaagatacgttgctgccaccttccagaaaactgtcagtaaatccacaaatccacaaaaaagaggatgagtcttggctttcccagttcaagattcagtctagaaaataaacagaaacttctcagttaaatctgaacactcctttaccaaacatacctctgagagattctgaacaaactattaggagaagacaagactatttatgtagaagaaggctatatatgtaagactatatatgtagaaggctatatatgtaaacattgctttaaatccctgtatcattactttagtagcggtgtgaccttggtcaagccactttagccttctaaatgtctttatctgaaaagaatggatcatatcacatcaaaatgtgttgtgaagattaaatgatgaaatgcttgtagagcactaagtatggtggtaggtatgatctaaaagctcaacaaatgagggctattaatattggttcctgaagacagtggtcacataactatgacctcacttggaaagctgagtcatagctgggtcaagagactgatgtttcaggagtaacacattagtaatgtaaccaggcaagtagtgtaccaggcaagggcatacaaggagtagaagccctaatcctctttcctctattcttcagaatatagctaaagaaaaggaggaaataatactaacatatttcatgggaaccagcaagtcaaaagaatgaaaataaatgcaaaacttgagtatggatatgtgagaaagaaacaaatggtagtgttaaatgttaggaaacatatttgcctatcagagggaaaaagatgcaaaacaagctacaaaactgttagctttggggtaaaagtatgctatcagtttggggctgagattcaggtgtttatgcatcatacaactttcataaaagtcatttaatctcatttgtaataaaaaatgcagcataaaagtctcaaaaaggatatttaataagtatgaggtaagcacaggagactaaaaagattacaatgcaattcacaagtatagggcagaagagttaaaaccaacaaaactacaaactcaacatccaaaatgttagtacacaattgcaaatcaaatattaaattttaagttcggctgaagagtatgtgtaattcacatctcttagtatactgtatatgaaaagcaagagtgagtttactttaggtttctcagtaggtacttagagtgatctagaataatgataaagtgaactcccaatttagtgaagaggacatacatttaatgttgtgccctgcatctttattccacaccatttccactaacaactctgcaaacatcctttctccactccacactaagaaaatgaagcgagcagactattttcgtcattcttgtttgacaaaacatatggaaacaataattctacagacatatgtacatcataataggaagcaatcctattttaatgtaattttaaaagaggttttaaaaggactcaagctactaaaattactcatctgaagcttgcaaataagaatgccacgtccctaatttatttagcagattcatatagttgggctagaactttaggtatgacttctcttataattcggaggtgaattctcattcacaagaagtaggatttgtacaagtaaatctaccccatactagaggataatattcttaattcaatcacatttggctaatttcttttttcttcacgtggttatttttggctttattttgtttgccggtagaagagaacaaacattaaaactggctctaaagttctaattttatacattgtcttgaaagtacagcacaaaacatttaatttctttaaaaattttttccctgccaaaaaatgatagttttaactgctttcgttaaaacacaggcatgcagaaatggggaaagaggaagttctttcaggaaaaacactgaaaaaaataagatttcatctggcctttccatcatcacttgaagaattgtttggtagttacatcatcaggaaataaaacaccatcctctgaggacccctactcattacaaagaggaaagagaaggtttgaagtctaaatcacccccagagatgtctccacaaaaccccagacttctcctttccctctcccgcctacccccagcaaccaaaaataaaaagtataatgaatttacaaaagtttacataagaataacaggatgtgtattgaagtccctgaagcaacaacagctttagggacccagagggaaaaaagttacaagcggatcgaccctgcctcccaatgactttgttagcccgacaggagggcgccggcgccccggcccaccggcccaccactcattccctccgctgggagccgggaaccacggtccgttcacacggccggaacatccgcgggagctggggtgtgtggctgcgccgccgccgcggccgagggtcccgcggtcaccggcgcccccgccgacagcgccgcacacgcggagcgccttataaggcagaacagtgacgtaacgcccataggccgggcgcgctcagcgccccgctcgcattgttcgggcgactctcggagcgcgcacagtcggctcgcagcgcggcactacagcggccccggcccggcccccgcccggccccggcgcaggcagttcaggtaagcccgggagagcaacttcgctccaccaaggggcactgctgtcagacagccaggtagcaagtctgtgggtggctgttaaagctgtctcagcatcacaaactgcagacaggtttcgcaaagcgcatccaatgaattctaggttcaaaaccgtttccaactcacacaaaacttgaaagtagaagttttctctggaggagaaaacagattagagatttaattttaaatgttgagaggtgggaggtgactgtattacatacgctttccaagtgagctacacattgaatcctgcccatattgagaaatctttggggaaagggtgggggagactatattgtactgcagcaaccctatctctcctccggactcaaactcgcttgtcttacatgagcagaatgcgaaaatttgttagtgccaggttttcccctctttttgtaaatgttaatataaacgactagaaaaacactgttaggaatacatcttggaattaagacgaatctaacttaaaaagtaaaatctttttaagcttcaaaaaatcgtacaaacgctattttgtcgtaaaagcatatgtcaatttgtacaaggaagtaactatcatagttttgagttctaactttctgcttcaagtccaggcattggaaaaatgacaaacctcacttacagctatcatttctagagtaatattttggatagtagtatattatgtaaaaaatgccaatttaaaaggtaaaacttatagagtaactgtattaatcagtaacattttaaaccataattagttacatctaaatcctgaagaggctattgctaccaatgaactcttacagtatgataactgaacacttggcagaaaaatctccataatattttacttcattttttccaactaaaagtcaacgtaggaattaaaaataaaaaggttatgtcaactttagaacact

SEQ ID NO: 1432 - DNA, 6000 bp, Homo sapiens
cttcccattagtgggggagagacaagtatgcttggcaattgcaataacatgggattgagggtaaagtatggttaaactctgggtgccttgggagcactatgagggttacatgatccatctgggatacagaggggacagtgggaaggatgggatttgggatgtgagtcaagaaaaagtaggcatgcctgggggaaactgatgtcctgtgatctagctctgctacaagaattcatttttcctttataattcatagaaacaaaataaatagacaaattaatttatacctcatattttctagaattagcaatatatatctgtcaacaccttgcagacatgtgcagtaataattgtaaaatctagcaaaaagcacagtattaggcttccctgaatcattttaaagtcattaattcacagactcacataatgttagtactaaaatagaactaagacatctttttcagtgcaaaaccttcacagaggaggaaaccgaagctcagagagtcaacaaaaaacgaaacaaaaaaaacaacaacacgaccaccaaaagattaggaatgtttttcttgatatttcccttctttatttggttgcttggtcacctgtcagtgggtgggactaagacatctttagagaatgtgttctgtttatggactcacaattctttcagttatctgtaggatgatatctaagagtcagcccaatacattccctcctttcctccccatacagatacctatttttggtagatgctgtgacagaaaggccacaggaaaggggaagagtttctgtcctaggggtcaacttttgaaagttaactgatgaactaatatcaattccatggacccaaggaagcttaaacggagatggaattttaagataattatattgtaggatctacataggctgagacaattatgttagtgcttgaacagaggccgcatggatactctgcaactggaaaatgaactattaaaacaacaaatggctagtttcataaagttaatttcaaaagtctatgtcactaatacaactgtaagtgaaaagctgtcctgtaactctttcaaagctgactgatcaggaggtgaaaagtctaatgtaggatcatttaatatctcaaaatctcttaaataactaattttctgtattaataatacaatactatagcaatgctatctaatagagatataatataagccgtgtatgttatgttaaattttctagaaatagtaaaaccaatttttaaaaataatagtaaatacacagaacatattaccattttaacccttttcatgtgtgcaactcagtgaaataaagtacaactacactggtatgcaaccatcactactctctatttccagaattttcccatcatccccagatgaaattctacacccattaaacaattctccccatcattccttcccaccagctgttgataaccctattctactttctatttctatgaatttgacaattctgggtaccttatataagtggaatcataacagtatctgtccttttgtgcctaatttatttcacttagcatgccttcatggttcatccatattgtagtatgtatcagaatttcaatcgtctttaagcctgagtaatactccattgtatgtgtatatatatatatatatatatatatgtatatatatatatatatatatatatatactgcagtttatctatccattgatggacatttgggttgtttccaccttttggctattgtgatggtaaaaaaaaaaagtgtatctgttttacccaatttatccaaagtattatctttcaacctgtaatcaatatacacattattactgagatattttacattagttgttttctaatgtctttgagatctgctgtgtatttcataattacagcatatctccatttgaattagccacactttatgctcttaataaccatacgtggttagtagttaatgtactggatagcacagttctataggagagtttgcattcaagattttaaaaatcatgattccttctggatgccaccatgatgaataattccaccttatttttttctcatatagccctagtgtttagagttaggcctcggaagtcagactaaactaaatgcagatcccggtctcttactaattatctcagtgatgttggaaagattacttaatctttcaaaacctcagttccgttttttgtaaagttggaaaaaaagactatttctcccatagggtttctgtctgaattaaaatcaaataacataaataaagtgctcaatgtacttaatgtagtgttgccaaagtgtgacataataaatagcaactataataaaaataatccactagattataggttcacaagggcaagggctacgtctatctttcacagtgtgcctgacacatggcaattatttatttatgtgaataaataattgaactcttccctcagtctttataaacttttgtttccatgacatcttcacaccttcacagagattgcatgatgatttctaatacctaccttgccatgaagatacagatactttatggtatagaaagaacatgaaactcttattctcatcatttccttcttttttatttaaaaaattttgactacttcctttccttttccttgagaaatcagggatgatggggccaaaaagactaagggccaaaggggcccttacccacaggggcaatgagcaaatacataagtattctgaggataacagaaaccaccttatcctcactgttggggaaaggagttacaaatatggaaagggttaaaagccagattatgtctatggtgttagattggaaatgcagctatcagtgtgatctcatagtctttaatataaatagacagagcaacagatataggcgcgcgtgtgtgtttgtgtttcctagcctattacctgaaagggcctggaagcaatgagctcacgcaatccccagatcttggtttctaaataccattttccataatggatggaggtcttcttgaagatatggctaattccagagttgggcacagaaagtacaagatgcttatggaacattttcttgtgccagaaggtaagaaagtactcagaaaaacatgaggaccacatctgagatcatttgagcattaaaataaataatgatattagtgatttataactcattcaataaaacagcaatttatgagctcatgttgatataaataaacacaaaaataagtgaggagaagggaatgctcttcttcactctaagaaagtttatttaagagcaatatgtttacctagtctccaagtatctccccacaaaatatttattaactgcaaaaggaaaaaccataattttacagtaaatctaacagataccaccttaagcaagtgggtttggttacaagactaactccgtttatgtgactcctgatatgattaagaagaatacagcattgtttctgtagtattcctgccataaaaatacacaatttcaatctcacaatgaggaaacatcacacaaatctaaactaaggaacattctacaaaacgtactcttcaaaaatgtgaaggtcacatataaaaaaggaagattacagaactgttcaagattgaaggaacgtagagacaaggcaactaaatgcaacacataatcgtggactaaaaaaccattttttttctataaaggatattattgagacatttggtgaaaagttgaatgggatctatggattagaaagtaaagttgatttactgaatttaattgttatactgtggttatgtagaagagtatacttacatttttaagataatcacactaaagtatataaattaattcagaaaaaaatatacacacaccaaaataaactcacgggtggaaaggaggatgagagagagagacagagagagagagagagagagagagagagagagagagagagagagagagagagacagagagagagagagagaaagagaaagagagggagaatacaaccagtggtaaaatgttaaacattggagaaccttagtgaagagcatatggaaattctttattattcctgtattttttctataagtctgaaattattttgatgttaaaaattaaaaataaagagcatgggctttggagtaactcagattcaattttgaatcctcagtcttatatctatcatctgtgagatcctaggaagttattaaattattctgatctttggttttctcattagatcaccaggagtaggactaatttaaagggctgctgtgaggattaaattagataatgcatgacttgagcactgggcaggtggtaggcatgtctggtaagtgatctgatacataatggatgctgaaatatatatttgttgaataaatgaacaaactcctcccttctatccaacccctcaatctgaacaagtgatcctacttaaagaaaattagatgcttcaaattttagcaatcctaagtatgaaggttttcttaacacttgaataatataaaacaaaatgtcaaataataataataaacataccaccatgcattccgatgttgctctagagtttcctcagcactttgccctcgtgtctcctgtgacactaaatggaacaggcaggcattcaagtttgagtccaacacagcgttaataatagcgaatgtttacagtgccttgggttatgggtgtcaaagaaggggtcatgcccttgttacttaaatcacaaacaaggcttacatcagctcatggctgcagggtacaaaatgaggtgcaatttaatgtccatctgggcatctgttcctaaggtgctagcactgctgtctgtggttcacaatatatctggggtagcaacacagcaaagaatgggacccaggttgtgcttgggaagtttctactctcagccaagatgtgcacatgaatttaaaattacctaagagggtgtttcagagttgctggccaaagagtggtgtcttctaatctggagagcagctgctgggcacaggcatgcaaacacacatacacagacacacacacacacacacagacgtgctcacggagcctgtgcctgcctctacttgtctgctctgcgcagatggttcctggcttttgggtcacctcatcctgcagcccagtccagttagaacctttcttccacagagactggcaagctgtggggtaagagttttggtaaggctgcctgtcttcagagcatgaaggacactgcccggagagggaagagggcaatatttagtgtttgggcctacttgttgttgggctccccactgcctctcctttgcagagctatcactggcccctggttgcaaactctcggtggctttcaagcctacaaaacaaaaactgagagggtgtccaaaaagagaagaagaaaacgttgttgttggtcctggattccactgttggattttggtggggatgagaagaaggaattaccaggtgtgatcaacacctgcacggtacctgcacggtaagctaagtgtccccatccttgctgagaagaggctttgggatgtttctgtgttattcaccagctaggagcggccaacaccactctccaaaagtaggatcttgtgaatattatgcaagggaacgtagtatgattaagagcttatgacagatgatgacttttaggctaaaatgactaagagttgcttgcaaaatagaggaactatcctgacagtaggtaagttttactatagtgatacacatgaaagaaaaccaaaatgaaactttaaattgttatcctgttaagagtaagatggatagtcaaaaattaaagaaaaagtatgtttggataaatggctttccttcttaatagcttgattttgtaagctgatgtgaatgatcaatatacagtgtcaaaatcatcacaatgtgttgaaaatggagaattatactgaataggttaaattgcagaggaggaattctcttttcatggaaagattaatggaagaaactaacattttcaaatggcaactatattgtatcttttttcttttgtttgtttaccttct

SEQ ID NO: 1433 - DNA, 6000 bp, Homo sapiens
ctctttcaagtaaagagtatgcaatataactgttcaaaaacatgaggctgtttctcataggtcagtatcatcaatgctaagtcacatttcaccaccctaaaaagaaaccctgtactcattagcagtcactccctatttacccctactcctactctctggcagccactaatctactttctgtctgtgtagatttgcctattaaacatttcatataaacagaatcatacaatatgtggccttttgtgtctggcttcttttacttagcataatgttgctttcaaattatataggggtctttcagttctacacatctagtttttaaatgtcttgaaaatcacaatgactttatactcttactggtaaatatttcaagacacaatatatatttaaggcaaagttcaccattgaaaacaataaatagaaatccatatttccaatggtcttcataataatttctgatttttttgacagacttcccatgctgaggtatcagctctatcatgttcttatgatttgcttgtttatattattaataatatcttcaataagaaatttgtgatggctggtttagttaatctaaatactatggtctataaatctatttggctagtcgttatgaaaaattacaccacaatgccaaaaaagtgcctttttttttttttgagacagagtctcaccccgttgcgcaggctggagtgcaacggcacgatctcggctcactgcaacctctgcttcccgggttcaagcaattctcctgcctcagcctcccgagtagctgggactacaggcacccaccgccacacccagctaattttttgtatctttagtagagacggggtttcaccatgttggccaggctggtctcgagctcctgatctcatgatccgcccgcctcagcctcccaaagtgctgggattacaggcatgagccactgcgcctggactttttttttttttttttttttttttttttttgagacagagtctcactgtctcccagacccgagtgcagtggtgtgatctcagttcactgcaacctccacttccttggttcaagcaattcccctgccttagcctcctgagtagctgggattacaggctcacaacatcatgcccggctactttttttgcattttttttagtagagacagggtttcaccctgttggccagattggtcttgaactcctgacctcaggcaatctgccatagtctcccaaagtgctgggattataggcatgagccactgcacccagtcatcatctttttatatatattaaataatgaatttaaacaaaggaaaaaaatacaaatatatatagattttctccccacagctcatggatggttttgcacacccactgaagtatgcactcactggtttagaaaccactgctctaatgaacacactaattacatcatccctccctccacaggctctggaatcaggatgcccaaattcaaatactggcccttccatttactagctttgttaccttgcgcacactatctgacatctctgtcacttaatttcctaatctaaaaacgggataataatatcttttaggatttctgtgaggacaaaatgagctgtaatacatagactgcttagaaaagtaaatgacaaataataagtgctcaaaaaatgatagtcattattacgtggttttttggccacaggcaacttacacctagtaaaaagaatgcatatataatcgggccactttgctcaccagggtttcttaatcttttcattaataagctactgaattaataaagaaggtatatggctccttcctcctctggccatacattctctttggtcatcactactttgtaggcctccttggctctttctcttaaaattcccaattaataccttgataatatcatgtttcttataaacatatatgcaaatatacttataaagccattttgattttcaagatatttaaaaactaagtgtgtacaacaggaagacagacccctatcatttgaaagcaacattacactaagtgaagaagccagacacaatttagaataagtgatcataatatgtggaaatttcatcttcagggaattacctcttatgcttaaaaactttctgtcaagtactacatttctttgcctcatcttcaggggctagggttacagcaaaacacagaacatttatggacaaccagggaccaagcactggtatcatgtatcaattacttcccaagctgatactaagttctttgaagggaggaattttgtcccatttactctgaatgtctctgtacgctttcagcacctaatgtaccattagatagtaaaggcaataaacattcgttgaacagacttattacatgtgcttcaaattcttcacagaccaaatttttgtccacactcttaaccttacagaacttagaagctttaatatctttgatgagccttatgctggaaaaagtcccaagctgtttttggatgaaaacttgggcccttatgttatcattcagcctatttctgttcagaagatagtatttatcacattttgtaattaaacatttatttgcatgattattcagtcaatgtatacttcactcaactaactcatgacaactgagtcaatgctgtgttttctttccattgtctccctaaaacctagcatagagcctggcaattgatttgctcaatcattatttgttgaatgaataatctattcaggaatgtatccttgttaaagcttttcatctatatgaccatgtcaaatcttgctttagaataaagcaattaagtctgtccttgaccagcagtataacctcaaactcactgatgcttaatacttctcaaaaactaagaaaaatatagtattaattcatccatccattcatttattcaatacctatctgaactccttctatcatgtatcaagtactgttccagatgcttgtctctgcccttatgttccttacattctatagggggaaggtaggaggaaggatacagtaatactaaataattaataaataccatgaaaaaaactaaaaaggttaagggggccagagactgctgggatgcaaggcatgattgaagtttgctatttcatagaaagtagataagaaagggctctttgctaaggtcaacacttgattagacagaggaacagcaagtgtgaaggccctgtctggcaggatggtaaatctattcaatctctaccagtgtttattaactgggggtgatattgccctcaagaaacatttggaaataggaggaggtaggtattttgggttttcacattgatattaaataagataggtgaggggtgggatggacatactaatctacaatgcccaggagaagttcaaacaaagaattgaaagaattggtctgcccataaaatatccattacatttttgctgggaattacagcatttttggtttcacttttaaattgctctcattacattatcaaatgtcaatgaataaaagactgtataaattatttatgatgcaatcatgtaacaaacaggatggtatgttgtgtaaatttagcttatcttaattcaactatatacttccaatctcattttctccaatatgctgattcatcaaatttcatatgtgatataagctaggtctcaatttaagaattcaggtgacacttattccacaacagactcttctgccttgtacagcatacaaacatcttggatgggaattggcatacattagccatcaaatcaatcagagaaacctttccccattctaatgtggtaatagtccccatttcccactttctctgactgacagtcatctcaggttttaaaaccagctcaaaagatatcttttccatgaggcttttcctaacttccccagttgttcactactcagtaccgccatagcaacctggtctcttctccacaagcacgcttatcagacatacaggcttttgtttacctgtctgtctcacaaactaaactataagcttttccgggaaaacaactaccttacccatccatctttgtatctccggcgcctagtacagtgcccagtgcctcgcaggcgttcaattaatgattgtagaagaaatggagaatgaatgaccttagttaagcaaagaatatatcaaactcaaaaatgtctgtttaaaaacctaagaccccagaaatcggctgcatgagttgggttaaagcattaaataggaccggaatgctggtaggtagagaaatctccacttgacttcttcaagtacatcctgaaaagtaccaacatcagtgtttcgatgcaacattgtccacatgcaggagtaaagacaacacttctcgtggtctcttcctaccacgagatcctgaaacccactccccaccccaaatccgggaaatctcactttggggatcccaggaccccaagttccctagatgaggctctcaccttcccattcgtgggaggctcctggatgtagatgttgctcatcttggtcagtacaaaggactctgctccttacgggggatgagagcggccggccggccactaaagctgtccgcctacgagtacactcttccttaagtccagtggtgcaggaaagcttcagtttgtcaatatcacgcaagacagggacaccaaacactacccctgcccaaaggagcccctcacggacgccgccatgttgttaccggacccgagcaccgctaaccctgagaagggttattccaatgtactccagggaacgagaaaagtccgtaaagttaccatagcttaatgttatttatgttatttgtattacaatattagaagggacacttcataagtgttggcggtgtttacactactctcgtgtgcagatcaaactaactccccctccaaaactatcagtaatggttcggaccatgtgtcttctgcaatatgactcgtccggaaactgcatccgcatctactggttctgccgtcgctagaggcgtacaggcccttcccgaccgtagcgagggtgctgctgcgctgggggaaggaaaacgccgctttgactgtgccttgttctcacagctggcgggaagcaagcgccttttcgaaagccagaggctcgagttacccctcttaccaccgtcatggcagtcccaggtaaggagcaattacagggcctctgcgtccgagctccgaagggagcgcaagggagggtagggtagggtgcggcgtgtacggagcagcgcccatggggatttaggcggaggccttaaaattcacaggtttgttttgtttacatgaaaaagtttacactccaaacataaactctgaaggaaagaaaataactatcttccccccaggagccaagccccagctgcttgggattacagggaaagtgtattgtggaagggagggaggagggagagactgtaactgtaggcctaagggggcaagcggccgagaaaaactaccttaactgtggtatggcttaaaactaaaacttgaagtgggaacacttggccgacccaggtaaccggaggcatcgtttgtcttagaagtcgctaggacccaccgggtgtgcgggttctactcctagctcttcctgttgtatgtagctgctccgtggccatagattggtcgctttgtgcttctgggcctcagtttccttataaaaagaaggagctttgttgaattatatataagatttcttctaactctcaaattctatgtccagaagttactgacctaaaaacggtgaactctgcagaataattacttaaaagattttctcgtcctcaactaccagcttacttggaagttctagtagcggaaagcatctcctcaaaccagctttgccactgcagaacactgattgcaggagacattttcagaaatacacacttctccaccccacctcccaacttggaaattcccagcgcactttagtaatagaaaagattctattctattagaatagaatactatgaattgctatagaattactatgaactatagaattactatggttcagaaccctaactttgtttaaacctgcacttccca

SEQ ID NO: 1434 - DNA, 6000 bp, Homo sapiens
tggtgtgagtttaagagaattttaataagggcttaaaaatcacttttgtcccctttcttaagtagtattttcatgtattgcttaaagttttatgagggcataaactatagaatacactgaaatacactaacactaataatagctgatgagctttaaaaaaaaaatcacaaaaaaactcataatgttttaagaaagtttacgagtctgtgttgggctgcattcagtcgtcctgagctgcatgcagcccatgggaagcgacactatactagtttatctatggtaatgcaaccacagctgtaatccatgatagaatgtgccaggttccataaaagacacagagctctatttaataagcatgaagaagtggcagggaagagtttcagccaagagatcaggaaagcttcccataggtagttacaggcaatataggaggtaataacaaaggctcgtaggtaggaaagcacttgagaggttcacagaataattggccaagtcagatttttgcaggattgtagaatgcatgaggggagtggtggaaggaaagagtagaaagagtgatttggtcatgcttgggagtgtgcactgcattctcgcagagagagatggggagacttggcatttttaacactttagaagcttaagaaaccttagccttcaactccattatggagacacaaaaactgaacctccaaaaggttaagtggcttgaagagaactacaaaattcacagataggggtcaagaactaagttcatgcctcccaccaatgataggatcagatatatgattcaggaaaattattttagcagcaatgtgcaatatagactagagagaaaacaaattacctatagtctagtttaggaataaagaaaaattggatgtaattgagaattcttctattactaagatactatcataatgtgttttaaaaatcttattcactgtgatgtgccagactgaaatgttagcttggccacagaaaaattccctaccttggctatagggcttcagtgaaggagataataagaaaacagttttgtgccaattacatcagtaacatacgttgccacttgtgccagttcagctcttcatggagagtggtgaatcactgacatgaatgttggaggtaatttcaacaactgtgaatgggaaaagcagttttttcaaagaaagtaaatttcactgaaacctgtgatcaaatattatttctataataacaactaagagtaagattttcctaaatgcctacatttcattgcattacctacataatggtatacgcttatacacaatgctatggaaacacgggtgaagcacatgatcataaaacagacaaggctgatttttatgtgtggtttgcagaaagcagccttgttactttataatcataccttgtcataatcactagcaggaccaccccaagaaatgccaaactgaatccattaaacctaaaattaaagagcctaacataatacttgtcctccttgatgataaccttgaaaagtttagattagccctattttcctttaataccctgtctggatcgatcatctaagaaattatcttacgattttctgtatctgtattttctaatgacacttgcattgtacttttacagcactgtcacacctattatctcaattattgctgggtttaaacagtttatagcttgccatctagcttaatggcacaatttaacattattatactttgaagcactattttgaattgaaagaaggttaacatatctataacactggtctaagtttaagagaattttaatgaggccttaaaaaatcacttttgtcccctttcttaagtagcacattttcatgtactgcttaaagttttatgagggcacagactatgacactgtgtcctccagtgtgcccatatcacacaggtgcccaaaaggcttgctcaagtaatgaaatgagcagtgataacaggtcaactttgggtgcagctgtgtggtataaagatcactagagctgactcggcctatcaggatgcctaggcaatctactgtgtaggtttatctttcgctgctggcctcttagatgttgaccaggcttcagccacagaccttcccttcacattctacacaccatctaagcagagtgctccactcccatagccttacctcctattatgtgtgtgggtaacacccaaatcattgtctttgactctgacttctttcctaagctacaaattatatctcttactattaactatttgcattcctatgtctgactaacctcaacacaacaagccccagactggatgtcatcatcatccccttaacccctgccccttgtgaggtgttgtcatgtcagtaaacagccccacccaattgcttaacagtaaaacccaggtaaacctcatttcctcttttacctacccacactgaatcaatcaccaactcctagtgactctaccaccaaaaatgtatcttcaatttatccacttctctccttacctattgagaccacatctcagccacacatcattataactcaccagaattactcctaactggtaaactttgtctccaatctactttctagccagaattatctttccaaaatgtgaatctgctttaaaatccttaaatggcttcctgccatctgtaggataatgccaaacctcttgtcatggcctacaggtccttaaagagctggaaactaccttgtaagttatcctatacgatggcaaaatgaatgaagtacacagtctagaggaaccagactgacttcttgctttccagctgtctcataataggcaaattacttgatttctttgtccctcagtgtcctcatctgtaaaatgggaatattaatactcatttcacagtgcagttgtgaatattaaatgagatagaatacaatgtttgatatagtatctgacatatttgacttataaatattagtcaatattagctacagttactatctacttaatttctcacttacctcccatttgtatttgagttctatccacagaaaacatctttcattctgacatatttgacacataaatattagtcaatattagctacagctactacctctgtacttaatttctcacttatctcccatctgtatttgagttccatccatagaaaacatctttcatttcctcttttcacatatttcctcttcctttacgtatccagttcctccgactgcagtctcctctcccttcaagccacccctcctacaattcagatctcctcctaagtgctacctcctttggaaagtccttctgcccatcctgtatgtgtttggtgcccttactttgtgctaaggtcttgtattttccttgccatggcacttgtcccactttctgtaaatttctctctcttcactgctaaattctaagttctgtgtgaagcgtaaccatgtctaccttgctcaccactgtatttccaatgcccagtaccagtgcctggcacacagtaggcttaataaagagtgtacatttcctctctcacagctccagatgtactcctccgcaaacttcagttagtacaaaagcacagtgttccaataacagctatctgtagaaggaggttcaaaaaggctgccacagaataaagaacctggtcaaataatactgggaagtgcaggtttaaacaaagttagggttctgaaccatagtaattctatagttcatagtaattctatagcaattcatagtattctattctaatagaatagaatcttttctattactaaagtgcgctgggaatttccaagttgggaggtggggtggagaagtgtgtatttctgaaaatgtctcctgcaatcagtgttctgcagtggcaaagctggtttgaggagatgctttccgctactagaacttccaagtaagctggtagttgaggacgagaaaatcttttaagtaattattctgcagagttcaccgtttttaggtcagtaacttctggacatagaatttgagagttagaagaaatcttatatataattcaacaaagctccttctttttataaggaaactgaggcccagaagcacaaagcgaccaatctatggccacggagcagctacatacaacaggaagagctaggagtagaacccgcacacccggtgggtcctagcgacttctaagacaaacgatgcctccggttacctgggtcggccaagtgttcccacttcaagttttagttttaagccataccacagttaaggtagtttttctcggccgcttgcccccttaggcctacagttacagtctctccctcctccctcccttccacaatacactttccctgtaatcccaagcagctggggcttggctcctggggggaagatagttattttctttccttcagagtttatgtttggagtgtaaactttttcatgtaaacaaaacaaacctgtgaattttaaggcctccgcctaaatccccatgggcgctgctccgtacacgccgcaccctaccctaccctcccttgcgctcccttcggagctcggacgcagaggccctgtaattgctccttacctgggactgccatgacggtggtaagaggggtaactcgagcctctggctttcgaaaaggcgcttgcttcccgccagctgtgagaacaaggcacagtcaaagcggcgttttccttcccccagcgcagcagcaccctcgctacggtcgggaagggcctgtacgcctctagcgacggcagaaccagtagatgcggatgcagtttccggacgagtcatattgcagaagacacatggtccgaaccattactgatagttttggagggggagttagtttgatctgcacacgagagtagtgtaaacaccgccaacacttatgaagtgtcccttctaatattgtaatacaaataacataaataacattaagctatggtaactttacggacttttctcgttccctggagtacattggaataacccttctcagggttagcggtgctcgggtccggtaacaacatggcggcgtccgtgaggggctcctttgggcaggggtagtgtttggtgtccctgtcttgcgtgatattgacaaactgaagctttcctgcaccactggacttaaggaagagtgtactcgtaggcggacagctttagtggccggccggccgctctcatcccccgtaaggagcagagtcctttgtactgaccaagatgagcaacatctacatccaggagcctcccacgaatgggaaggtgagagcctcatctagggaacttggggtcctgggatccccaaagtgagatttcccggatttggggtggggagtgggtttcaggatctcgtggtaggaagagaccacgagaagtgttgtctttactcctgcatgtggacaatgttgcatcgaaacactgatgttggtacttttcaggatgtacttgaagaagtcaagtggagatttctctacctaccagcattccggtcctatttaatgctttaacccaactcatgcagccgatttctggggtcttaggtttttaaacagacatttttgagtttgatatattctttgcttaactaaggtcattcattctccatttcttctacaatcattaattgaacgcctgcgaggcactgggcactgtactaggcgccggagatacaaagatggatgggtaaggtagttgttttcccggaaaagcttatagtttagtttgtgagacagacaggtaaacaaaagcctgtatgtctgataagcgtgcttgtggagaagagaccaggttgctatggcggtactgagtagtgaacaactggggaagttaggaaaagcctcatggaaaagatatcttttgagctggttttaaaacctgagatgactgtcagtcagagaaagtgggaaatggggactattaccacattagaatggggaaaggtttctctgattgatttgatggctaatgtatgccaattcccatccaagatgtttgtatgctgtacaaggcagaagagtctgttgtggaataagtgtcacctgaattcttaaattgaga

SEQ ID NO: 1435 - DNA, 6000 bp, Homo sapiens
gtgatcttggctcactgcaacctccgcctcctgggttcaggcgattctccagcctcagcctcccgagtagctgggattacaggcacccaccaccacgcccggctaatttttgtgtttttagtagagacagggtttcgccatgttggccaggctggtctcaaactcctgatctcaggtgatccgcccagctcggcctcccaaagtgctgggattagaggcaggagccactgcgcccagccgatatagccattttaatggtcaaaggaagactgctggattaacctttatgctccaggaagatgtaccatgttaatcctatggccttacaaactcctaacacacttggtacttccagtatgagcagcagctgtacgtggtttggtaacttttttttgtacatggtaaataatcacaaacatattcctatctcattaatacagtcttccattacaacatcttttatggctgtataatgcctcattgtgcgaatcagtcccatagcaggtttaatcccgttcaaggttgcttccaatgttcctctaccataaacaatcctggaggatcattcttgtaactaagtcttggcacactcacagaatcgctaagtcaaagtattttgaagcttttaaagtttttatcacataccagcttatcctacaagtaagtgcacctatttacttgaccatcaatgatatgttttgtctttaacagtttcacaggtgaaaaaacggcatctctacaaatttaatctgcatttctttaattaccaatgaggctgaacttttttaccatgtttcttaactatttgtagtaaactgccaatccatgccctttcccatgaagattttaagctcacaatctttataactctttttaaatttacagattctggaaagaatccacacccaggaaattatcagaaatacagaaaggatgaaaagtgaaaatcagtaaaggctgaggctacaggacaatataacatgaagaaaatcttttagttattcaatttcagaatcacaaaacagccttttaaaaaagtagacataagcagactacataaagatgtgcaggatcctttataaaatacctgtgggttgcttcctccattccagacataacccttggcgagttttccaactccttcatcccagtcccagtcatcatcatcatcgtcataaccctcctcctcctcatcttctatttcaccttcaccattctcattcacattgtcttgaaggtcttcaaacagaatgtcatccttctctttgactgtcttcaagtctctgttttcactagaaataacaatgttttattatttcataacaatatttccacataccctaactgatctcacatatttatgatgtaagatattaaaatattgataaatctaaaagattatatatttatataaaatacaccttccgataagctccatctccttaaaaccatgttctcctgttttccagttctgttgcagttgtttgctcattctccatgcccaaagcctactattcaagaagcacatcaagttaaatctgcttctgccttgttaaagttagaaattatattgttatcttctctgctgaataaacaactcagaccagtataccagacttgactctaggaaaatcattcgcagagctgctttagaaaatctctaggaaaatctttctgtaaaacaagaaaaaagaaagggggaaaaaaggctggtgcagcggttcacacctttgatcccagctactcgggaggctgaggccataggattgcttgagcccaggagttcacggctgcagtgagtcatgatcgtgccactgtactccagcttgggcaaccctgtctctaaaaaaaattgtaattaaaaaaaaaaaaaagctttctgacaaaaaatttgggaataagtctaaggcagtcttactttgaactcgataacactttgcaataaaagaagttacatcaagatttgtgttccacaaagaaatccaaatcatccctgttcatgatgggaagaaatggtgaatacagggaccaggcactacaaatgagagaagtaggctgcacaatagaagtggggactggcaaactgggagaagaggtccaaggtaaagggagcacaaccagtaagggctttttttttttttttttttgccatattagaattcaggcctagtgttaccagatcttaatttttcaagtgaagctgtaagtctggatttctgtgtaaaatctatcccttcactggcatagtcaatttttacaaataattgtgcataccaaacaaaacatgtctgcaggccaaattcaacagaggactcagtttttacctctcatgtacagaaaaggacagaaaccataaaaaagcagctgataatatgagataccagctgaaaaacagacgagtttaagtaaattcagattatcaatcccaatttattaattagccatggctctgagggttccccgtggacatgtggaggaagaaaacagacaatcatcaaacacttgctacttaccaggacttcatacatatgctccacagattgatatataattgcctagagtggcatgttaaagttgtaactttgccagataattcttcgttgtgggggactgtcttctgcactgtaggatttttagcagcatatctctggcctctacttaccagatgccactaatgtaccaccacccccagctgtgacatacaaaaacgtctccagaaattgccaaaagtcccctgggtagaagtcgggatggcaacatcttccccaatggaaaatcactggtgtatccttacaataccctggggtggatggtaaattagtgccctctcattaccattaactacccactagctatgctggctgtgtttcttctgctgcttttcttctctaaagctttttgtacacttctccgtaaccataaaactggaatgcccttcctctttctctggctaacccctactcatccatcaagtatcagctcactatcacttgctcaaggaagtcttccctatttttcccccacttctcctttgtactacttacccaattcgaatacaaatagtctaattatttaataatatcggtttcccctgctagggtgcaagctctgtgtcattcaggatggtatttaccaatgcctccctaccacctaagactagatctgactcacagaaagcattcaacatacatatatttattgaaaacatccccaataattaacaaaatccgcatgtgatgaatccttactgtaaacataaagtacaagctgttttcttggaattccaaaataactccaatatgtttcattttgcttttaggcaggagttatccttcatccctctttccccagactccacgtccagtctaccaccaaacgctgccacttctacctccaagacatatctttaggatctgggctctagtccccaccatctttgaatctgattaccttattatttttgaactggtctctctgttccactcccaccctccatgaacatcatctacctagaaagaatgattcctttaaatcaccaagcaaataatgtcattcttctgctaaaatccctcctatggctttccataagacccacattaatatctgaacttttcaccatcacttgtaaaggtctccatgatctggccccccttcttacttctctatcaccctaccaatcttctcaactacctccactgtgctctaggcactctggcctcggggcctttgctcttgctgtcccttctgtgtgaaatgctgttccctctgctcttgccaggattagctccttgtcattcaaatctggacttaacctttccctacccattcagtcaccacttggtatatcaaacgatttgcatagtctacatcattatttggtttttaaatggtgtgccctctctttcacgtagaaggtaaagttccatgacagcaggaagttggttcttcttgttacctccggcgcccaggacagaacgtggtacatattaagtgcttagtaagtatttgttgaacgctaaatgtggttaaaacgcaaaaacccatgtttcctaatcgctatccccaactctgcctcccagtgacgctaaccgacctgagaaccgcagactcccttgacaagtagctttcacttaactctgccgcgtgaactgggagaaaaacccagctgggatgcagaaacaggcaaagggttgtcaagagagacgctgagtgatgaaccactagtctccctctaaaccgcaaacaagagtccacaccccaagggggcggtcaaggagagagccgtacccagagccagggcactgtacggccgcctacctgtcagaggagtccgcgtcgtcgaattgcccggggaccacccggctcatgagaagccgccggtagtccatgactggagagcgccgccggaggccgccgctctgcgatggaaaggaacggctcagacggatgtacccacggccgatccaaaggccttggcgtggatatccgccttgcaaaccattcagaagccaacagtggccaccacgtgcgacgggaaaacgggaccgacagatccaccaccctgccaccccaaccggaagcccctcaccgcctcgcccggaagtctgacttgagcggaagtcccgcccctgcgccgagctgggagtccggagctctctggatggcgcgctgtatagggctgtggatgttctgtgctctcaggaaggcgtgttgagtagccggcacggcgaggcccgtgctggccgtttcttcccggagttttcgtttctgtaccccactttgtgtttactgcggcaggaggcgccagctagcccacaggctgttcggcctagggggtcgtaccttcctaacttcaccactctctgggaagacaccgcacccacagtagggtcgctcgggcctcgcgggctgcacctgtctctgcggagttcccccggcgcgggcggacgtcacacaggggcgttccagcactccgggagcccgattgcgagtttgtgagagtccttggtggaggaggttggaaagcgttctccctcccacaaaacccggtgcagagggagggagagccaggtccgtagcgtgggtccaagaaactatggatcctggaagtgagcacacttttgtgtcttaaaaagtttggtgtctcgttttgaggtgaaaaatgaatgagataagtgctttttaaaaaggtaaagtttgtcttacaactgaaaaagcttttaaacaaaactatagtttttgcgagtaactcccgtgacacctcttttaactcctatcttaaaacagctttagaatgtctctggaacatctattcaaacatttgataaatatgttaaaaatccaacataaacctgtaaggacaaatgaaagatggaaaaaatagtctaactttaaattaaaaaggtaaactggcagattgtgcagtgccacatgagggatgaacaaagttgtagaaatgtaattggaagtgctgggttcacaaacaagaaaactaagaaacaaggcctttgcgcttttttgcattgggaaaacaaagcaagaatttttcagatctcaccacaatccaggcagcattatttgaaagacaagggagaagtgagcataaagttgggcctttcactgatcctgactggtctgcttggcttacttttttatattttaccaagtgatgacataggtttgaaaacaactaattttcaataaactattcattcagaaattcaataaaagaatccaggcagatgagtaatgactataaattgaaagagcttgatagaaataagtcattggaatgcaggttttattcaatcaatatttgctgtgtagacagcactggtccatttgcagtaggggatattggaaagccctaagtatgctcctctcaagacatttatgatctgtaaacacaaacactaacacccttgaaacagtggtgaagctctaaaacagtaaacgaaatcaccaagtgctgaattgtaagatagagatttagagactgaa

SEQ ID NO: 1436 - DNA, 6000 bp, Homo sapiens
ttttgtatttttagtagagacggggtttcgtcctattgcccaatctgatttcaaactagtggactcaagcaatccttctgccttggcctcccaaagagctgggattacaggtgtgagccactgtacctggtgttttttgtttgttttggttttttttgagatggagtttcgctcttgttgcccaggctggagcgcaatggtgcaatctcggctcacagcaacctccacctcctgggttcaagggagtctcctgcctaagcctcccaagtagctgggattacaggcatgcaccaccacactcagctaattttgtatttttactggagacggggtttctccatgttggtcaggctggtcttgaactcccgacctcaggtgatccacttgcctcagcctcccaaagtgctgggattacaggcgtgagccaccgtgcctggcccccgctttttttttttaagagacaggttctccttctgttgcccactggagtgcagtgacatgatcatagctcataacagccttggacttcctggctcaagcaatcctcctgccttggccttccaaagcactggtattatagatatgatccaccacacccaacctcaatacacatttaaggatacttgtatagtagaaaatttttgtgtctgagtctgagacttgatcacggctcattcatttaaagctacacaatcctgggcaagttactctctgagccttattttccttatctgtaaaatgaagataaaaacagcccttacttcaattttttaaaattcttatttcaataagatttttttgtggattaagtgtgatgatgtatataaagtgcttagcacaaaacctggctattgttactatcacggaacacaaaaaaaagtttctctcttttgcatattgctaacaagtagatacttaccatttaacaaattgtctagtgtgccataagcatcttcacaaagtgtggattcatactcattttccctttcaaaattctttatttcgttctgtattaataaaaaaggcatcaatacttcaagcaaacatcacaagcttcttctaaaggtatttgcacattgttacataattctgctattagaatatttcattacataggtagaatgtgctttctagtatctttccccagcatgtatttggctcccttttagtaaaactatgctaacagagtcccaatattaaacaacaatgtaacaaatagcttgttattttaatattttggttttttggtaagtcaaatcatgtgactataaacttagggatacgtgatagcatatttatgtattgataattatttgatgtttattaaatctagtctaaacagcattaagatggttatttcagtcttttaacactgaagatatataaaacaggcatatatctttgatgtatttttataaattcctatttagtggaatcagatgtcactgactatcaaacgtttagcacaacactcatgaagatattgggacattacaatcttttattttttaataaagggagctaggcattttcatgaagacaggaaagttgtcatttatatgcagggtgctgtcaatgtcattatgaatgacaactgaatcatttgcatactgatgtaagtggaagatgcattagactagaagtcaggttccttgggctcttgtcctgcctctgactgaattggtcacgtcccctggctgcactcctggctagaaaggatcagttttaacactgtgtgtaaaaatgtaccttgctctctcgcataggctggagtgcagtggcgcgatcttggctccctgtaacctctacctcccaggttcaagtgattctcctgtctcagcctccagagtagctgggattacaggtgctcgcttccatgcctggctaatttttatatttttagcagagatggggtctcaccatgttgcccaggctggtcaaaatgtatcttacgctagcgaaactgggaaaaccagaccctgtattcccctcctttatgtgtccaccgaatattgttttattgttccttatagttttgaagaaattttcatatggaagacaatgtgaattctgaatacatctgagcctcctggaacttataagcaatgcacacctgaggcaagtcacaagtggtgccggtggtttccatacagattggagaatgtgaaagcattacaccttgagaaagattgctgacattcatggtatccgattctgacatgctttctactttttcatgagaagtatccacttcaaaatgtacaggatctgaaggtgatgaccaaaatttttgatagtccttgttcataactgttgaacaatagaagacttctttaaaaaaaaaatgtgtctattagtaggtataaacaaaaagttttttccctatccctcttctcattaagaaagtagcaaagttcactgcccttatttgaaatgtcatttgtcaagttattagaaaaattaaaaattttagtctgagtataccgtaatttggtatggtagtaaatactgatttggagaaaaacaaacagtattggctactatccaataactccctagaaggctttggacctagaagtgaagggatctctgtgttatttaatcaaggatatttacaaaatattatcagagacctaatagtttccacaaaatcctggatttttatttacttgataccttccacttgaacacctcactaccaagtcaaacccagcattgtaactgttttccctcctcactttcctatactgcgcctattccctcaggtacatgtgtttgaaaactggacttgtcttggcatccctctacctcatcatgcatggctattcagataccaagtcccgtccatgtctcctttaaaaatgtctttcagggccgagcgcggtggctcacgcctgtaatcccagcactttgggaggccgacgcgggcggatcacgaggtcaggagatcgagatcatcctggctaacacggtgaaaccccatctctactaaaaatacaaaaaaaaaaaaaaaaaaaaattagctgggcgcggtggcgtgtgcctgtagtcccagctactctggaggctgagggaggagaatggcgtgaaccccggaggcagagcttgcagtgagccgagatggcccactgcactccagcctgggtgacagagcaagactccatctcaaaaaaaaaaaaaaaaaaaaaaagtctttcagtaacctgtgctttctttccatcccatgttgccacactggtccatattctcctgacttcctcaggcctgtccagagctccagagctgagagtggaaaggatggccactcacattgattctataaatttttgtccttccaggccatccatagcctggagtgacatcccctacccggtactcccctgctctactcagatcaggctcatttccctgcagacagataatgttccttacgaattaagcttcagtcatctgccctggcacgtgcttctctcctaaaaccttcccatctacccattcatctattttcaaaattcctacaatgtcttcagtctctaaatctctatcttacaattcagcacttggtgatttcgtttactgttttagagcttcaccactgtttcaagggtgttagtgtttgtgtttacagatcataaatgtcttgagaggagcatacttagggctttccaatatcccctactgcaaatggaccagtgctgtctacacagcaaatattgattgaataaaacctgcattccaatgacttatttctatcaagctctttcaatttatagtcattactcatctgcctggattcttttattgaatttctgaatgaatagtttattgaaaattagttgttttcaaacctatgtcatcacttggtaaaatataaaaaagtaagccaagcagaccagtcaggatcagtgaaaggcccaactttatgctcacttctcccttgtctttcaaataatgctgcctggattgtggtgagatctgaaaaattcttgctttgttttcccaatgcaaaaaagcgcaaaggccttgtttcttagttttcttgtttgtgaacccagcacttccaattacatttctacaactttgttcatccctcatgtggcactgcacaatctgccagtttacctttttaatttaaagttagactattttttccatctttcatttgtccttacaggtttatgttggatttttaacatatttatcaaatgtttgaatagatgttccagagacattctaaagctgttttaagataggagttaaaagaggtgtcacgggagttactcgcaaaaactatagttttgtttaaaagctttttcagttgtaagacaaactttacctttttaaaaagcacttatctcattcatttttcacctcaaaacgagacaccaaactttttaagacacaaaagtgtgctcacttccaggatccatagtttcttggacccacgctacggacctggctctccctccctctgcaccgggttttgtgggagggagaacgctttccaacctcctccaccaaggactctcacaaactcgcaatcgggctcccggagtgctggaacgcccctgtgtgacgtccgcccgcgccgggggaactccgcagagacaggtgcagcccgcgaggcccgagcgaccctactgtgggtgcggtgtcttcccagagagtggtgaagttaggaaggtacgaccccctaggccgaacagcctgtgggctagctggcgcctcctgccgcagtaaacacaaagtggggtacagaaacgaaaactccgggaagaaacggccagcacgggcctcgccgtgccggctactcaacacgccttcctgagagcacagaacatccacagccctatacagcgcgccatccagagagctccggactcccagctcggcgcaggggcgggacttccgctcaagtcagacttccgggcgaggcggtgaggggcttccggttggggtggcagggtggtggatctgtcggtcccgttttcccgtcgcacgtggtggccactgttggcttctgaatggtttgcaaggcggatatccacgccaaggcctttggatcggccgtgggtacatccgtctgagccgttcctttccatcgcagagcggcggcctccggcggcgctctccagtcatggactaccggcggcttctcatgagccgggtggtccccgggcaattcgacgacgcggactcctctgacaggtaggcggccgtacagtgccctggctctgggtacggctctctccttgaccgcccccttggggtgtggactcttgtttgcggtttagagggagactagtggttcatcactcagcgtctctcttgacaaccctttgcctgtttctgcatcccagctgggtttttctcccagttcacgcggcagagttaagtgaaagctacttgtcaagggagtctgcggttctcaggtcggttagcgtcactgggaggcagagttggggatagcgattaggaaacatgggtttttgcgttttaaccacatttagcgttcaacaaatacttactaagcacttaatatgtaccacgttctgtcctgggcgccggaggtaacaagaagaaccaacttcctgctgtcatggaactttaccttctacgtgaaagagagggcacaccatttaaaaaccaaataatgatgtagactatgcaaatcgtttgatataccaagtggtgactgaatgggtagggaaaggttaagtccagatttgaatgacaaggagctaatcctggcaagagcagagggaacagcatttcacacagaagggacagcaagagcaaaggccccgaggccagagtgcctagagcacagtggaggtagttgagaagattggtagggtgatagagaagtaagaaggggggccagatcatggagacctttacaagtgatggtgaaaagttcagatattaatgtgggtcttatggaaagccataggagggattttagcagaagaatgacattatttgcttggtgatttaaag

SEQ ID NO: 1437 - DNA, 6000 bp, Homo sapiens
aagctagttagggctccaaaaagtacagcccacagaaggccttgcatttttctctcttggtgtatggtgaaaaccttaatgccaggcgcatttcaaagccagactctggctctggctgagaatttagctttgttgcttaacacacatttccttctggcctctcatgtagattggctttaaacttcataaagttaaaaattattgcataattccttctctttagaaacactccagttctttttttactgtcaaattcggcagcaagaacagaaaattcagtgacaagcacaggaatactgagacaccaaatgcccttctatggggtgaagggtgtgctgccttccacatgcccagccaaatggagtgttcattgctgaaagtgtacctcgaccatgaaatgtcaacagagatttttttccctcatggttcaggcacaaacaacaaagcagacttagtcttctgaagttcgcaaaatggcagaatgtttgtctttggagtgagggagggatggagtcacagagtaaacaaggaattttcagaggacattttcttacttcaatttaaattatggatgtcacagagtggtataatagacactggagactcagaatgggggagggaggaggatgagggataaaaaactatatatgaggtacaaggtacactccccaagcgacatgttcactaaatctcatactttaccactacacaatttgtccatgcaaccaaaagccacttgtacccctaaagctattgaagttttttaaaaaaataaaatgttgatgacaaagacaaaccttttttcttactttgatcaaggtttttcaatctcagcactattcgcatgttagacaaaataattccttttgtcggcaggactgtcctgctcattgtaggatatgtagcagcatccttggcttctacccaatagatggcagtggcaatacccccattcccccagctcctccttcccactgccagttgtgacaagtgaagatgcctccaggaattgctaaacgtcccctgaggacaaaattgctcccacctgagaactactgtttcattcatttctgtcccacatgccttgtagacataactcagaacttctaccaacaagcttgtccaaccctgcggcccacggggcacatgtaggccaggacagctttgaatgtggcccaacacaaattcgtaaactttcttaaaacattataagtttgttttgcaatttttttttaagctcatcagctatcggtagtgttagtgtattttatgtgtggcctgagacaattcttcttccgatgtggctcagggaagctaaaagattggaagcccctgctctacaacactgttccaactccaaaaggctgacagctagaatctaggacttccagagaagaactaggatgagccactgatccttccctttgcttcagagactgtggattagaggtcacaacaagtagctgggctacaacctcaatctttatttttgaccctaagaaaatgcattgttattttatttcataaaacatctaccactattagcaggttatcaaccaaatcactctctggctcaacttgccaaatttctggcaaacagctattctgagagattttttagtcaacagattttgctagagctcctaaatactcaaggtggaaaatctttcaaattcctcattggtttatggtcatgtcacgggttcttttctggcctttattgattgccactagaaataagttattgatattcatcagatatgcccttagcactgaattctaggaaatactgtaacagtgatagtcacagaaaaaatatataaatattagttataattaatttagctaattcacttgaacaaataatctgttcattatttatattttcttctcccttctaaaccttctcccctggccaagtcttataactgtcatctctaactagaggactcacaaatctatttctagagtcaacattttccccaggttgtaatccttaatttcagtttctaaacatcacaaataaatattgacatattagaccaaataatttcttttgttcaattccatgaaaatcacatcaacctcactaaggctgtaatatggtaaacagctaaacatttcttgttctaaaattcttaattacccctgtagatatccccatcaagaaacagaatctatttccccaccttttaaatatgaggtgtggagtgaccattagcttgaaatgaccaatgggacatcagcaagcaaacaaaccaaacccccaaaacacttggggcctctgagttcctcaattttccctgccactgccaccatgtagataacctgccatgctagaaaatgaaagaccttatagaaagaggtaccaatcttcccacctggacctgatgcagcaattgtaagtcagccagccccagccaagccaccaactgaccgaagatgtatgagcaagcacagctgggatcagcaaaagaacaggacagccgagcccagcctgaactgcctactgcattttggggtggtttccgatacatgaggcatagtctcaaccatatttattttagaatatgaacttgctttactatttcaagtgaattctaggagattcagctgtgtttatatggcaaggcaatttagttggtcaagatgagatctactaattccaacccttatggagaacaaactggattggtcagttacgtgttgattactgctggatgataatatgtgattaagatgggaaaaagaaattactgtggaagggctgagtcgatgtccttctagcaagtatattagacatgaagaccagcaagtgtattagaacttgcacccaaaggttgagtggaaaagacttatttttttgttccattgtacaagtagttcatgttttagaaatagactctagcctaaaatttcagtagaatgcaggatgcattttctcatagaagtaaagatataaattacagatagttgcttagggcagcctacagatttctctttcatccagaacatacaggaagtattctgtattggcaataaatacaatggaaataatagaaaaataaaaataaaaaattcttaattatgctaacattaaaactgtacttaaaggactacatatatatagatatatagagagaaccatgtggaaaatgcttatgatttaaagtataaagcaagaaataggttggctgcagtggctcacacctataatcctagcacttcgggaggccaaggcagatagattgtttgaacacaggagttcgagaccagcctgggaaacatggcaaaaccttgtctctacaaaagaaatacaaaaattggttgagcatagtggcgcacccagtaggctgaggttggaggatcacctgagacctggaggtcaaggctgcagtgagctgtgattgcgtgattgcatcactgagctctagcctgggtgacagtgaaaccctgcagaaaaaaagaaaggaaaaggaaaagaaaagagaagataaaagaaaaaaaatcctatacacacaatgaatataactataaacacataagtagatatgatgagaaatcagtatacaagaatcagtcaacatgatgggatttacaattaactttttctcttttggaatgcccataatgttaaactactagcacttctttaaattcatcttttaaaatattctacacacacacacacacacacgcacatctatgtcaaaatttaaatataaatattgagacctgataatatgaactcagtctctatctcttaaattagtcccgtaagaccatcactcaaccagaaactctggctgtgagtcctgcaggcaacttgggctttccctctcctacctactcactgcccatgtcactgccagtcaccagctgctccttattctgcaaaccaggtcagtgcactcagccacacctttctgcattcagcccaggtggccccttcctactgccacctacctggattaagtcctggtacctctggctcagcctcttccaataagatatttcacgatgccaaagacttggttctgctgattcctgaatcatcctgcaaacccatcctccccctcctcaccttccatgtttaacacccagctctgtctggatcacttgcctgcttacagagagcaggccctctagagcctcttcaaccaccctttcaggctcatcgtccactatccctcactaatctcagtttccatccccaggactttttttctctaccaagaatgccctctctcccaacataattatctgaatcccacctacctttcaaagtccaactcaaatagtatcccctccttaaaaggatgttctgccctgctaaacatgcttcttcctcctgaatgtgcctcctgaactcttctcctgattaaacatacacagctaccttgaattgtggtaattggctgcctctttattgctttcctactgaattataaacccttgcctttgaatattttgtttttaatcctatatagttttatgcactgttggcaacaaaaatatatttccttaataaatcaataaaaaaaggtctaaaaaagcaacaaatttaaaagttccacgacttattttttcaagtttaatctgtaacaagcagattttgacttaatctcacagctgggtttttaagaagtcaaatttcattggtatgccccagataacaccctcactccttccttttctctttccctctcagactctctgcagaatgagagcctcatctcaaattgtctctgcccatacaaacacagaacttttgatagttttattgtttatacttatagacctgaccaagcaagctcctcaagatagggttgttaaagggctacagccaacctgattctctacatctgaaacaataattacagagctcttctggaataatcaaatcataaaactctacctcgtaggatggaacagaaacattggctcagctaaagagtgggtgttttccttagattgtggaatcatggctgatggttaggaccttaaatatatcgaggtggctaattgatgtataataatttacaaaattattcttctatgctacagagctacaattcaatttacagtagtaaatatgagggccttcttaaggaaccagaaatatgaggatatgcacaatattattcacattttacagatcagaaaattgaggcacagattaagtaacttcccaaggctaccaggcattctagctccagaaactgtgctcttaccattctgctacaaggtatttcgaaaaaaagaaaaagtaaaaagaagtcaaaaggcaacagagttcattgattattccatagaacagtcacaccatgcaattctcacacccttgcagacacacttgaccatgaaaggttcctcaatgaaatgttcctcattatcttcagaagccatattattcacattgactttgcagttaactcagaccctaggtctggaatgctgtcttctctacttatccaaaactatacatccacagatcatataaactctcagccctgctgcaaagcctttccagaaaaataaaaatggttgaaaaggcaattctgctaccaatgactgtttaagcccagccaagtaactgaaccattccaacttcaatttacttatgaaaagaatttgatgatgtaggaggttatttcaattctaaaatacaaacccatgttgatctttctcaatcttgaactcatagattattatctattatctcaatttagtttgttatttatcctagtgggccattaaaaactaccacatgtgtttctgtctctccattagtcaataactaaactaacgagcaattagtaagccatgtgccagatgctccgctaggcaccagagggataaaaacaatacttatagtataccactaattttcgcttagtaactagtgaaatgttcaagtcatgcctgagtcaagagttgaggagacattacaatgtgtaatggaaaccaaggaaagtgaaactttggataagtggggac

SEQ ID NO: 1438 - DNA, 6000 bp, Homo sapiens
tgtagtggctcacacctgtaatctcagcactttgggaggctgggcaacttagtgagaccctgtctctacaaaaaacacaaaaattagctgggtatgggtggcacgtgcttgtggtcccagctattctggaggctgtggtgggaggatcgcttgagcccagaaggtagaggctgcagtgaactgtgatcatgccactgcactccaagctgagaaatagactgaggccctgtctcaataaataaataaataaataaataaataaataaataaataaataaaatcaagagggaaatgaatgaagagttttagcaggactgaggactgtcagtgtatggtttaatcatcaagcacagaaaatgtcaatttgtacttacaagaatatacaatttagttgacttttagaaatacatctttgaaaactaattttcattgtggatttgtatatacaatatttagcccttaagaagaagatcaactagaggtgctatattctctttcaggagataatcttctattagaatttttgaagctatcaaaataaaatgattccctatggaaagattcataatttccctagaaacatactttattctatggcttggtgcttttatgtctgcaacttatgaatatatttattttttcatgttaaaacataacttttaaaactcggatcacattataacaccttatttgccatcttaaaaatgttctttatcctctaatctcatggtaagaccacatccatattctccagcctgttgaacggagccaaatgccccacacatcactcaagagccctaccactctttcctccccacacccgttattgtctccctcctttccctgcttctgttactctctggctctgctttcttcttcccattttctgtatctattcttcatctacttgagaactatttggggatctcacttcagatttaccatggctgcctcccagctctgcacaatccattttaattttattcatgtcttccaaaacaggccctccctgacctgggctgaggaaactggccaggctgagtccctgatctccaccatggcaggaaaaaatgatatgcctgtttaagatataaaagcatttttatgggaaaaagtacaaagttatcacgacaagctacaggtaagagcctgattgaaggacttgaatctctaatccaaaagctacatgcacaattctacttaatcttacttagctcacagggcaaataccaaggaataaatctcatttatatttatattgtaaaaataccacaggtttatcaagtgtttagatgtaataccctgcaagttcagagactttatgcttaatggaaataaaacattattgttttgcaatgggaagtgtaactaattttgacagagcaagaacctgtaggttacagacattgattatgagaggcttataaaaacactatgcatttaaatgtttggtataaaattgcacagctcaataatgaattctggaggtatctattcctttaacccaaagagtcttttttctccaaacccaatatttttaaaaataactatttgcctctacaggatttagaaaacagtgatacataaatgctctctgcaagacattattctctttcatttactgaatagtttcacaaatacctgtcctaatatggtacaatcttcaatattattacataaaaaagaggttcagaagtattcattgaatggcaccatttgtgttaatatacaaacataaataggtagatgtataaaccgttattgcctcaagaagacccatagactgggcaagaggaatacctactttccactgtcagccttttaaaatgtatatatattttcttagtaagagactgataaactgaaatacagacaaacagatggacacatacacacacacacacacacacacacacacacaaagtgaataggtaatcctaatcctatatttaaccaatgatttatgtgaccaattaaacttgtaaaaatatagaacaatgccctcaaaagaatcaactccaagagcaaaacagcttgatttattattaaaagagtatataattagacacacttatattctgttcctgaatagaatgaaacagagaggccctacaattttgtagcttggaaatttaatgaaacatttaaaataattataaggcaagatgacttatgttacttgttttatcttgtaaaattttctgttgaagaaggtactctaagcagaggctaaaagacaatatttgagataatatttcagtaagattaaaattagaattaaaactgtcctccagtgaactgaactttctcaaattactgggtaacccatcggctatagaaaaattattttcttaattaaaaataggatgtaatatgacctacaggaagagtcaattgaagctgttgacaattccaaatccattaaccgtaagattgattttgaagattattgcaggcaattttatgaaaaaataaatatgaggtcacattgaaaaaataaagacagttaatgccagaaaaataccagccacctggtatcagataggtacagttaagaaaatgattaacataattatatacaaagaataatttgtataatttgccatcatgtacatgaatatactttaaataattttacttctaagaataatctttcatagaaccatttgtgatctattacacaataaaacaaattttggatgacaaatatatatttcaaaatattattttaagatgctataattccaatgactttattacctccttttactttcaaaattgtcctgggttagaggacacattgcattatcaccctagtgggagagaccaaaagacactgatcagctcagacattatagggtctagtttcactaccccacaggtactcgacttcctctttctcactcttatcttataatttatttaaatgaatattatgtgagaagtttaacagggatgcagaatatttggagatttttccgtaaccactctcagtcaacaagaagttgaaagctttcccagacttttcactaacagagaaatataaggattattgcccagccatttctttgctttgcaaaggctggctggatttaaaattaaaattatatgtcaagtttcataaccttcagcaagaaggattccatttgaatagcatgttccagggaagggtccctttgagaatcctatgtaaggaagaaagcacagttagacaagtacacaaatcagcagtacagttaaagaatatacaacctagctacatgaagtttctttcaggacaatggaaagtttaattaggaaaacagtaaaattttctataacaaatgagaaaatccatatgcccatctttatagaacaaaatccaacagtcctgcttttaagagatgtagtttaagaataatggttaccttcttaacatggtcaactcagccaaatccagcactacatctaaagttaaaatactggaagcacacccgctttaacatcaggagcaagacaatcatcactcccattcttgcacagtatatttgttaatgtattcagagcaattagacccttccccacaaaaaaaagaaacaaaaaaagggtgggagaagggagggatggagggatggagggatggaggaagagaggaagggaggaagagaggaagggaggaagagaggaagggaggaagagaggaagggagggagggagagaggaagaaaggaagcaaaggaagaaaggaaggaaagaaggaaggaaggaatttataaacaataccctggattaaggttcaacaaacattttctgtaaacatttactaaagatagtaaatattttaggttttgcagatcatacagtccctgtcacaagcacagttgacccttaaacaacatagatttgaattgtgtgggttcacttagagaaggatttttttttaatatattccttcatatgggcaagttctgtatccacaaccaaaagtggatcaaaaatactgtgttcacgggatgccaaacctgcatatgcggaggaccaacttttcatatctgtgggttacgcagggccagatatgggactttgagtgtgcacagattttggtatccactgtcctggactgtaccggactttgctgttgcagtgcaaaagtagccatagacactagtaagcaaatgcacatggctgcatgccatccgccacatctctctctacttaaggacactgaaattgaatttcatataactttcacatgtcacaaaatatgattcttttgggtttttttccccaaccgtttaaaaatgtcaaaaccgttcctgtttcctgggctgtacaaaaaacaggtatgccaaatttgatgacacactgccttacgttattttaacagtaattaaataattactctcaattaattcaacagtatctaactattagataaatttaaacttatctaatggcctgtttttctaattttttgtgcagtaaaggttttatagaaaaattgtaaagaataatcaaattatgaaaatgttcaactttaaaacagaatttttatttccttctctctcaaaaaaaaaaggacccaatctctttagctgttaattatattcctgtaaacagagtaacccttaggaatttctatttgaacaatggcatgcacacagttcttaaattcattccgttttctttcttccttttcttttttttttttgtgctgaacttcagccaaacattaaactaccttgggaaataaaaggtaaaagagaaagaagcacaaagatggtatttgaccttattttatgaggacattcaatcttaatttagagaaaaagaatagagcttttttagtgtgagaagcatgagaactggaaagaagtacagagtttttcagaccagcctatttttctaagtttgttttccggtaactatgctcttgtttctatgcaggtgaggttgtaggtcaggtgtgtgtgtgtgtgtctataaatccacacccatttttaaccagaaacatccagaatacatttccaacaagagcactggccaagtcaggtaagcaagcaaattttccagattacttaatcagtggtcaagctttgctatatttaaataatcaccttttgctatttaaaagtgaagctttcagtaaagggtaggaaagtgaaatgaatttttatttttcttcttttactgaactggatttcctttgctggtttcatagttttatctctatttatattaatggtattagaataaattgacgtcaaccacaaaaacgactctttgaaaagtattctacaagtaatgatagctcttctttatattcttttaagtcttgttttattttaaaatataggaacttataatatcagttacttacgttaaattacttttgaaaaataaaatactaatgtcataaaatgctaattgaccaatgtttatacaatctaattgctgacatatggttatgtgcctcccaaatgcattttaagctgctgtaggcctgtaaccatgccacatttatctgtgttcccccaagtagcttaaccttgcaactgatactaaaggaccctcagcagtttacactatattttaccaaggaaagcgttatttattcaaaatctacagtgtacaagttgtactgctttgtcacagaatatatttaatatctattttataatttatcaatgtaaaaccagaaaaccaagatttttattttttaattagaaagtatttgacaataatacataaagacttgaaattttaaagaaaaaatggttcccgcttaactctaagcttcgcagctttaaaatagcaaaaatgatgaggttatgctttttcttttttaaaatgcagattccacctgcttgtctctgtagctaacatagaaaaatctttctaaagattccttccagattgacttttcttaactcttctttatatccaagatccctggaagaattttaatgacgttttggaccctattcccacggaaaaggaacagaggcagataaaattttg

SEQ ID NO: 1439 - DNA, 6000 bp, Homo sapiens
ctcactgcaagctccgcctcccgggttcacgccattctcctgcctcagcctcccgagtagctgggactacaggcgcccgccactacgcccggctaattttttgtatttttagtagagacggggtttcaccgttttagccgggatggtctcgatctcctgacctcgtgatccacccgcctcggcctcccaaagtgctgggattacaggcgtgagccaccgcgcccggccgtctgtatgttctactgctggttacattaagtttttacaagccagggtcacatcggaatatgctcttatagtggaatgagtgccaagtttcttcattcactggcttgtttgttcatttatggaatttattcatttactcatgcttgccgtgtactaggtgctagggctgtaatagtgaactagttaaaggcattcccctctttgcaggatctctgacttcataaattggagaaaatcactatcagttgtatcaaaaatgttggacactttatcctaattaaatacatgctagttaatttctaaattaaaaaacaaaatattagaaatagatgtttagttattctaaataagatatttctgatactataccattttctcaggataataattgatttgacaacttaagatatgctgtatatcagaaaacaaaattgaaatatagaagaatgggacttcttttttgtttttgcctaatgcatccaaagttaaatatgtttaatagaagtgccattacatattgataagaaaaacaatactaagaaataaaaaaatttgaataggtgattcacaaaagaaggaatacaaatgagcaataaataaatgaatgaaagtgttaactttaattgaagaaatataaacttcaaagtcagtgagatgctaacttttggctatcatatttataaaggttgtatgtaaggtaatgtaagggactataagtggcccagtctagtgcgaccagttgagcagtctgacggtgaacatcagtgcttatttggttcactccttttaccagcaaataccttcaagaaatctgtcctaaggaaatgaataagctgtgtacaaaaccttaatcatagatattcattagggttttatttaccatagaaaaaaattaataaaaataaaataatactctccagtgaagttcagcttacacacctcttccatctgtacccaccttctatttaaattggacacttctttctgcagcccaagtttgtcctcttaagcagatgtttgcagctgtcacagggcccattgctctcctctcttctcagtttctctgtttctgcccatatccactcacttttgatatgtaatcatgtatgccttcttgttgtaacttaacattcccatgtggttttataagctgcttatttctaatatatatatatacacatatatataaaatctgcttatttctcttacacacacacacacacacacacacatatttccattgtaagtataaatagagcagcccctctggatgcttctctaactggattgtacgttcctagagacatgttcacctaccactgtgcatgtacccagagttggataggtcctttgttgagtaattgaaggaagtaattgaaggaagaaaagtgttaagaattactgtcccagttgattggggccttggagaaggggtcatgagttgccactcaaagtaccccagaagacttctctgcaaacactgcgagtggggtccctctgcataatgtataggtagcctgtagggtctctccttgcctgtcaagctgctgccttaattagcttcctcaaatacaggtgcaagtgttctcctttgccctatctcagacacatctagggtttgcccactgcctgccaataaatattgtgcttcgtggtctggcaaggacctctgccccagagaaccatctgcttcctcactaggctttcctctcccaggctctggtctgatcttcctgggggcttaccatttcccaaacacactgtggaggattttctttattaatgaatagatgtctatatgcatgtgtatttgtatgcatatgaataggtatatgcacatgtatttatgaataagtatatgatcttttaaaatcaattaaaagaaaaatatatgaagtcagggtcacatgatcactgtaggtatagaaatttaagattaagtcaaatatgttagggatttaagtaaagataagccatagaagaagttaatctcattgctattatgaaggggcagcttatgttttcatttactcagtgatgacacgctcttatttttgatgagcagttagaattaatttacgggttttgtatttccttctatgaaacaaatttcagagtccaaacacataataataactagaccatttatagtttataaaagttaataatgaacttctcaaatcttgaaagcaagaaacagtaactaaaatataaataagttctcagggcgggggttccataagcgttgtctctgaatcagcagcatcagttatcacctagaaactcatcagaaatacaaattctcagtcttcatgttcagacctactagatcagaaacacacccttcaggtggttctcatgcacactaaagtttgagaatcactgtcttaaggcactgaattttaggagaggtcatgctctatgccaaaagatacttgtttttgttcattaacagatgaggaaatgttgggcttgctttgggttcagtattttatttagtccaaagttattcaaaatggtgtaaaagaaacctgggttttcatacatttcattgctattaaaattatttttactgactggtctttccctctctcttctttcctctttgtgtttccacatggcagacgagttggattttatgttaatactttcaaaaacgtctccagccttgaagccaagtttcataaggaaattgcggtggtgagtcatgacgataatttttgcatatggaatataaagtaaaggaaggtttattttggaagcaaatgaaatgggatagaattatccaaagaattcacccttttgtatgtttcttttagcagtgtgttattaccctcgataacatttctacggtttttcatagtgatcacatagttctttgtatcttttgaagattttgccacagttttacagtgttgtttcttttaccaggcagtttataaagttggaattcccagtggtattttaggctaatgaaaaattgctctcaaagtatttagataatcaactctgttgttgattgctttttgttgttgttgttcaaaagggtggagtcaatgtaaacagtaagcttttgttttctgccctgtactctggttaataaatatatacatatatatttagtttactcgtgtttcgtttgtttcagttttgacatagattttaaatttgaaccgtatacagaatttcagttatcctgaggccatccaagctatcataaaatttatagcttctcaataagcaatttctttcttggggagaatagcctgaattggcaccagaatgacatgtgactaatagacaagtggcctctgtccccttagctttgccacaaactgtatgaagtgatgacaaaactgggtgaccagcacgccgacaaggccttcaccatccaaggagcgcccaggtaggcccctgctcattggagcacctgtaatgtcctgcttgctaaaatttcttcaatctgtggaccagcctgtactattttatttatcctacaaaagtcccacaggagccttttcaccctagaagctgacactaattttatttttgtgcttttacatttatgtctggccttcagtgacccaactaggattcttcttcttgtcacaacagcattgactttctgcctctctgcctctctctgctttccatgaggcctgatagcaacagtgtgaaattttaatatataatgtatatgcttgttgtaatatataatttgttatgcacttaatattttctccggagaagaaaggaattcccaaagtttatgacagtttgtcttgattgttatcattgatgctgacgtctttcatgaatccattttgggaaaggaaagaggaagtaggtgagatctcatcttcctcttacctcctgactcttgatctggtgaacactgtgctgtttttgttttattgcacgttgcattatgagtatgccagtcaaataccccggagccccaatgatccataggtgacctgtctaccttgccagggttcggctgcacaccagctttctccagtgattctggaatcctttttattccatccttcgtagactttacgtactcagagattgaaggctagtgagctgggagtcagaagacccagctttcggttttctgattttgcagttaacttgctttgccttccttgagtaagttcaaaacctctctggttagaggtctcattttttttaattcaatagaaaaaaaaagatactattgaactacatggtttccaaggtaatatacagtcctgacattctatatttgccattttaatacaaacacttatttgcatacatttatgaaaacacacatagtcatacacatgaaccaacttctacatatgttaatgtttggatccctctagagattgttaattttcttattccctgctctttggattagccctacttataggttctgctatggtttctatactatgtaagcagtagtatatcttctctttctaagggaaagaatattgcctgaaagaatacataagagaggcagagttactgttttcagtatggttatttcagtatggggctaggcacgaaggaagaattggaatgggaatatcagaatgatatttgagtgttttaaaaatgaagtgcatgaaaaaatttagggttgttcccttacatggaaatgaaagggacaaattcatctgaaaattgtaatgttgccaaatgagatacagtgaagaaaaagcggggccatgaccacttaatgaatgttcctttcactttttttcaacattcctctgcagaatgaggtggtgagtgagctcagtggcatctctattaagcttagattggggctatgtttccatctgaggccatgattgctggcatatgaccccaatcatgtggcatgtctgtgttctcgctaaaggacccagtttcctcagccctttgaatatgtagaccatgctgctgtgtacatgctcttttattttggggtacagactctgtttcttcgagctgtagactttagaaattcttagagagtaggatgtgtcctgagtgcttcttagtcatcacatttgggctgttcccgagcgtctggccgcatgccaggaacatggtgggttcttagtaaacgaaactgaatcttgtctgattttgttgcacatttcaagatgcctgagttgagtagttatttataaggtctagaaagagaaataattagtgagtttatttccaaatgttattagaaagcacttctacaaaatccttactaacactatcctaaggttaccttttaatataaaagttacaattttcatagttttttatagattgtgacatggcaagattctcttgtaaatagaaagtgaaacgagtaaaatcaattcagcttatgtttggaagattcttgcagaacttgtttgaaagaacagagggcttgcattactaagacctgaattcagattcactaaatggctgggtgattttagagtttttatttttaacctatctatgccccactttactacttgtaaagtggggacaataaaacatggctactgtgaagacaaaagataatacatgaatgaggtctctgtagtgcaaataaatggtaccagttatcaccatcactgttgcaattaaccagaattaacctggaaggggagagcaggacaacagacagtacctgttaggcttctgggtttctctgaaatggaaaacccctgattagatgaatactgttcttgagaaggccccttgcccaatcccctgtgttcctctagtgattcgggtcct

SEQ ID NO: 1440 - DNA, 6000 bp, Homo sapiens
gtaagctattaagtgatgcacaagcaatttgtttggggtataggagtcgttttgcatctactttgcataaaagcatcaaagatggtattcaaatatgtttaagttattaggcaatttaagacagtgtcattgttttctttagtggccaatgactctgtgtaaaacaaagctcttgcttcctatttagcatttcaggatacattagtgatgcattattaatgtattaggaagttgttatttttagacaaacaaacctatttggtaaaattgggaaagaaagagagtattcatgcaggcacaatttagtaaaaatatatgtggagctaaaatgtatacacttggcctaatttgaagcatgactgagtctatttttgatggttttcacctgaaatgcagaagatactcagtcaatatatatttttgaaaaacatcctacttacactaccattttcaagtgacatttgtgagagaaaataaaagttatttgattctttgaacaaaaagctaagtatagcaagtagtcataatttgattgagaacccaatttcaattaggtcctgcaaatatttaaatggaatgtctcttcaattatctacacaatgacacaaagaaaccaataattagaaaaaacttgtagctaattggaatatgttttagcatataaatcacattatatatggtgttatattataattcttatgagtgttagcaaagtcctagaattctctaaggctctaaattggactgccaagatataaagataagagagataaacttctgtgccattaaaacatgtggaaaatgagttctgtgataatacagtggtaattttggggctattccatccattatcaatatctgtcataattcacattttgcacattttgacttatcagccaatttgaagtgcaacttggaaggaaggtgaatcagaagtgaaaattgactcaggaattctgccttgtatggatgaaaatctggagttggtgttgtgatactttttgtgaagcctacctaaataaagattgaatataatttgatgtctaagcatgtcccagaaattagaaagaattgtggttacttttcattaacagtaaatctatagggattggatggattgtatttttccttgactgaagggggagaaaaatggatagccaatactaggaagaggtacaagccatcaagaaattgtggacatgtcctatggttggagaatgaaggaagtatgcatgaaagcatggccctaccactttggagttgaatgatcctgctgagatcatcttgtcctgtagacccccctcctttggcagcgtagtgttgcagttctgcagagggcccttagagagtgtggggagtaaacagtggcctaatgggtggggctctgggaacccaacactttctgcaaccagagaggcccatctgattaatatatttgggttttacataacattttgtgtgaagaaaaactctgctgtatggaataacaatgtttaaagtcattgtagttgggaccttcactcccccacaacctctgtttcagcagcattattaaagaatggaaataaataaagatctacaaagctacacattggcacatgtttcaggggtctcttttacctgcattatcaggtttggcaaactagattcatccactctgtgagcatctgtgcaaatccaacatgccagttttaggtttctaaagatacattggggaagaattcatgaatcctagctcagggttcttaaggagtgggtacgtccccactctagcatgccaggcatcatcgtatcttgcatgatggatgctcatgagctattctcatgcatacatgcattttccaacaaatatttacagaacagctactaaataccagctaaagtgcttagtcaatattccagaatggctagaatgagccacctggcaacctgaaagtggacaccgatttacctttctgttggagtgaaatgttttgataacagtttgcatgtaacaactttttaatatgctcagcatgtattccaaatagaattattaagaaatgacaagcctcccttttccacctatgttacagaactagatttgggcatctgaataataagaaaaattaataatttgcaattttattttaaaatatatttattgagttccaaaaatgtggttgggtggggtgggaataattacgggacagacaaaagctggtactttggtgactgagggcttgagctctaaggaagcagaaaaaagtaaatctggtactcggaactcctgtcccttgcctgacagagggagggcagtgatgtctgcagagggagctgtatctaaaaccagtgtaggtggctctggggctcacagtgcaagagtgactatggattgatattctctagaacacttctggtgtattccagcattctgagacttgtatcctcatagtcaagatcccaaggtagagctgagattctgaaccctgtatcagtcagggttctctagaaggacagaactgatggaacacatatatatatgtgtgtttttaagtattaactcacacgattacaaggtcccacgataggctgtctgcaggctgagaagcaaggagagccagtccgagttccaaaactccaaaacaagaaattcaagtctgatgttcgagggcaggaagcatctagcacgggagaaaaatgtaggctgggaggccaggccagtctctcttttcacatttttctgcctgcttatattctaggcacgctggcagctgattagatggtgcccacccagattaagggtgggtctgcctttctaagcccactgactcaaatgttaatctccttcggcaacaccctcatagacatacccaggatcaatactttgtatccttcaattcaatcaagttgacactcagtataaccattacagccccaaaggcccctgtttgagggaggtgactcaaattcctggtttctgagcatagcctttttcattgaatgttgaccaagtggtggatttttttttatctctctgaaataaacctctgtttacttggagtgttataagtaggactcatccaaatttgctcagaactttcccactgttagcactaagagtcctgtgtcctggaaattccttaattcctaaggaaactggggcagatatttatcctagggaaataagagccaagcacatagaccaggtgttccaggtacctactgttttataataaagcattataaaagtgatcgactcataaaaactgttttgtttgctcacattctgcactctggctgggattagctgagtggttcttctgctggtcttgctgatggttgcttgtgtggctgcagccagccagtgaactgattggagaatgggctcagctgggacatcttggctgctctctctctctctctctctctctgcgtaatctcagggcctctccctttctgtatggcctctccttgttattttattttattttatttttgcagcagggtagctgaattagctgaatttcctatatggtgtcacaggaatccccagagggcaaaacttgcctggtttctaggttgggtgggtgggggggggactggaattaccatggcgtcactttcaccacatcttattgattaaagctggccatagcatcattctagaatcaaggtgaggggactacagggtgacacaagagtgaacaccaggtggcagctcgctgaggtctaccaatgtaacagtttcccccagaggtacagtaggatgctcacctggactcataggattcactgtgagtgaccacttctgacctctgtttgcagggcaccacctgacttcttctcctcacactctcagtgagaatggaatatgaatagtttgaccactggtcagagccaacaagagctctaggtgtagggcaggtttatccctattattcgtacttctcccaagcattaataagaataatagggatggtgagtccctgttaaggttgccaaaaggtttccaaggaagcaacaagttaggggggactgggtcttccatggttgatgcgaagctataagggacttgactgttccatgcaccatttcttgaagagtagtctattctaaggtttctgcccagcacaggaattttggagatgaccaaaacacatcgcctgtcttccggaagctgacctttctcaacgcggacctccccgccctgctaactcttgttttaaagtttaaacaagtgtcagcgatggtctctccccgctttgctctccacacgcctctctcctgcagctctgacttcgttggtttcccagccagggcccctcactgggctgtgagcctcctgagggtagggcgacctccataccttcttctgcaacacccagggtgtatggaggggcctctgttagctggaaacttttgggagcagcaagggaccagccccatcagctccacttcagagcagttccaatccagctggcttccacatccctagggttcttcccttttttgtctcccctatttctttttttgctggaaagaatcaggtcccctcactctccccaaatacaaactgcattaaaagaacccccgagctgcccctgggcccagggacttctgctaggcttggttccctttctcctctcgaaactcttctatcatcgaggagacaatctggcttctggcttttccctctctttttcttggcctctttctctttcttcccccgccccttctccccatgtcacagccagtcccgacgcatcccgcccccgctctgtcgctttaagctggtcccgccgccgcgccccgccctcacccctccgcgctccgcggctccccgccgcttctcccgctcctcccttgctcggccctctcctcctcctcccgctcctcctcccgctcctccgcgccgccgccagccccgctgcgcgctctgctcttcgcagctccccggacccgcagccatggccgacatcaagacgggcatcttcgccaagaacgtccagaagcgactcaaccgcgcgcaggaaaaggtcagcggcgggcggccggggctggggccggggacgccaggcgggggcttggccggagggcaccggctgcagctgtgcggggcccgagcctcggggtgcggcgcgctgcggagcggggccggggccagggacgctgggacgccctgccctcagctcggtgactgccgcaaggcgcgacccgggcgccgcggggagcgggtcgggaggacgcagcgccggggacccgcagaccctggccccggagacgccggatatgtccagctccggagccggccccgggttgccgctctcctggccccaagccaggcaacagaagtaggaggtgcggcagcttgcccgctgcgcccggagcagagcgcatctccctgcgctcgcatctccccgggccggctcccagcgcgcccgcaggcagctcgcggggacgcggcccgcagatcggggcgggagattgcagcagccttccttcttgcgggggattttgtggctacttaagtgcagcagacacgaacgatttaacagagaagccaccaaaaatctcccaggaccaatagggtaggatcgtgatcacacagtgctgtctggtgagttctggagttcaaaacagagatctagatatacacacttttaattttggtctatatgtttgtgtcccttttgactccagtgtccttctttagaaggtcaaaaataaatatgacctgaacctaatagttcctttctgcatatttctgcacaaagaaggaccttttattgcattttaaaaaatccagattgcacaaattgggttctctgttgttttgcaagtccctcagtaaattgcgcacagtaatttattttttttccccagagacgtgcatgaatgaaacccaggtccgtagcaagcacagcccaaagcaggtggaggggagttgtaccaggcaccaggcttgcctggcttccctggtgactgctgtatatgacggccctgaggtcttcatttgtg

SEQ ID NO: 1441 - DNA, 6000 bp, Homo sapiens
tatccctgtcaccgcagcactttgggaggctcaggtgggaggatcacttgaggtcagcagttcagaatcagcctgggcaatacagcctgtacaacagagtgagaccctatttttaaaaaaaaaaaaaaaaaaactttaaaattaaaatcatgaagtacaagggggaaattgatactactggcatattatgagcagcctcctgctcatgccctgctccctgctggctgccagccccagtgtgtgaatggctcctttctgtctttgcagagtgacgattcagacgaggatgagccttgtgccatcagtggcaaatggactttccaaagggacagcaagaggtggtcccggcttgaagagtttgatgtcttttctccaaaacaagacctggtccctgggtccccagacgactcccacccgaaggacggccccagccccggaggcacgctgatggacctcagcgagcgccaggaggtgtcttccgtccgcagcctcagcagcactggcagcctccccagccacgcgccccccagcgaggatgctgccaccccccggactaactccgtcatcagcgtttgctcctccagcaacttggcaggcaatgacgactctttcggcagcctgccctctcccaaggaactgtccagcttcagcttcagcatgaaaggccacgaaaaaactgccaagtccaagacgcgcagtctgctgaaacggatggagagcctgaagctcaagagctcccatcacagcaagcacaaagcgccctcaaagctggggttgatcatcagcgggcccatcttgcaagaggggatggatgaggagaagctgaagcagctcaactgcgtggagatctccgccctcaatggcaaccgcatcaacgtccccatggtacgaaagaggagcgtttccaactccacgcagaccagcagcagcagcagccagtcggagaccagcagcgcggtcagcacgcccagccctgttacgaggacccggagcctcagtgcgtgcaacaagcgggtgggcatgtacttagagggcttcgatcctttcaatcagtcaacatttaacaacgtggtggagcagaactttaagaaccgcgagagctacccagaggacacggtgttctacatccctgaagatcacaagcctggcactttccccaaagctctcaccaatggcagtttctccccctcggggaataacggctctgtgaactggaggacgggaagcttccacggccctggccacatcagcctcaggagggaaaacagtagcgacagccccaaggaactgaagagacgcaattcttccagctccatgagcagccgcctgagcatctacgacaacgtgccgggctccatcctctactccagttcaggggacctggcggatctggagaacgaggacatcttccccgagctggacgacatcctctaccacgtgaaggggatgcagcggatagtcaatcagtggtcggagaagttttctgatgagggagattcggactcagccctggactcggtctctccctgcccgtcctctccaaaacagatacacctggatgtggacaacgaccgaaccacacccagcgacctggacagcacaggcaactccctgaatgaaccggaagagccctccgagatcccggaaagaagggattctggggttggggcttccctaaccaggtccaacaggtaagaacttttctcctgcctccgggtgtggggcactgggggtcagaaagacattgcctgtgcttgttctgtgggaagaaatgggattaagtctggcattcttagccatgtccattcctaaggaaggtgtcaaaccaggaagcaccaaaattcaaagaaatcgataggattgaatgggtatagagttccggttggggaagatgaaaaaagttctggagatggttggcagagatggtcacacaatgagaatgaacttggtgccactcaactgcacatttaaaaatggtgaaaatggtgcactttatattgtgtatattttcccataatggggattaaagcatgggatagaaatcaagtcctatcagttcctaagataagatgccagcaagcagcccattgctaatgttgcttctacctattaaaaagcctttgggccaggcacagtggctcacacttgtaatccaatactttgggaggccgaggtgggaggatcacttgaggccaagagtttgagaccaagctggacaacatagggagactctatctctacaaaaaattaaaaaatgagtcagatgtggtggcacaggcctacagtcctggctactcaggaggctgaggcaggaggatcacttgagctgaggagttcaaggctgcagtgagctgtgatggcaccactgcactccagcctgggcaacagagcaagaaaaaataaaataaataaaatcaaataaaaaggcttcacactcattttcctctcctcttctctcgcaggcaccgactgagatggcacagtttccagagctcacatcggccaagcctcaactctgtatcactacagattaactgccagtctgtggcccagatgaacctgctgcagaaatactcactcctaaagctaacggccctgctggagaaatacacaccttctaacaagcatggttttagctggtaagagtttaaatgatcagtcaactgtcgttgaaaatgatatttttggtcagttccttgaggttgtccccacagtaaaaaatgacacttctctcctttattaatatatttcatctgtcatcctatggcaatcactctctgcatttttgtttgtttgtttgtttgttttgagacagggtcttgctctgttacgtaggctggagtgcggtgcagtggtgcgatctcggctcactgcagccttgaccttctgggctctagcgattctcccacctgaggctccagagtggctggactcctgagtaggtgggactacagttgctttccaccacacccggctagcttttttttttttttttttttttttcttttttcctttttgaagagatggggtttcaccgtgttaactaggctggtctggaattcctgggctcaagagatccacctgcctcggcctcccaagttgctggaattacaggcgtgagccaccacgccagccactctctatattcttgaggccacatttgatattgttgaagccagtggagtcttaggaaattatcagcgtgggtgggttgattgagttttcagctctttgagtgacagattgccagttgatggggtgagaatgcattactcttgcatcacgtggtataggcacctccttcccaatattaagaataatccactataagtaaatgtatgcacagtatcagatcgtatttttggatggaggaaaaggaaaacaataagatttaatgagaccatctttgaaattcttgatttacagtacctggtcttataaccgtattcatgcctgtttttagaaatcattttggggcgggtgtggtggctcatgcctgtaatcccagcattttgggaatctgacataggtggatcacatgacgccaggagtttgagaccagcctggccaacatggcgaaaccccatctctactaaaaatacaaaaattagctgagtgtggtggcatgcacctgtaatcccatctactcaggaagctgaggcatgagaatcccttgaacccagaagatggaggttgcagtgagccccaagataaggctactgcactccagcctgggtgacagagtaagactctatctcaaaaaataataataataataataataataaatttggatgtgaatatttgtagcatccacctgtgctaaagaattcaggttactttttttctagcaaagactgtctaacagtgaataattattttaaggaattcactactctaacatattatagactcaaatgtagagatgaaatgcattgtacaaattgttcataattactttgaaaaatatagctccttagtatatagaatgtgaggggtaggctgtaaggctagatgggtcatggatatcacctaatctgggtacatcttaatttttctgctatcagtgccaagcagagaaatgtttctagattgacatctcagtgcatttttcagtgtcatctgggaatccttaagtcttttcagtaatctgagtgtttattatccagtcgcacactaccatatttgataaaaatggagaagccgcccatttcattagtagcactctgtagcaaacccaagttgcttgagaaagtcggcaaagcaaggaaactgttctttttgtctccagctcctcctctccttaggactcatagcagatttaacttcagcatcaaagcacctcccgttcaaaggctgttattatgtgagccttgctaaatacagaagttgtttgttctgaatgacagaaataagtattgaccggtttatcctcacatgcttcagattctcggtggggatcgtaatgtgttcttttcacattccgccgtcgggcttttctcccccgacaaagcgagtattatgcacacttatagccatgataccacacacttaactgtatggaaatacaaacttaactttgctctttcgttttacctttcctggagctataaacagtaacatgccatggctgctggtgagcattcaaaaggcaaagcagtctgtcttctctggagttcctctgtgcttagagtaatattttccctgctggctatttaaaactgcatattttagattctcatttcggagtggcccacccccatcccaccaaaccctcaagaatctgaaagtccataatacttcttgagttctggtcagtgtttccagtgactcaaaaccaactgtaaaagcctcacatggtgggatctgtggagcagggaggaatcctacacaaggttcttttcctgtttggccttgccctttcgggtcctgttcagagaggtcatttggagagctggaatttctgcttgacagcctgaaatgcatgacatgggtttcctgctgttgcatatagtgctggggtggacctggtttcaggacaccagggagcctggggtcggctcacaaaacccccattgttccttttccatcttcctttagaaacctaaagatgtaatgttctccgggtcatcagcagcagattttattttgacttcaggtcattcactgttgagctctggagttggctcccattgtgttaggctctcattgctgttttcccatcatgtgttatctgcgccttttaaccctaaatgctttcgatctcatcaagaactcagaagtgattcttacccttttttcaagacaaaagggaccttgtttttcacactctatcagatgcacctaattagggtattacatgttgttttctgcttgttccttcctataccgccattctgtaaggaaatccatcagcttccttaagactgtagaccccaattctccaggttcaaggtggaaggacgctcctaactgaggaaacggacctgtcaacccccactcttagaagatctagaacagcactgtccaggagaactgtctggatgataggaatgttctttatctgcacaggccaatacagtaggtactgagcacaaaagatgaaggagcacctgaagtgtggccagtaccactggggaactgaatttgtcattttgtttaatttaaatttaagtagccaccgtattagcacagatctggagcccacagggtttgcctgcagaattggacaagtgtagacagacaagtgagcatgtctccgccaacaccaccatctctgtgttctttaacagggccgtgcccaagttcatgaagaggatcaaggttccagactacaaggaccggagtgtgtttggggtcccactgacggtcaacgtgcagcgcacaggacaaccgttgcctcagagcatccagcaggccatgcgatacctccggaaccattgtttggatcaggtgagagcgctgcctgcgggtccacgtactcaggggagctcggattac

SEQ ID NO: 1442 - DNA, 6000 bp, Homo sapiens
cactatcattgcctgcctaagtgcctgtcagtgctttagtgttttttaacatattacagtgggaaaaatgcaagtgagtatccttggacagtatcaataataactaatatcaattattaaaatagagtaggaaccaaagccagtagtcactcaggcttctgtcatgcagtttaggagttaactacgtaatctttctttccatgctaataccacagttgaatgggaaaacatccaaatacagtggccacggatacccctgtgaacagtctccaagaaagtgatgtctggccaggtgcggtggctcacacctgtaatcccagcactttgggaggctgaggcgggcagatcagctgagatcaggagttcgagaccagtctggccaatgtggtgaaaccccattgcttctaaaaatataaaaggtagccaggcgtggtggcaggtgcctgtagtcccagctatgtgggaggctgaggcagaattgctttaaaccagaggcggaggttgtagggagctgagaacccaccactgcactccagtctgggtgacaagagtgaaactccatctcaaaaaaaaaaaaaaacaaaaccaaaaactgatgtccaagctgaagaaagagcaaaagagcatgacaggcagtgaacagcacaggtcttgttgccaaatcatgttttaaaaatctgccatggagaacaaataagtaacaacacccccatataacaaaatgataggttttcattttgatgtattgaaacattttcagaggaccctaagctgttggcactgaaacaggctacattgaacaggtaattcctgcctcttagtttagcatctcaaaccaaaatctcactgaatgcagctcagctaaaaaatcccttctaacattatctaacgttatctaacattaacttctaacgtatgacagagacagatgaaaccttgagtgatgagttgaaggttaaatgaagaggaaggacactgaggggcctggggaccctaagaggtaaagcgccactgtttgttgacactcttcatgattttttcactttccttcccccgcttgtaaaggttcctcagattcacaaagggtaatgccaaggtcttattttgttttaatcatctcttggatgatgatttaaataggatttcatgttttagttctaataatggtggctaacattaataaatggttattatgtgttaagcacttatgtacattattttattcaagcctcgtaaaaccctcatgaggtatgcactataacaaccttcttttttaaagatgaaactgaagttttgagaagctaaataacatattcaactacacagccatgaaaaaagagaatgaaatagaccaggtgtggtggctcacacctgtaatcccaacactttgggaggccaagactggcggactacttgagcccaggagttcaagagcagcctgagcaacatggcaaaaccctgtctctacaaaaaatacaaaaattagccagatgtggtggcacgcacctgtagtgccagctacttgggaggctaaggtgagaggatcgcttgagcctgggatcctcttgtcctcagtgggatgcacagacattcggctgcagtgatctgagatttcaccactgtgctgcagcctcggcaacagggcgagatgatctcaaaaacaagaatgaaatgatgtcctttgcagcaacatgaatgcagctggaggccattatgttaaccatattaacacaggaaccggaaaccaaatactccatgttctcacttataagtgggagctaaacactgagtactcatggacataaagatggcaacaagacacactgggaactactagagtggggagagagggaggaaggggagaaggagttgaaaaactgttaggtactatgattagtacctgggtgactgaaccaatcgtaccccaaacctcagcatcatgcaatgtatctgcacatgtaccccctgaatctaaaataaaagtttaaattataacataaacaaataacatattaatcataaacctagtaagtggcctgctctaaaagtcctgctttcaaccaccattctcttaagcgtagcagctttcaaaatgtagcatgtccatttctaagaagagtggaattaaagctatacaaattggggcttggcccttgtcacaggctgtgtcaatagaccaaagactgaaagaagatgagattcagggaaggtcaaacgcaaaccaatgcatcaccaaaagaaaggattttggagttattattagtattattatacaatgagcaaactacataacataatctccagagacatgtaatgaaattagaaaagatccagggacagtggcatccataatcaaggagagaggaatggggcttgaataagaagagaagttttgcctgttttactctggaaagatgaatgctaagtggaataaaaagactcctgggaacctaattaaattagaatacaactttaaccagcaaacaaaaaatattaagaacttattctgagaattggtgtatttggaggggagatatttagaatatatttttaaagtctgaatttttaataaataagataaattagtatgtttcgaaggtgcactcttattttttaagtttgaatattacactgcagcctgagcgatcttttcaaaatgcaaatccaatcacgggatgcgttcttccattaaaatggcttctcgaccgggcgcggtggctcacgcctgttatcccagcactttgggaggctgaggtaggcggatcacgaggtcaggagatcgagaccatcttggctaacacagtgaaaccctgtctctactaaaaatacaaaaaaattagctgggtgtggtggcgggcacctgtagtcccagctactcgggaggctgaggcaggagaatggcgtgaacccgagatcgtgtcactgcactccagcctgggcgacacagcgagactttgtctcaaaaaaaaaaaaaaaaaaggcttctcactgtttatcactcctaaggactttccttaacatagtcacgcaggggactgaaacttcttgcttttactttcctggcctcccgttgaatcacactcccccttgctggtgacggtgggctcttgggcagctcctccggctcccacactcatgagggcaactgcatcatcttgggccagatcagatctccatttcctgggccctcacagcaccgctttttcatacaaccctgttgcttcctcccaccaggctgtagcctttgcaccctcagcagttaccagtaggtaaaaagcctggaaacatctgttgaacggaggagtcccataccctttagagctgaattctgctttgggtaaattagggagccagtagtggaagttagcttatttatttatttatttttgtacagatggagtcttgctatattgccaaccctggtctcaagctcccgggatcaagcaatcctcccacctcggttcccaaaagcgctaggattacaggtgtgagccactgcattcacccagcatttttgttttatcaaaatttatgagggaaatgggagaagagtcttctgtatgtaaactaagatatcgctatgaaaccaataagttttaaactataattaagagactaaattctcctatttgtatttgccccatttaaaaacaaattgtgcccttccccagctccaatattacctccctgctttatgtatctccatcagacatactctatatatctcatttattttgtttgttatgcatttttcccacgagaaagtaacctccaggagggaagggatatttgtctcttttgctcacttctgtatctcccagtctacagctgtgtttggcacatagtaaatgctctttctgtatttgttgaatgaatgagtttagttcagtagtcttccttgcccagagatagcaggcaaaaacatcaattaaccccgaagtaaattttcatggaatccagttctggattttttaaaggctcttaatgcaactatatttagctgtgatcccttcacattaggcttcctaatacatcaggggtcctcaaactacaggccatcagaatcatctgagagcttgtaaaagttgcagattctcatcatcaaagattggaattatgcagtcagaccccagctaagggcagttccaggagctgcattcggactgtggcccaagggccagtttgagaaacacgggctgtgacccccagcacgtgccgagtgaaagctcaattcctctaaggcagtatttatcacctacattggctccgtacccatgcgggttttagcaataaataaccaatgtccaagggacaggtacccttcgctcgtttttacagatctggaaacactgaccatcccttcctctccgcttcccctccgttcccgcaaatttacgtggttcccgccaggataaaagacaggtaaaaagtacgcagagctaccaagaaaaagaagggacgctcaaggcacactagggtccaggccggacacctccgccaagtaaatgccttgtgacctttgcctttgcacccggggccaatagttggcgacttttcggcgcttcccgctgggaacgtggaggcccgtgggggaaacattccagccttcggcggaggaggcgcggggcggggcgggggggaggagggaaccgagggggcgggacagaggagaggcggggcctgggcggggcggggctagagggcggcctgaggctgcggccacgaggaagaggggcggggggcggagcctgggaatggggcggggccggagaacagcccgtcgctaaggcctgcgacccagacagcggggaggaggcggtgccgcccgctctggccccgcccctcggggggtgggcccagcgggagggcccggctggcggagcgcgcgggagacagttcgctccgactgcccgagcgagggcgcttcgctcccagccaggacatggccgcacctctccgcatcaggagcgccggctcacggacttctcgcccaactccctgagcgctccctcgtttcgatctttagaaaaccccgctttctttctggggccgtgacgaggggcagggagcggcgagcaaggatgcgttgaggaccgcgagggcgcgcgtctcgggtgccgccgtgggtcccgacgcggaagccgagccgcctccgcctgcctcgacttccccacagcgcttccgccgccgcctgccgtgcttgatgtgcagaaagaagccggacaccatgatcctaacacgtaagctagacttgcgtcttgccgtcgggctggccgcgggagcgggctgcggaggggacccgccgcgagaaagtgtcaccccgccttgtcaagtcggtgcctgttctgtgctctttaaacgctttctgcagagtctccggattttcttggaggtggtgtggggatagcaggactcgcagtttggggagggagtttgaattttggaggagtgactcttgattaccttttgcctggggaccgcgggccagcgcaccaggcgggctccggatcggtcgcaacccgtgaagggaagccctggttcactttcctccttgagccgggcgggggctcgcggctctggctcgaggggcgcggcgacaccgccttctaccttcctttcctctggggactgctctgcgctcgtactgatctcctgtcattcaccagcttagtccaaaatcaaagtgaactccgggagagtttactgtttgggaacattttagaccctagtggcgcttggaaatttttttttttcatcactgcctgaaagttcaccaaaaacttgttttccttttcaaccatttttgggtaagatactttaagcgctgggaattaactcagacctggccagggaagtctcggtttggtggccgcaggtacctggagagtgttggggtagtttagcaagccccgtggcttgcaaacgtgcttcttgctaggaaacacacacacacacacacacacacacacacacacacagttttggtttttttcccggaga

SEQ ID NO: 1443 - DNA, 6000 bp, Homo sapiens
tccaagaataattttgtttgtccccaggtcagagctaatcaatttgaagaaaatcatcattgtagttttttggtctatcaaacatcaatatacacctaatagtgcaagccaccttgatttgaccctttggtcaagaacatttcatagagtttatcacaaagaagattctcacccaaattcagtggatccttagggttccaaatgtagaagcagattaacaagtaaaattgccagttgccagagcaaatgcactaaagatgattatattaactaaacatttcaaaacaaaaacagtcctccatggcatataacatacacgctagatgccagttatcacaatgaacagaaaccatttagacatccttcagagttacagagtcttcattctacgaatactccttgtcatggactattggatacctacacagtggagaagatcttctgtggagttacagcattttagggagatatattatgctgggataggcactgccatgcactaagcctgccatcccgtttcaggggctggatcactcataggacttaaccaatggggttataatcattttctttctatgccaaagacccagatccaaacacggtattaactcttaataagcttttcatttcccatcattattcacattcttttgaaaggatcttccagcactttaggtagtcctaaatgttctcattggtccaaagaagtcttaaatgattttcatcagcaacagtggccataagaccaaagtggatttatgttacacaggcttggaaaagaagaggtctctaacattaaatcagagaagatggaacctagaaacactataaaattaaaaattttgtttgcagtaagataaaatgtataaatcagacaaaattacattaaatcaataatacattaccaaagcaggatgattttcttatatggaaaatattagggacttacttaaaccagaatctctagcttaggatacagactagaacctctgttctccagggatctggaagagtttacacagcttccctggtcaaacagcacctccaccaatggctgaaactaaccctttatcacagaaataagaaactgcaaacctatcaaagcataatgtcattattctcatttttctttttttttttttttttttttttgagatggagtctctctccgttgcccaggctggagtgcagtggtgcgatctcggctcactgtaaactccgcctcctgggttcatgccattctcctgcctcagcctcctgagtagctgggactataggtacctgccaccacgcccggctaattttttttttttttgtatttttagtagagacgggggtttcactgtgttagccaggatggtctcgatctcccgacctcatgatccatgcacctcggcctcccaaagtgctgggattacaggtgtgagccaccgcacccagcctattctcacttttcttgtgattcccagtgggatcttgaaaaaccaatgaactcatatttccacttgttctacctgctaagctgagacaacactaattatcacaaactattctcacctctcagagtcatagaaaactgggatagtttgaagtttgtggaaatacaacttgagaaattattgtctaagtggcagattctaagcagcaccttttctgtgtctatcatttctagtggcctacaaagaaagcaaaatgtaagaataatttaaaactggttgtgtattagaatggtctttacactatacccataaaatgtagctgagatttatccataaggggttgaaataccctcacagtgaaatttggacttaatgagttgtcagaaatgagaggccaaattgtcagctctacgttggcctatggtaaaacctataattaaagtttgccttgctcaaaaatgcttagctgcacttcccctcctgaaatactctgccaagaaaatttacatttatgccatgaggtttcctttgaaaaagacaaacaaaacataaagtcctcttaagtaggtgaagtctgtgggtcattctacctaatgcaacctgcactaggaataggcaggtgtttctaacacctactgaaatgagcttcactgaagaactgttaagtattgtcctagagaaagtgtgttgctaagaggaggagggttgttttataacactttggtgattagacctgagtgctctactgttaaacagtgtgtgttgaaccagaccttggttctcttggctcattgcctttaatttccatagtcgggatcacctcaaatctatctgcagactcaggattctgccacaccctaggtcctgttcgttattttattttggctaagattaaagagcattagctcatagcttagtatcgactgagcctagataacactaatgggtcactgtcgttactatggtcattaatttaagaccaaccaagttgattaggaagctaatgagtttttgaggcagacggctccgagtatgaatcctggatctgccacttactatgtaagcttttcgaattttttctttctaagcttcaagtttcctcatctctaaaaaagtgataataatacctatacatgatctctgatgacttgctagtctatatacaacactagacgactttatcatacattatagggacttaatgaatgcttatttccctttactgctccccttcctttctgtgtttaggtgtagaaaagcttcctaccattatagtcagtcactttgcacgactcagacaatcagctgttgatattcatgctgggagtgactgtgtgtccctaactttatcatagatctagactggaaactcaggtgagatcagtgcctaggaggagttaggaatccaggctgcattttcctttgtgttcctgtaacattggaacatgcttctaccttgaaacttatcacattattttggaatcacttttggtcgatgtgatatttcctcctcgaagacagagttgaggtcttattcatcctaaagttccgcaggcctaaaacagcatctggtgaagggcactacccatgccatgggtacttcatgccattcctctgcaaaacaggtccagatgacatgattcaacacgcttcaaggtgcccagacctctttgaaggagaaacacacacaaactctggggacattgttttagaatggaaccaggcattaggcaatcatattttctgaaaatctttaatagaggattttcatttggaattggcccgtgcaggcacggaggtctgtctacatcagcagttagcatgcattctctcctaatctgtgtccagtccaatgataaggcaaagacgtggatatctaccatgaagtacatgctcaatgggggacattcatgagctttaacagtttgggaacaatacagtttaggacatacgggttattaataagcattggtactaatgttagttataattcatgagcacaatctcactattttcataatcatcctttgtataattaagttgttaaagatatatgtgaaaataatgcgtgttgtagaaattagaagactcaggagatcagtgtgggttgaaaatgactttgtgtgtaaaaataattatggtaataattagcatttgcatggcttcttgaaatttacaaagtgtttttacaacattatctcatcttgcaaaggttatgaactggcctttagatgtcttatgccaatattaagcttccctgccaaaccttgtgcattataaggtaagatttgctagacagaaaaaaaaagaggattaataatgcatttaaaaggcaaaaaatctgccaaatttattggcgtagaaatagatttatttggcattttagaaactaaggcgcatatcttgtaaaagaagcagttggctcatattttgatttcatagtgcttggaactttttttacattttgggggatgagtttttgatgtgcaattgtaatgaggaagttcacttacttggaactagaagattcataaaatcaggggatatttgaaactttttaaggggcaaaacctagagtgacttgattaaaccactgtaagtagaagtatggttagagagaaaatgtgaggagctgatcagtattttgtttaaaactcaggtgtccatttccttattttatttattttagagacagggtcttgctctgtcccccaggctggagagcagtgggggtgaccacaggtcactgcagcctggaactcctgggctcaagcgatttttccctctcagcctcccaagcagctgggaccacaggtgcatgccaccacacccgcctaatttcttgtaggggtggggtcttgtttgttgcccaagctgttctcaagctcctggcctcaagtgatcctccagcctcagcctttccaggtgctgggaacaggcgtgagccacagtgctggcctctcaggtctccatttcttagagggaatccagattgatctgtaaagtgctccttccagccatatcttccttcccacaaccacaactaaaggttgaacttcctatctcatcaaccgcctaatctaaaaccatgagttaatgagataaaaatgagtcactaaaatgcaaacgttcttgagaatcaaccttgaaagttaaagacaaggccacctgccagccccaccctcccacctcccctgcgtgcttgcctgcggcgctgcgtttccctttgaaaacgcgaggtcacctggactgcccctgaagggaagacctgctatgtgacccaggagcagcccggcgcggacccaggtgagtcattgggttgcacaggaagcgagacgcctccggatagctgtgctgcagctcgcgcgccccgcgagggtgtcgccggcgcagggtaagtctttccagatgtggccgccgcgcgcgcttggccgcgggccaggaggccgcctgcagttggcgcttcccggggccgcagtgccagccgcaatgccggcctcctgaaggcaggcgacagcctgcggccgggagcacagcgcggggcggagtaccgaggcatggtcgcggcgcccgggctgcgctgaaggcgtctgcgagcggatgggggaccccaaggcccacgtgatggcgcgccccctgcgagcccctctccggaggtcctttagcgatcacatcagggactccacggccagagccctggatgtcatttggaaaaacactagagacagacggctggcaggtgagaggcagagggggattggagaccgggggtgaggggtattaaaaagaaaacaatttactgcgaagacgcagtgataagcttggttcatgaatgatctcatcagctggttgaagtttcattcttgtcatggcagtgtgttcggtctccctttctctagtatttaaccttgatggagtgttgagatttttgtgtgtttgttttgtgtaacgccgctctggttactggtctgattatttctagataaggaattatgagagttgtggggttttttaaccttcaaaagagaagcaaggtccttgtgactgtcaggaaatcggtagtgatgaacaactgctgcaaaagccctgagatcctcggggctgtctcgggtcagctttggagctgaagctgatcaggtgtgaggtgccctggcgtgtgtgcaggagaggggcctggcaggtctgtgtgtcagtggagtgatgggcgctgcccagtgaaagcctgctggtatttcctctggcagcctggagctactctcggttccaagacggtgtcatgtatgccagaggcaggcgtttgaaatataataaagcaaatacagtggtgcaattcaagtgctctagggctcatgtgacagccaccaaatggtagactgtgtttgcaggggtccagtgaggagatagggacttctgtccgatttttgcgttgggataaaatagcatctcactacgatatgaaaaaactctccgaattagggtagggtttcccaatagcgtttatggtgccttcttgtttgctctctaagtctgtgttcctatgccgtctacatggatgggtcaa

SEQ ID NO: 1444 - DNA, 6000 bp, Homo sapiens
gcttatatgattttgctacttttgataatttaagaccaaacttaagtgtgttcctttaatgtgtgctttcaggtaaatactatatggttaccaagttgggtgtcaaaattgtgacaaaattgatcaaaaaactaatcatgcgcatgatgcttattgaatataaactacaaattatatggtttttcttggtctggatgtgtctacaaaagtgaacttatttaaagaaaacacatgagccaggagcggcagctcacacctgtaatcccagcactttgggaggccaaggcgggtggatcacagggccaggagctcgagaccatcctggctaacacggtgaaaccccgtctctactaaaaatacaaaaaaaatagctgggcatggtggcgggtgccagtagtcccagctacttgggaggctgaggcaggagaatggcgtgaacctaggaggcggagcttgcagtgagccgagattgcgccactgcactccatcctgggcgacagagtgagactacatctggggaggggggagggatagcattaggagatatacctaatgtaaataacgagttgatgggggcagcacaccaacatggcacatgtatacatatgtaacaaacctgcatgttgtgcacatgtaccctagaacttatagtataataaaaaaagtaaataataaaaaaattcttgataatatatttttaaaaaaagaaaacacatgtaaagcttactgaaaaaataaattagaaaatctgataaattctacttttattgtttccaatacagtaacttcaataaattacaagcaaatttttagagatttttagacgaataattttcatggacaaagtgttcttaacatttattacactaactgtatgcatgtagatatttcaaaatactttcaaggtatttattctctttatatattaatttcaagttcattgctattataaacatattcattaacaaaaatggaaaacataaaagctgacttccacgcataatatcacaaatgtctaatgtgactgaattaatgatgttgctacttatttcataaaagagtaaaacactattttcaaaggatagatcttgctttacataaaatgttcttgaactgcatgagagacactgaataattctgtacagaagtccagattcaactttcctgaaaatgattgggaaatgactagataaatgatcatagctaatgtttattgtttaggtaaaagtacctaagtagaaaagagatctttaggccaggcacagtggctcacgcctctaaacccagcactttgggaggccgaggcaggcagatcacttgaggtcaggagtttaagaccaccctggccaacacgatgaaaccctgtctctactaaaaatacagaaattagccaagtgtggtggagtgcatctgtaatcccagctagtcaggagatggaggcaggagatttgcttgaacctaggaggcggaggttgccttgagccgagatcaccaccactgcactccagcctgggcaacagagccagactctgtctcaaaaacaaaaacaaaaacaaaaaaaagaaaggtgatctttaaaataccatttaatccacctcctgctattcttctttccacagagtacataattgttccaccactataacggtttcacatgtatacatttaacttggagttcaatagaagagagagaaagattctaaaaatacctgaaagagagatgtaaacattaaaaaaggcaataatttaagtggtaaaaataattctagctaatggctttatatggactagctttttgcattgtgacaattcttagttatggaagctaagacatcctcaccccggttaggtaactcacacaggtcacaaaagctgttagttttggagcagactcctatcctgatactttgttttcaagttcttaactgtccctgtccccttatttgattagctgatccagtacagagtaacagtcaaacatttaaggaagttggtatttagatttgcaagtagaaagaaggggacaaatattttgaactccttcagtgttcctgacacaatactaagtacttaggaagttttctcactatttatctttacactcatatttggtaaagcctttataagactataagatctgagatttgtttggaatcaagcaactcaacaatgaaaaataaatataagtaattaaagatttgggaagtaatcctattaatagaagaaaacataatgtattttttgtgtagaaaagggtatgtttatgagaaacttactaacaagagtttctagatatctaaaaggcatttgtgaacagagttttcttgttttcccaagccaatagaaatagaaacaaaactaaagtatatggcgcggggtacagtattcatgaataaaatgtagctaagaattagcatgatgctgatataatattgagtaaccactgtatatcagtactaaaggcagtgacagagatagagatatcaagttatattaggaaagacataatatcagttctcattcctttcttctccagtgtttttcttagggaaataaacataaatacacaaatatttctgcatataaatttcatcctgctttccaatctataagttatgtgaaattgtctctatttttaaagagaaactattagagtttaagaagtcttcccaatttaataaagaaattaagtggaagtcaaggaaggcagtttatggagaaaaaattaaagcacaaagcttggagctagaatatctgagttccagtgtggacctgggcactttgtatcatttgactgtgagaaaattgcttctcaatactttatttgtaaaataaaacatatgaatacacgcaaaattgttggaaagattaaataggcatactgtcagtagaaacactttgaatataaatataaatactttttaaagaatttatggaagaacagacttctttcttggcctatggttgaagattaaattaaagaaacctaaatgctcatgtttttagtcaataagactttgatctaaacttttaaagctgcttctgaccaaacgtttttatttgactacttctcatcttcaaactcatgcacagtataagtcattcttgccatctaacatgggtctaatatggttcatgatttgcattaactttgagagattttagctacctaataaggaaaaaaatagtagttagaaccttgtgcatctttgagttatcacctacccaatattatcaaaaagtactacaagatagcccttgtgatatacagggatggagaataacagtgaacaatgaaaactacttacaatttcagagaagaacaggatagatcttagggccaacaagtttaagatgtcttttacctctttatatgttactcattttatcacatccaactggaattattcttgcacttcctattattgaaagcttctagaaatttgcaagaagcagatagacctaataattaatctgatcatcagtccccccccaaaaaaatgcttgagtcataaatagcagcgaaatccattgattgtaaataaagtagaagggagacatgactgagccatttccaccaagcaagataattaaagtcagagatgctgtttcctgcttccctggtataaacaatgaagctgctctactggcctctccacagcctggatgtcccaaaaccacctccctcttctttccttccacattctctaaagaggattctgggtcataaaggaaggaaaattggtgtaacttttttcctgaaacgacttcagcttcctctgtgtttgtatttgtgatatcttattataagacgagctaacatctattattaattgatgcactaattaaagccatacttgcagtttccattagcttattccctaaattctccagagttgcctgtctggttttaatcaaaaccaaatggtagtccaaattcccaacctggagcagctaggaggaagtcattcaagggaggcacaagaaagcagaaaagataaacagatgatagttcacaaaatttgtgacggacgaaggatgcagataccatgagcggctttagagatgtgattcaggaacgctgccatgctagatggaagcagttgtaagtgtttaatgtcagcaagactctaatacgatcaagatggagcctgtcttctgctccagcactggatttttgtaactggaggattctgactagaggtaatgcgctgctgcatttgccataacacgaactattttaattctgtgaaggattcttgtgatcagagagatctggaagaaatcgttctattaactggatgcttgggattttacttacagatggtctcagggacagaatgaaaagctgcagcatttccaattttaagtcatgttcaaaaaaggttttgccatttagaagaattatggtattaaggctaaattcatcttgctctcttaaaagatcttttgaaatgagagcaagcacaggcattttgattaagctgtgcatatacatttaatatagtggaaaggttgtggatagagagaaaactacgttttctttctttctttctttcttttttcataagcagtgtgggatagaaaaagctctaggactttatgactctacagctaatcacctcaagagctttgacaaaactcacttgagttctgtgtaaaatcagaactcctaaaacgcccaggcggctgggctctcccctcctcccctctcttcgtacagcctttctagcatgcacactcctcagaggcaggaaatactttccaggcaatctgggcctggttgtggaggccccttttgcaaaacctcagtctgaatttagtagacagaagtcactaggaatgccttgacaggatcctgccttagctaaggctccctccagctgcagagggtgtttttgttagactcacacactgcgtgaaactgctcagaatagagccatgatctcaaccacgaaatgggaacttagattttggagaaactaacggggacggacttctttcctagcctgagtgttgagcagtgtcatgccttggcgtttcagctcctcgttgtctaggtaagacgctatggactatctttatgctttgaggcggtctttgaagaggcagaaagattgagataaatgttagcatcttgcacggagttggtgacttcctaggttttagagcaaagccataaaatcagaagtggaaaatgtttgataagtagaaaattctgagtcaattcgttttagcaaactgtcagttctaaaacaggctccatatagatttaactcttttcctccataaagtaagattttatttttatccctttttacgtttaacttatttattaattgagctgtcggatcagttttcctatttcttggcataacgtgaaacaaatacattttctcacacatcagtgtgaggtgtaaatgaattcctcccctaccttcctttgccaacagggagagtagaaagcacccgagtgacttgtgcttaataatcagtctccaaagagtattttgtgtctcatttaaaactacgaagattgaatttcttattattttacccaagccagtttcaatcatatgtcaagcttctcctgtacagcttaaaaggttcatttaaaaaaaaaaagtaaacacgtgaaatttcaggaattatttctgtcctaaatagtatttaatctgagttttggaaatttaaatgtcggaatcgaatttagtttatattaattttcctggattcactgcttgctccggtcacattttgtgtaatattttgaataactgaagtcaatctcaatgacactgacactcattataactcttttaaggcagccagaaatcactccagtcatatggaaactgtttgtgtccttacttatgtaatcgtaaaattacatttccacctgactgtagtctcttcaaggtaatcttaaatgtttaaatgtacaatatattagaaaagaagtttagtaatgaccgaaaaagtgtggacttataatgcata

SEQ ID NO: 1445 - DNA, 6000 bp, Homo sapiens
gaatttagatgaaccagggggtttgtccttaaggggctcatagcttagaacaggagacagacaagcaaagtgacaatggtaacccattgtgatcaatgtcattaaagggaaagtacaggatttaggaactaatagtggctcagggtgtggggaaggaaggcttgctagagaggattacacttgaacagaatcttgaatatgatttagagcttgggaggaaaagggaagaaaggaggcagtgggagagaggcagagatgtctatccataccagagtgtgaagaggagaaacagcatgctgcatttggggaaagtccatggagtgagggtcaggaatggagggagggtttggatgagacagatgaaattggcagaatctcatgtaggaccttgagagccctgggaaggattttgaactcttcttttctagaaaagttataggaggccatttttggatgtcaacaaggaggaataaagatagatttgtgcttgaaaaatatcatcttggctataattgtgaagcagaattgcaagcagattggagttggagagaccagcaaggggctgctgtagtcatttaagcaagaaaggatggtggctcaaaccagggtgggagttgcagggatggagggaattgggcagagtctagtgatattaaagacaaacttgcaagggtttggtgattgatgggatatgggtaaagagtagagagaagtaatatcctgaaatggaattggcaggtagggagaagagggagaagtgactgttgtttgggcctggtagttccagcttaggaatagaggcaatcgaaacaaaaaaattctgttgtagacctggcctcagcaggaaaccgtgcctgtgctctccttatctccagacttggcctgccagcacatacatatatcaccctctcacttaagatggagctaacagcaggcaaagttcatctcttagaggcccttaccctattggtttggcatgtctttattctcacagtccacagcagtaaaataataatattgcttacagagggatggcaccatggttaagtgcatgtaagtcagactgctggatttgtaaataggctcattcttaattagctatgtgagcttggacaagttactgaagccatctgtgattcagtgtccactttgataaagtaggggccatagctcttatttgacaaatttgtttaagagaaaaaaaaaagcagaattatatgtacatgagtaggcacctgataaatactgataaaacaaatgaatagttcttaccttattcttggttcattttctcttctcagtatataatactggatgcactttgtcttggggattcagagccctgctttctttaagggagaaagggaagttgaaaggtcaattaaagttttttggagaatctgtatcctgtgctgcattaggcatttttctcatgtcctctaacctcggattatcattctaaagtctttatctcatcatgttccttcctgttgcccaaaggatcaagttcaattttcaaatgttgagtaaggctttctagagtctgaatgtttgtgtcctctccaagttcatgttgaaaccaaatcctcaatgtgatggtatttggaggtggggcctttgaaaggtgattaagtcatgaggtggagtcctcatgaatgggactaatgccttcataaaagagaccccagatagccgcctttcttcttccactatataagggcacagcaagaagacaccaggaaggggccctcactagacactgaatctactgctgccttaatcttggacttcccagcctctagaactgtgagcaatacatttctgttgtttataagccacccactgtatggtattccgttacagccacctgaaaagactaagacaactttcatggccctttgtgacctatccccaacttgcttctttagccttatctcctgcctccacctgctaggtgctgactctaccctctgctttagatatgatatattttctatttatcaaaatgtcatgaccacatatggccccatgctaaaatgtgtgctgtaccttctgctgggactgtcctcagttcttactccttaattaaggctttgctcaaatattaccacctcttatagaattgatcattctatcctctgatccctggaaccttgagttttttctaatatagagcttattgcagagcatctcaattatttgttgagttcatctttcccttagtaaactgtgactcttcaagggaaaaacctgtaccttcttggccttggtagcccccaatcctaacccagaacgtggcgcagagtaagtgtttaggaaaactttactgaatgaatcagtggataagcagattcaagttaaaactgaaacaacagtaggtagatgacataccttttttcctcccaccaccttcttgctttgccttgccttcaccccagctcagcaatctgctcagaaaagagagcatcagaactgaccaaaaaaggaaggaatatcctaagaaatgatgcagctacatattgcttggcttgtgtttcctagataaggcattgattcctaggcactagaattatatactataattaaagagatttttttttaaatctatcaacaaagacctagagtttgaaaatctttcagttttctaatccaaattagggaaccagttacacagggtagcataggtcaaagggtagggctataagacctggattggctggctgaggataaataaggaagtgtagacttagtccaattgcagcccaaacttgacgtgtaacatttatacttagaaaatgtgtcattctcacgtcctttatacagatttgtccatcagtacattggattttcttaaacaactaccatttgattcccctattataattattgaagtgaattcactctgataaaatacagtccttagtagttcgctttaatgctctctaaaatattcttggaaaaatatgaacgtttttaagttgacaagtgcttttattataaaagtttaaatagttgtgagggatataatgtaaagtatattgaatatatagtcatttaaaataaaactaactattataaatagatttaatggattgaaattccactttaatttgataccaccattcatccatttaaaaatatacaagtagaatcttccctaacagttgaaaacttacatagttcttttgttttccttaaatgtttatttccatttcatttgctctatagaaatgtttcctaatgtagtatatttttttatactggaaattctttcactgatcatgttgttatattattctgaaacaaaacatgtatataaattcatattaaaatttctttaatgttctgtaaatataagatgctaacaaaacccaatttcttctggattaaattatcataacaattattagatgtatacaactgatcaatctaccatacacttattaaaattttgctaaatgtgatgtgaaacataaggttttattagaaatgcttctctgaatgaggtgaactttttaaaaaattaggccatatgtctgctgaggaatattcattattgctaacgtgagatggtatttcataaattttatttacttttcattttttggttgtaagcactgagaaacctattcacaaaaataagtagatgggaaaagaaaaacttttcttatagcagtgttataacttcttaccaggttgtatgccaaaaatcacataaagatcaatcatcaaataggatttttaatactttctcaggtgacattttaattaggttccccttcagttttgttgtaactaaagcattgaaagtcatctgacttgcagaatgatttgctgcaaggtcattagtcattcactttctcaacactttttctcgaaagaattttgagttgtacctttgtttggtcccccagaaatttttataccccaaagcaactcgagatgagtgagaggtatgaattccatttgtaaagtgagagaaaagcatttacgaaaaagggactctcttcagattcctgagaaagagtgcaaatgaaagctgagaatctgaaaatttccttatctctgccaactagagcccatggaaaatctttgagtaactctgggggtactatgcatcacagtctgaaaattattatatgggatgtactttctatacttaaattaaatttccccatggaggcagcattgttatacaggtgacaatgagataacaatgcaaagaaaccagaagtcaagttcatatcgacttatatagctctgtctccataagtcagaaacaggaaaaattaacttgttcttcagcaatctaggttgacttcatgaacgagctggcgttcaaatgaatccttgaattgtggaaacagaatgttaaatctggaatgaacttcagatatcatctagtatggagaggacaattaaatgttgacttttacatcaatttggattaaatatttgtgattgcttacaattctgtgtcaagaagtagtcagaggaatcatctgagatctgtaggaaagcatgttgtgattgattagctatgcctgtcagaggaagcagggagagaggggcacaggtgatctgctcttgcccccctaggtacatagtccttatcacatgaaccacagggaaaactgaggctgactgagagcaggaagcttgaccaaaactccacagtgaattattgccaggatgggtagaattacatatgttttattcaacatttggtggtcattgtaaatttggtaacatttgcaactggaaaatttggggatgttttagagctggaagggagcaaattcttaattgagcaatacacgctgtcctttctttcaggctccttcacatttgatctctgtgcaatttgataagaggagggaatgggccgtcaattatgaagagactgaaaacctgaaaatactgagtatggtcttagttccctctccaaagggagctcaggaaaaatgccaagccatacaagccactgattactcatctagctattgtttctacctcaccctggcccaggaagacagatctactgaggaaaggtaatagaggctggcaaggttcctacttttacatctatctgtaatatccactcattcttagcatcttgcacatccacagggccgtacaggagtcttcttgccttgtattattgaatcttgggataggggtaggaacagacagaggtattagcagagatccaacaggatgtaaaacatacatgttgatgcaggggttaactttatgtataataaatagatttttaccatgcataccaaactgaatattccttcctcctttttctctcagacctctttctatgtgtggctcattcttttactctacaacataatgttcagttgattctggactttttctgtgacaaacaatgctgtaataaacatcctccttgtgcattcatctgggtgcacttctgagaatttatctgaaggataaattcctagaagtagactgtctgtaacatagggtctatgcactttcaatttccatagattctgccaaatggttttcttaagaggttataccaatttacactctcagctatggtatatggtaacccctgctttcccacaacctgccaacactgggtatttacaaacataaataaatggagggtttgaataattgtagttttgaattagacttggggcgtccctctcatctgccccaacttgtgtctccccaaagcaacctaactaggggatggctaatgccatagactctgaggcttactcagagcagaggctgaatgctcctgcttcagtgggaacagggggtgtttcttcagtctgtgccctacttggcatctgtccctgacagacccagccagtgtggggagccagcctctctaaccataagaaagaatggattggaaacaaattgatcttttcacagctggctgttcccctctttcccctcaacttggactcagctcagaacaaggttgccgatgttctgctgcaacaaaga

SEQ ID NO: 1446 - DNA, 6000 bp, Homo sapiens
agagggaaaataattacatttgtctcttttcaaatatgtacaggaagtgtagcccagtaaaggaatcacttgagtgtcatttttgtttgttaaatttaaattttattattccatcttttcaactatgattcataggttactaaaaatatctaaagtgaattaaattttggacattaggatctaaaattttcacaataccagatttatcctggaatgaaattaaatacagctgttattttagtggagggatgacagagttcttgtaatcttcctattcttatttcaattttctaatttagtgtagatcttcttatatttctttctttgtgtcttttctctcaagaggcttacagtaagcctccatattaggaggcaagaaaatgaaattgggtggatggttcattgtcacctctggtaatgatgacaagactgtccatgacaaccatccctgaaagtattctcctcttccatggagttggccaaacttacctgaccagtatgtgaaaaatttggttgaaaagtttggtcaattttggaggctcagttctgtccttaaaaacgtgtcaggactactaagatccatgttgccagaatctgacaagaacctcttttccaacctgatcacctctttttacctctatccaccttacacttagcttcccaacctgtgtctgaattccctggattcttctcttttgtacaagaagcctatgccccagagagcttatctatgcttttctctgattttcttctttagtgaaactccacactgttccaaggaataaatgagataatgcatgtaaatgtcttagcacaggccaagtgctcagtacccagaagaataaaagtattaataactgctgcaagccctatgatggattttaggaaaatatgagtctaccttaaaccatttatcactccacctaagaacatgtattactgtaaatctctattaactgggtttctaattggcaatctattttcttaacgcctccactcctggctcctccattctcagtgggtcactgtgttgcagaagacagttcgtcttttcccagcaagaaggtccatcacgatgtctgagttcgaatccaggttttgctacttaccagctgtgtgaccttggacaatttacctccatgggtcttagtttacacctctgtagagtggggataataatagtgcttgcctcataaggtaggggaaggattaatcgggttaaaatgtgcaaagtatttgcaaactatctggcccaagcgatgatcatatgaagatatatcactactatcatgaatctccctgcatttagtccatgactaacatgaagctccccaagaaaggaaaaacacacacatataaatggctttcttagaaaggaaactaatctacagagctgcacatctacccacaaggaggaccaatcgtatgctattatgcagagaatagtttatcttcacattatcttgaaataaaatataacagaatcttggaattttgtttttctctgagaaacaaagtttcattaaagttttggactttgctcccccacacaaaggcacaacaagccctgaaagatccatttgagtacccactcctacagaagctagaaaagtaatttgtttatcattaaaattaaaaatatcttgccaaaactactggaggacagtttcagctaggttctctgatgacatattaagtgcacgtgagattgtgtaaattttcagtagcaagctctcaaatcatatttgtaatggtaataataacttgcattactgttacataaatgttaaggattagaatatattacttttttttagacagagtctcactctgtcactcaggctgtagtgtagtggcattatcttggctcactgcaacctccaccacctgggttcaaatgactctcatgcctcagcctttcaagcagctgggactacaggtgcgtgccaccatgcttggctaattttttttaatttttatttttagtagagatgggattttaccatgttggccaggctagtctcaaactcttggcttcaagtgatcctcctgcctcagcctcccaaagtgctggaattacaggcatgagccaccacgcccggcctattactcttatgagttgaatttttgtgttgcctaaaattcatctgcaaaatgctaattccctgtgtaatggtgtttggaggtgaggcctttgggaggcaattaggattagattatgttatgaggacagggccttcctgatggaattaatgccctcctaaaaacagggagtcatgagatccatctctgccttccatgtgaggatacaagaagacagctgtttgcaaactaggaagagatccctcactggacaccagatctgctggcaccttgatgtactttccagcctccaatactgtgagaaataaatgtttgttgtttaagccacccagtctatggtattctgttatatcagctcaaactaagataattacattaagcctaatacaataactatatattttatactaatataactaccttcatcacttttatttgatagtgaaggaaagtcttctatgaaattttcacctggggatctcatttgcacttaaatgattccataattaagttataagagcagccttgccagctttctaaaaatctgcatttaaatttcacaggctgcttttacaacaggatggataatgtactttgctcctgtctcatctcaagtctctctctctcctctctgtccctttctttctgtctaacatccatctgtgctttgaaacctcctgaataggatgtgacagtatctggaaaagtgtgaggtctgtctgcattaagttgttggcacatttcaattttaggaaagtcataaagcccttataaactttcataataaaattatcaaacaaccgccgggcgcggtgggattacgcctgtaatcccagctctttgggaggccgagacaggtggatcatgaggtcaggagatcgagaccatcctggctaacacggtgaaacccgatctctactaaaaatacaaaaaaaaaatagccgggcgtggtggcgggcgcctgtagtcccagctactcaggagactgaggcaggagaatggcgtgaacccaggaggtggagcttgcagtgagccgagatggcgccgctgcactccagcctgggcgacagagcaagactccacatattaaaaaaaaaaaaaaaatcatacaaccaatctctacgtattttaagtcacattatttcaaggaaagaaaaattactttgtgagtatgtacactaaagaatctaattttatttttgtgacaaaattagtgtgagatggttgtgatactctgaggctagcagaaatggagactctctactgtgagaatcacattaagtttgtatttaaagcacaattattaaaccttctgaattatctgcagttaaaattatttacattatacaatgtatatgactatcaaccatatgagaataacatgtggaatctgcatgaatttatataatagaaatgtaatgatttatgatcattttgctccattagaagatataagaagaaaaaaaatcaatagatctcattcattcatcagctcacagtgattaaggatactattgcataacagatcaggtgctaagtgctgggacacaaagataaattagacgtgttcctctacattgtaaaggaccctaaagttcatctaatagtcagtgatggaacagactcagagagtggtctatttgctcaagatcccagaactagttcatagcagaactaggtaaaaattcaagtctcttgactcttaactttagcctgatattgaggccaaatgacagctttaattacgacagagaagtattaagaatgtcattttggaaaattcaaagtccactagaggaaaactcatttcagttagaggctgtttcttgcaatctatttctaattcttggtcttaggcctcccatgtgtactgacagctggtaatatatttgggtctttgaagaaagcaacaggacctgtttctttctacgcactaactgtggctaagcaacaagacctactctctactggcaacagaattggaacccttaacttcctgtcagccacagcccacactggatttccctagaattttctagaagcaaatggctaccacaggaagaaaaccatagaattcagctggaaaccatccaaatttcctcatcctaagcttcatctccagcaagcctcagtcaaggagacccacaccacaaggctatgacataattcttggttgcctgccaaaatagagaaaaaaggatgaaaaggaagagtttttattgcaaaaagacagcttagggaattttttcttaacttagtgagatggaatcctgagacaaagatttgttagagataacttgtgtaggggtattaaactcaacagagataaagggagatgggtgagtaataagaaaaataaattaacccttggtgttttcttcaggcaatgctgaaaacacacacacacacacacacacacacacacacacacacacacacacacaaaaaaaaaaaaaaaaaaaaaaaaaaaaaaaaaaaaccttatgcccaccacatcatcatttgtatcttaagtaaatgcttggggaaaggggttgagccaggaaggaagaacaggtgttgtacatcgaaccaagcctaaatatttggtatggaacagttgaagatttaagattgtaactccagaacttctgatcactttttttgtattgttaagggtagcaactgagattagataactcacttgctgaaggaagcacattcttggctctgtgcgacattcactgtgccatgagctgctagtgcttactgatacccatgtgctctttggcatttcccagtctcccttgcacttgagctgaccatgtgactatttctgaccaatggactgagagtagaagtaatgtggtcacttctgagggaggtagttaagtatcaagtgtgactcccctcaactcttcgactccttcctgcacccctgcagctggaagaggaggcttggagatggtagaaacataagatggaaggggtctagatggctggatgactgcttgaggagagttattcaagactgctacttagctgatgtcagactctgagtaagtaagaaacttttgtaagatacataaaagtttaactgtaggaagaaaagtcatttttatccatgaaaataaaagatgcctaagatgtatgttttcaaattatattgggatttatatatttcactttatataaactcaaaatcatcaacatatgcctttgttcacttgcttctctgaacttagaaagtctgtaaataaatgtaatgtcaaaagctgaaaacacccaaagctactgtgatttgtggattgttacaacagttaacgagaaatatacatacactaaatgtgttctcctcattttcttgtgtgtactgctccaatctttttcagatgtaactgcttccccaggttaaggggagagtaactctgctccctgttctgggataaaatcctctttggtctcttggccattccctttgccagtgactggtttaggagtagagatgggactcaatagttacactttctgggggcctctgaaaaagattttcttgttcttacagaaaagtcacagattgaaattgctcatttctgaatagaaatggagatttggagggagaggtaatgcggcaaaaaactctaaagtggttgcttaataaagtgaggtaattttcattgtctagtcaaaatgccaacataccaaatatggttgattggggccctgaaactgaggacgagaagcaaggggaaagagaaggtcccaagaacactgtggtaagcagggattgacagagaaatatctccctaaggagggcaatggcccctgacctattagaataataatacctgccccctaattttaaattgtttcatgtgtcataatgtccttttgttattgcagatccttgtgcataca

SEQ ID NO: 1447 - DNA, 6000 bp, Homo sapiens
ttagggtatctggaaaagccaacgttcccctctcctggtccacccctgacagggactcaaagtcctgccatctgcaaggctgaggagggtaatggaaacagtgaaatggaaatttctggcacacaccattccacttgtttaaagacggtccgaggtgcccttccgaaatcaaagaaccaatttcgctaaaaacatcccacagggatgagggcacagatgtctcaaatacacattctctcaaacactaaggacttttacaatcaccagtgggttttttttcctttttgtggagaacagagtcttgctatgttgctcagactggtctcgaactcctgggctgaagtgatcctcccatctctacatccctaaatgccgggattacaggcgtgagccagcacgcctggctactagcactatttctttttcctttctttctttttttgagacaaagcctcactctgttgcccaggctggagggcagtggcacaatcatggctcactgcagcctcaacctcccaggctcaaacgatcttcctacctcagcctcccgagtagctaggactctaagtgtaagcaaccacagccagctaattcttgtatcttttttgtagagacagggtttcaccatgttgcccaggctggtctcaaactcctgggctcaagcgatttgcctgcctgagcctcccaaagtcctgggattccaggtgtgagccaccatgcccagccccagcgctatttcttatgagatctcgctgtcactttgtgttggcctaaagctccaattacatggtgctctccctcatggctacagggcttctgcaaacctttccggtcttccctatgtccaagcccacctcaaacgccagcggctgggatccacacctgttagccggggctgcagaaccacatcagccagtaaggcaaccaccgtgtccaagcctttgctatcagcagacacagcatacatggtggtgtctctggaagaaaacacaagcccataatgccaggccctgaactcacactctgcttaacagccaggggacgctcgggctttgcgtgccaggtggacaatgccaggccctgagctcacactctgctcaacagccaggggacacttgggctttgcatgccaggggcacctaccttttgttggggcccagcagacatttcagggacgcttgggctttgcgtgccaggggacacctcctacccttcatcggggaacagcagacacttttcccctttctcttttcctgtcttacagtgtgaatgcttggtaggcaggactcacagctacacacagcttgagtcaaaatggagccacttctgatacagatttttgtaactatactctctctcaaaaggtgaagtgtttcatcccagcctcctgttgactgaacgaacccactggtgagtgtggaaacatgcccggccttggctggcttgggggacagcaatggctggctcgtatggagcttgtctcactgtaacatctgttcccggcatgaggcactgcacagtcagaagtgcacagagctggcccatgggacaggcacgaaatcatggggtgctctgagatcaagtgtgatcaagggagaccatgcagagcagacgcaacagccacgaagaagagggagcttgggaggcaggacgcagtcaccagtgcctctgaagaggggacttggctggaccttcaccctgaagaggagccattctcagtgactttggctctccacatggggagaatggcaagaacaaaagcctgagctgagggcgaggggggctgggtctgagtcaggacaccagccacctggccagagaaaggagttcatctgggatgagtgagattcgaggcaagagtcggagaatcaaacacaccaggcaggaacctggcaggggcagctgggagtcagggggtattaagaggccttgttttagaacatgaatatgttacctccaagctaactttaattcttagcatttaatgtgtcttttatgtgtaatttttttagcattcaaacttaaatcaacaattttaaaaatctgtgatctatattcacccatctcacattgcccagtgctttctgaacaagctccacacctggcatgcaaagaccactgcactgtgctcgaggcaacactgccccctccctccaccaagcagccggcacctccctggctcggtgccttttgcccctgctgtctcctggtctggaatgccttgtgccccgtgtgtctagcaaactccttctggaaccagcccaaccctgcatttcctatgattcctttcccaactccagaccaagtcagccactcatcctcctggctcctaccgcctttggctacggggtccattacgtatgcaaggccctctgctctatctgggaacagggcctgctctacatccctggcatgcagccaacagcctggaggaactgacgggggtcaactgagctcctgggggctgtgcttctctgtgtaagcgccatccacccaagtctccatccaggacagggctccttctccccgtgaatctccacacctcccgctgggaggggctcagagggaatctgagcaacgacaagaacgtcagttcccaaggacccaaagtcagtttgtacacaaaagctggtgtaccttgatgtctggcagtcacagatacccccatgcttttccaacgtaagcagaatttcatctttgctgtcaaatcgagcagtagactagtaaaaataaataaggaaacctaaataagcaatccaggctatccctgaaacacaatttttttttaaaatctacttttgcttttaacacacatacaaaaattatcttttaacttaaaagtcttttattaacattaacttagcaacttgataatttattaaaataaccattatagacaagaaaaatctcaaacatccttcaaaagtatagtctaaaaaattacaaaactgggtactgaccgaaaatgccaatttttccaaaaagtgagcaattccactaaggtatttcgcttcatatctcgatcctgaattgataagaactagtagtaaaaagaaaattgacaggttacatcagatattcaaaataagatttaatcaagagaaacattttaagatgtcaatatgacatgataatcagatttaattacatgagggtgattgtgctgatggtttcacaggtatatgtgtagctcaacatttatgaaatcgtacactttgtttccactcagggtacaattcataattggcatgctaattacaactaacagtcaactaaagcatgtgcatgttaaaactgcgggaccacccacgacaacacaacagtacttacttcctactgtacaaaactgtccaaacttattctgagatgccacgcgaagcccattatccaatgtggttactttggtttcaaacttttcctgtccatcaactgtagcaaaaacaggcttgggtactccaggtaagggagaagagagggggatgttgggataggcaccaccactactaaaccgtctgtacgcaggaggtccaaacctaaaacagagaaagcggcccagttacaacaggcttgagacaacaaacctgtgatgacctgttaggtgcggttagttatgttttgtctgggttaaaagtgagcatctgcctttctacaggacttatttctacagactttggaagacaaagcagaggctgacaacaaaggctcagccacgggacctggagcaagctggttccgtcctttgggtcttagttgctatctctgtaaaaacagggcttattaacagtaactcactctaagtgcagtttgtacacataaagcacttaacagctctgccctccaacagcaccaccgaagtcttggataaaagccatatcccttattaacctggtccgaaggcggggtgtgacttggcctctgtctccctctccaaactcatctcttgaacccccacactcccataggtcctggtcacactgattcttgtcaattcctggaacacatttgactcatcaaccccaaagcttcttcaccgttccagggcttgccctttgcccatgcctaccccttctttcattcttcagctcttcccttaaatgtcaccctgatggaggactatccctcaccagtctagtctttcctgctattttctatcatgaaaggctgcttgtttactccaaagcatttacgcgactgccgatattttgtttacgctccagcctgtatccatctcctggaggcagcacctccgcacccctgaaacggcgctcgttgtgtggggaggggcgacgcctgtgctgtcggaacaaagttccagcgtggggaaaggcaggcccggtcacttgggtgggaggagcggtgggtacggaaagggttcttaaacgtcagagatcaacggacagaccgcagcaaccgagagcctggaccctggtgtcagaaccctgcgggtctaacagagctgggcccccaccggctcagcctcctgaaggagcacgcggtaggtgaagcgcgggggcaaatatgaggcatggcctcggagaaggcccgtcgacccgggaagtgagggggggagaggacccagcagccggggagaggagagacagatgggactgcgtccccgggctcgaggcgcaaagcaaggcagggcccccgtcgcctcggggacaccagtgtcccgaagtgcgagcccgtcccacgggcgccatgtcacctgtagaaaccgaagacggagcgtccagaaagactcgagccgcccccgccccaggccgaagcctggttcgcctttggctcacctcagccgcgaacagccccaagaacccgagccccgcagcaaccgcgtcgccgccagcaccacagccgccatcttgcgtctccgccccgcttcagtcgtcacttccgcttccgcccacggcttcccctccccctcgccgacggcccaaggcgttcaggcacgcgctttcggtgctcggagcggaagcagcggcgagaggctcggaggcgcgggggcggccgagcggcgggcgacgggggcgggcgacgggggcgggcgacgcgggccgcggcacgggcggagccggggccatggagccgccgctgccgggctaggcaggtcgtgccccgccgggccggcggcgatgtcgggctaccagcgccgcccgggcgccaccccgctgtcccgagcccggagcctcgccattcccgacggtgagcggggcaggggccgagtccagcggtccaggtgggcggcggccgccccggcacgcagtaaagtcgctgttgtcgttgcttccagctccagcgttctatgagcgccggtcttgtctcccccagctaaattgtgagcgcccccatggcagggacctggactcccccttcttcggcattcggccggcctttatgtgctatgtgcccagcccggtgctggcttccgtgggagacacaggtgagagacgagggcgccggccccggggacgcttccagttcccgcgccacgtgtggcacctccgctgcagcacgagctcgtccattgacccatcaatgtgcagagcgctcactgcgtgccaggcactcggaattcaaaggcggagtcccctgctaggagctcacagtctggttgcggggagacctcccccaagacagacagttccagtacaggatggttagtgcccggggagcacaggagcccgcccgctttcctcgtggggctggagtcggggtgccttcacctagtgggcagtgattggaaaccgagctggagcattccatctgcctccacagccgggcagtggccagatctggttcgtcctcgttctacccaagcagaagtgctgctgggtgcccggggtgtgcaggagtgtttgtgtggttatgccaggatctgaggacattcgggggttgtcacaagacaagaggacgcgcttgccccggctgggcttcaaaatctgctgaggagccgctttcagaccacggacaccagggccagtctgcaagtcaggccatctc

SEQ ID NO: 1448 - DNA, 6000 bp, Homo sapiens
gaggtcaaggctgcagtgagccgtgattgcgccactgcacccgagcctgggtgacacggcaagactgtctcaaaataaacttttaggcagaacacagaaatgtgtttgatgctgaacatttatatacaataaaacccagatctggtttgactctgattacttcattatcatttaaaaacggatttccctgtgtattagatgttgtggattgcattcctaactaaaagcttacatacatttctgtttgagcttcagagaagctctgaacctcattcagctttcttctcagcttagaattttcatctttcagctgtggagagagaacatccttattagaaagtcagcatgtctggctcaaaagggcgtgtgcttctgcggtgtggctccagagcctcctgataagcagagatgctgggtcagtgcagcatccacctgcagccactacagagggagaccacagacggaggcaggcacttttcaaagacctgtggtcacagatgccagttaattttactcagaggccgggggcagtggctcgcgcctgtaatcccagcactttgggaggccgaggtgggcggatcacaaggtcaggagtttgagaccagcctggccaacacggtgaaacccccgtctctactaaaaatacaaaaattagccagcagtggtggcgggcacctgtagtcctaactactcgggtggctgaagcaggagaatcacttgaactcgggaggcggaggttgcagtgagccgagatcgtgccactccactccagcatgagcaacagagtgagacactgtctcaggaagaaaataatttttcttttttttgaaacagagtttcgcccgtcgcctaggctggagtacagtggcgtgacctcggctcaccgcaacctccgcctcccgggttcaagcgattctcctgcctcagcctcccaagtagctgggactacaggcgcctgccgccacgcccagctaatttttgtattttcagtagagacagggtttcaccatgttggccaggctggtctcaaactgctgacctcaggtgatccacccacctcggcctcccaaagtgctgagattacaggcgtgagccacggcgcccagctaaaaaatttttttttttattcagagcttataaccttttaggtgattataattttttaaaaattttcctcctcttggaatacttagcaagctggcgactgcagcctgcctttactgagggtacagccctgtaagtgcccaactgcatccaattcacagcttctagctcaccagtcctctttagccggttctattcccacgtgtaaccagaagcaaagtcaaagggaaagtggatagcaggctgtcacgcaaatcgccttgtcctggaaatcaaaccaggccacccaagaggtaggatggctccaggttctccccgggagaagccgctcggacaggcgctgtgccagagggcgccgtgaggctcacttactgcgtcgtaacttatctgcagcgtccgcaggtgcctgtctcccagagactctccatgaaccgcaaagtctgcgctaggactccctgccggagaggccggagacacgcgagaatcagtgtcactcaacgcccacgagggcagagactcaggccctgccagctccgacggggtggagaaaaaggaaaggtatgtgctgcagggcgacgtgccggcagggaccctctcggggtgagtctgctcgatggcggacggcaggtaggccccactccatccggtgtcctcatcctcctcctcatccaggaggtcaccagcccctgtcggatcctcgaaaaatggctgctgatactccaggccatacccgccggtttgggagggtggggagttgtggtcaagtcccagggaatgcctcgaggcttcctaaaaaaaaaaaaaaaaaaaaaacaatggaggccatgcttctgactcggagcgcatcttcctttctgtgttctgcctcgcaacaagaagaaaggcccaatctctctaccggaaggagcccagcagcttctgagcccagagctgctccccagcactgacgcctgcctgctctgccacactcatgcacgattcctccaaaggaggctgcagaggccggaacagaaacgtcccacagagccatcgcccacagtgccgtggatttacctttgcataaattctgctggccggatcctctttcgagaggccgaggttcttggtcttcagaaactctctaaaagagaatggatttgcctcttccagatcttcaaatctgtcatctgaaataacagacatcacaaatgcataaagtctactgaagagcgttgaaagggaaccttcctgttcacctgtctttccagagcatggccacatgtgagatcgggcagccacgcttgtcattctaccatgactcaggcagcactaggaagtgtgaaggtggctgaaggtgggcagtgacacagacgtgcgtctgcatttgcaatcttctccttccacccctcggcccctgctcccacactgtgctgctcactaaagctcccctggggagctttaaaacgacccaagccactccactgcacacacccagctccctggtgtgaggtcaacctgtgctaggagctctcaaagctcctcaggtggccaggtgtggtggctcacgcctgtaccccagcactgtgggaggtcaaggcgggcggatcacgaggtcaggagactgagaccatcctggctaacacggtgaaacctcatctctactaaaaatacaaaaaattagccaggcgtggtggtgagcgcctgtagtcccagctactcgggaggctgaggcaggagaatggcgtgaacctgggaggtggagcttgcagtgagccgagatcgtgccactgtactccagcctgggcgacagagcgagactctgtctcaaaaaacaacaacaacaaccagctcctcaggtgctgcaacgctggggacccagtgccccctgaccctcttcccgactttcctacctaggtagcctaaataacgcccacttttcccttctccctcttgccaccgccttcccaccctccggggacttaagcagccacactcgaccctcccagctgtgagccccatgtaaagctggctcctgtggccccagccccccaggtggggcttccccgctccctgatgtcacctcgctgctactctaggatcaagactgaacccttgaaatcccacccccacctgctcttttgggctccagctacaccacatagccagtcacattgacagtcccaccagacacgtgcctggcactgtgttggatggagacaagaagaaaaggttgctgaactactctacctccaaaatgtgtcccgtgggctcctgacgggctctgcttagaacatttcccctttccatagccaaaatctgcaaagaaacaatgtcacccaccatgctggcaggaagtctttatgacctcacatttggtttttttcttttgcacatggagtctccactgcagtggttctcacagtctagagaactttttttttttttttgagacggagtcttgctctgtcgcccaagctggagtgcagtggtgcgatctcggctccctgcaagctccgcctcctgggttcacgccattctcctgcctcatcctcccgagtagctgggactacaggcacctgccaccacgcccggctaatttttttgtattttttgtagagacgggttttcaccctgttagccaggatggtctcaatctcctgacctcatgatccgcctgcctcggcctcccaaagtgctgggattacaggcgtaagccactgcgcccggtcagccgagaaaactttaaaaaaaacacaagctcccagacttgtgaccctggagatggcctgacttgcagactggccctggtgtccgtggtctgaaagcggctcctcagcagattttgaagcccagccggggcaagcgcgtcctcttgtcttgtgacaacccccgaatgtcctcagatcctggcataaccacacaaacactcctgcacaccccgggcacccagcagcacttctgcttgggtagaacgaggacgaaccagatctggccactgcccggctgtggaggcagatggaatgctccagctcggtttccaatcactgcccactaggtgaaggcaccccgactccagccccacgaggaaagcgggcgggctcctgtgctccccgggcactaaccatcctgtactggaactgtctgtcttgggggaggtctccccgcaaccagactgtgagctcctagcaggggactccgcctttgaattccgagtgcctggcacgcagtgagcgctctgcacattgatgggtcaatggacgagctcgtgctgcagcggaggtgccacacgtggcgcgggaactggaagcgtccccggggccggcgccctcgtctctcacctgtgtctcccacggaagccagcaccgggctgggcacatagcacataaaggccggccgaatgccgaagaagggggagtccaggtccctgccatgggggcgctcacaatttagctgggggagacaagaccggcgctcatagaacgctggagctggaagcaacgacaacagcgactttactgcgtgccggggcggccgccgcccacctggaccgctggactcggcccctgccccgctcaccgtcgggaatggcgaggctccgggctcgggacagcggggtggcgcccgggcggcgctggtagcccgacatcgccgccggcccggcggggcacgacctgcctagcccggcagcggcggctccatggccccggctccgcccgtgccgcggcccgcgtcgcccgcccccgtcgcccgcccccgtcgcccgccgctcggccgcccccgcgcctccgagcctctcgccgctgcttccgctccgagcaccgaaagcgcgtgcctgaacgccttgggccgtcggcgagggggaggggaagccgtgggcggaagcggaagtgacgactgaagcggggcggagacgcaagatggcggctgtggtgctggcggcgacgcggttgctgcggggctcgggttcttggggctgttcgcggctgaggtgagccaaaggcgaaccaggcttcggcctggggcgggggcggctcgagtctttctggacgctccgtcttcggtttctacaggtgacatggcgcccgtgggacgggctcgcacttcgggacactggtgtccccgaggcgacgggggccctgccttgctttgcgcctcgagcccggggacgcagtcccatctgtctctcctctccccggctgctgggtcctctccccccctcacttcccgggtcgacgggccttctccgaggccatgcctcatatttgcccccgcgcttcacctaccgcgtgctccttcaggaggctgagccggtgggggcccagctctgttagacccgcagggttctgacaccagggtccaggctctcggttgctgcggtctgtccgttgatctctgacgtttaagaaccctttccgtacccaccgctcctcccacccaagtgaccgggcctgcctttccccacgctggaactttgttccgacagcacaggcgtcgcccctccccacacaacgagcgccgtttcaggggtgcggaggtgctgcctccaggagatggatacaggctggagcgtaaacaaaatatcggcagtcgcgtaaatgctttggagtaaacaagcagcctttcatgatagaaaatagcaggaaagactagactggtgagggatagtcctccatcagggtgacatttaagggaagagctgaagaatgaaagaaggggtaggcatgggcaaagggcaagccctggaacggtgaagaagctttggggttgatgagtcaaatgtgttccaggaattgacaagaatcagtgtgaccaggacctatgggagtgtgggggttcaagagatgagtttggagagggagacagaggccaagtcacaccccgccttcggaccaggttaataagggatatggcttttat

SEQ ID NO: 1449 - DNA, 6000 bp, Homo sapiens
gcgttgggtgtgtggtacggctccctgggtgatgtggttccgctctggagacaccaccgtgggtgcctgtgtcagccgtcggagaccgttttccttgggcaccttgtcttcgctagcagggtttcactaacttgtcaatgtgtcacggtactgcacaacattgataaaacaagcatctattatgcaactcgcttcgtgttccttatttagtggtaagaaaggcaagatgtaggaacttcctgttcaccttatgaacaccatcttgacatgccagactactagattgttaaacgtttcactcagttagaaggtccctgattttgtgtgggaattatttctcacataatgtcttgtaagtgtgtcgctaatgtgtctggattagttgctacctcctgcgcagtcagcataatgtcatcagtgcaaagaatggtgttacatctggtttaagagaaaggtggtcatggtccctaaggactcgtttaggatataaaccttgagagttgatataaggttgaaagaggagatgatagtacattgctgtcctttctagctggacccaaactcttctttatgacaactactgaaagaaaacaaaacattcacctaattaatattatatatcaggttgccagggatgtcacggttgctgacgcaacaaaaccacctgcagtacagcagctgcagttggaacaacaatttgattaagtttatggtccgatctcggctcactgcaacctccacctcccaggttcaagcagttctcttgcctcagcctcctgtgtagctgggactataggcatgcactgttacacctggctaattgtttgcatttcttagcagagacagggtttcaccatgttggccaggctagtctcaaactcctgacctcgagtgatctgcccacctcagactcccaaagtgctgggattacaagcgtgagccaccgcgccaggccccggctattttttgtatttttggtagagatgtggttttgccatgttggccagccttgcctggaactcctgacctcaagcgatccacccacttctgcctcccaaatcctgggattacaggcgtgagccactgtgtctggcgaaaacttcacttttaagtgaaacacagaaacaaaatcagataatcagaaaatgagatactgcatgttctcattcatatgtgggagctaaacaatgggtacacatgaacataaaggtagaaaccattgactctgaggactccaaaagggaagtggaggggagggagggagcgggttggagggttgaaaaactacctattggatgctctcttcactatttgggtgatgggttcactagaagcccaaaccccagcattatgcaattatacccaagtgagaaaactgtacgtgtacccttctggtatttataattttaaaaaggttaaaaaagaaagcttcagttttaaatcttaaccagatatacatgaaaaggattactacactttgacacctttacaagtttctatgttagtttttagtattaaagcagaaacctattccttgaccactttattaattgtatatcctctttgaacaaacatccaaaatacaagactgtcacttttcgttctgtaactgtgattcttcactgcagtcttctatagattttacagagttaatggtccctaatatctgccattctccaactgtcctgggtggcgaaatggctgccatagtaaacttgtcactgataaatagagtttctggaaacatgcagggcttgttatttaagagtgactccatttgggcattctggtggatggcctacaggttttcttgcagagtatactagagtctccagaatgaataaccctaggaacttgaggaactagcgctttccagaattttggaagccaagatacaaatattggttttctcaaaagcaatgcaagtgggaaggaaaatccatatctagactaaatgtctgttgaggtaagaagaaagcacttctctttttacaatagaagtgatctattgtaatccacataccaactagtggctggcagatcattttggagtctggtgctaaattgggggcttagtgttggtctccattcctggaagattgttcactcagcaatgactgtagccaggtttgccatggtgagtggaagtccatgctactgcgcataatctccatccttgacagtttgaccactttgttgagcccataagattgtgacacaagtgttggggaaagaggctaattaatatgtagataataagtaccttatccatctgattattaaattctgctctgctgaggataccctttgctgagaactctcatgagaccccaatatcttcacattgtatgtccacttggaaaggtctgtccacatatttgtttttttttctcagacgtccttgacagaaatttttaatcatgtgtcctcaatgtccctgacaattcagcgaatgagtgggacacagcctatgcatggtacatacttacacgtctggatatgcctcctccaagaaggtgcactgctcaaagttcttccctctgggaggatttcccttcatcactgtccttcagggctgtcccagtcaggactgtcacatgcagctgtccacttgtggcttgtgtggtaggcaggattctaattaagccccaacaagattccagtctcatggttattcaatcaaatactcatatgagtactgctgtggtgggatttttttaatgcaaaaatgagtatttcattttgataacactagaagaaacaaacaaaacaactgtgttcctacatcgaagtgaaaacaatgtttaagctttcctatcaatcaaatatattccaaaagaaaatgtgttctgtaaaggttctgaaacacaggcaaatattaatacaataggctaggaagctataatactgaaaatgactctcttctgacagggtacttaacaaacataatttttaattttaattttaatttatttattttaagacggagtctccctttgtcgcccaggctggagtgcagtggctcgatctctgctcactgaagcttgtgcctcccaggttcaagtgattctcctgcctctgcctcccgagtagctgggattgcaggtgcccaccaccatgcctggctatatttttaattttttttttacaaacataacttttgaattacaaaaccagtgaagtaatcccttccaaataattgtgtcaagagtgaaactgcttgttccattaaaactccaaaactttcgctgtaatattttttgccactatgaacaattcaagtaaattttgctgcgcttaaaataagttatgaaagtggaaaaatgggcggggcgtggtggctcacacctgtaatcccagcacttttggaggccaaggaagacgaatcacttgaagtcaggagtttgagaccagcctggccgatgtggtgaaacactgtctctactaaaaatacaaaaattagccgggcatggtggtgcatgcctgtaatcccaacttctggggaggctgaggcaggagaatcacttgaacctgggaggcggaggttgcagtgagccgagattatggcactgcactccagcctaggtgacagagccagactctgtctcaaaaaaaataaaaaaggtggaaaaatatacaaagttccagattaaaatgattaatagatgcaatataataaggtttcccctcctttctttttttctttcttttttttttttttttttttttttttttagacagtctcactttgtcacccaggctatgcgatcaaagctcaatgcagcctcaaactcctagtgtcaagcctcctggtctcaagcctcccaagtagctgggaccacaagtacactttcagctaatttttgtatcttgtgtacagacggggtttcaccatgctgcccaggccactcttgaactcttgggctcaaggaatctacccaccttggcctcccaaagtgctggggtacaggcatgagccaccacactgtggccctcatttttcttatcaattaacaactgttacctttaacagatagaggttgaatttatatttatttatttatttatttatatttttagacagagtctcgctctgttacccaggctggagtgcagtggtgtgatctcagctcactgcaacctcacttccccagttcaagtgattctcctgcctcagcctcccaagtagctgttgggactacaggtgcgcgccccacgcccggttaattttctgtatttttagttgagacgagattcaccatgttggccaggctggtcccgaactcctgacctcaggtggtccagctgctttggcctcccaaagtgctgagattacaggcgcgagccacagcgcccgttggggttgactttaaaacacaaccccatccaatgaagatttcagtttgttgatgttgtcgtttctttctttctttcttctttctttctttcttttcttttcttttctttttttctttctttctttctttctttctttctttctttcttttctttctccttccttccttccttccttccttcctctctctctctctctctctttctttctttctttctttctttcttctttccttttttttttttgagatagagtctcctctatggccaggctggagtacggtggtgcgttctcggctctctgctacctctgcctcctgggttccagcgatcctcccacctcaacttcccgagtagttgggaccacaggcgcccgccaccatgcccagctaatttttgtgtgtgttttttttttttttggttggttggttgctctgtagagccggggtctcactatgttacccaggcgatttcatcccactgtgtgagaaggttctgcgttcctctgcttatgttgctgtgcagttgttactgaaggtcgcctgtagagggcgccagtcagcgaaggggagggctgcgcttcctggttctctggggcacgaggcttctcctcagcactctggcgcccccaacaggttcccagtgttcggctggggcaggcacgctgtggctggctgcttcccttccttccatcccctttggaccaaacgggatcggtgcttctggtgagacgcctccccatgcacatcactcccaggtgccctagggggcacatttcccacaactcccagagggcaggtttctagaaagtgccaccagtggggaggcgccacaacttcactgccattttgtgaggtgccgctgtctctcctccagcaaggtcaggacttaaggactgtgagtggggcagtttttccctggatgctttaatttcaccccagaaagtgtcctttttcctcagaaagagtcttttctgtggtgttctctgtctggtgtgtggtagggctcccttggggaagtggctcagctctggggacaccgccatgggcgcctgtgtcagccgcgggggagcgttttccttgggcacctcgtctcagccatgttgtgaggccggggggcttttcttgggggctctgtctcggtgatgctagggacttttcctactgaaatgacctgagcccgggggtgggggccatgccttggttgcttgtgtcggcctcgggtgcggtgctgtttctttcccactcagtcgcagtcctgagggggggctctgccttggggactctatctgttctcatggaacatggtgggggtggctgtgtcccagacgcatgatcgccgccctgtgggatcgctgacgggggctttatctcaacctgcgagggactcttccttgggtgctgatgtcgtccgtgaggcacatttgcccttggatgtcgctcactctcagctaggatgtgttggcttttctttggttctgcttatccgcgatgtggacgcttaccggatgctttgtcttggtggtgggtgctctctcccggtgctgcgggggaatggggtgctgttccttggattctctaagcctatggtgggactcagggagctctgtgtcagccatgagggaggccacgtgaccttgggaac

SEQ ID NO: 1450 - DNA, 6000 bp, Homo sapiens
caggtgcaggattagggaagcttctctttttctgggccccggtccatgctagcagggtttcagtcacttgtcaatgggtccacggtactgcacaacatttaggtatatgctaaaacaagcatctattatgcaactcgtttcatgttccttatttagtagtaagaaaggcaagatgtaagaatttgctgttcaccttataaccaccatcttgacatgccagactaccagattgttaaacgcttcactcagttagaaggcccctgattttgtgtgagaattatttctcacataatgtcttgcaagtgtgttgctaccatgtctggattagttgctgcctccttttcagtcagcataatgtcatcactgcaaagaatggtgtcacatctggtttaagagaaaggtggccattttccctaagaactcgtttaggatataaacctagagagttgatataagcttgaaataggaaatgatagtacattgctgtcctttctagctgaattgaaattcttgtttacgacaattactgaaagaaagccaaacattcacctaatcagtattgtatatcaggttccgagggatgtcacagttgctgacacaacaaaaccacttgtagtacagcagctgcagttggaacaacaatttgattaagtttatggtgcaatctcggctcactgcaacctccacctcccgggttcaagcagttctcttgcctcagcctccttgtgtagctgggactatagaaacgcattatcacacctggctaattgtttgtatttcttagtagagacagagtttcaccatgttggccaggctagtctcaaactcctgacctcaagtgatatgcccacctcagactcccaaagtgcaagtgcgagccactgcgcagggccccagctattttttgtatttttggtagagatgtggtttcgccactttggccagcctcgtctggaactcctgacctcaagtgatccacccgcttctgcctcccaaatcctgggattacaggcgtgagccactgtgtccggtgaaaacttcacttttaagtgaaacgcagaagcaaaatctgataatcagaaaatgagatactgcgtgttctcattcatacgtgggagctaaacaatgggtacacatgaaaataaaggtagaaaccattgactctggggactccaaaatggaggtagaggggagggagggagcgggtcggagggttgaaaaactacctattggatactctcttcactatttgggtgatgagttcactagaagcccaaaccccggcactgtgcaattatatccaagtgagaaatctgtacatgtacccttctggcatctataattttaaaaaagctaacaaagaaagcttcagttttaaatcttaaccaaatacacaggaaaaggattactatacttggacacctttacaggtttctatgttagtttttggtattaaagcagaaacctgttcctcgaccactttattaattgtatgtcctctttgtacaaacatcggaaatagaagactgtcacttttggttctgtaactgtcttgactgcagtcttctacagctttcacagagttaatggtccctagtatctgccattctccaattgccctgggtggcgaaatcgctgccatagtaaacttttcactgataattagagtttctggaaacatgcagggctcgttatttaagagtgactccatttgggcattttggtggatggcctacaggttttcttgcagagtatactagagtctccagaatgaataaccctaggaacttgaggaactagcgctttccagaattttggaagccgagatacaaacattggttttctcaaaagcactgcaagtgggaaggaaaatccatatctagactaaatgtctgttcaggtaagaagaaagcacttctctttttataatagaagtgatctattgtaatccacataccaactagtggctggcagatcattctggagtctggtgccaaattgggggcttagtgttggtctccattcctggaagatttttcactcagcaatgaccgtagccaggtttgccatggtgagtggaggtccatgctactgcgcataatctccaaccctgccagtttgaccactttgtttgttgagccggtaagattgtgacacacgtgttagggaaagaggctgattaatacctagataataagtaccttatccatctgattattaaaattctgctctgctgaggataccctttgctgagaactctcatgagaccccaatatcttcacattgtatgtccgtttggacaggcctgtccacatatttttttttttctcagacttctttgtcgcacatttttaatcgtgtgttctcaaagtccctgacaattcagcgaatgagtgggacacagcctatgcatgatacatacttacacgtctggatatgcctcctccaagaaggtgcactgctcaaagttcttccctctgggaggatttcccttcatcactgtccttcagggctgtcccagtcaggactgtcgtatgcagctgtccacttgtggcttgtgtggtaggcaggattctaattaagccccaacaagattccagtctcatggttattcaatcaaatactcctatgagtactgctctggtgggatttttttaatgcaaaaaatgagtattttattttgatagcactagaggaaacaaacaaaacaactgttcctacatcaaagtgaaaacaatgtttaagctttcctatcaatcaaatatattccaaaagaaaatgtgttctatgaaggttctgaagcacaggcaaatattaacacaataggctaagaagctgtaatactgaatatgactctcttctaacagggtacttaacaaacataatttttaattttaattttaattaattaatttattttgagacggactctccctttgtcccccagtgacaatggatctctgcccctttggagtgcagtgacgcgatctctgctcactgaagcttgcacctctcaggttcaagtgattctcctgcctctgctgccctagtagcagggagtacaggtgcccaccaccatgcctggctatattttttaattttaattttaagttttttacaaacataacttttgaattacaaaaccagtgaagtaatcccttccaaataattgtgtcaatagtgaaactgcctgttccattaaaactcgaaaaatttcgctgtaatattttttaccactatggacaattcaagtaaattttgctgcacttaaaataagttgtgaaagtagaaaaatgggccgggcatggtggctctcccctgtaatcccaggactttgggaggccaaggcagatgaatcacttaaagtcaggagtttgagaccagcctggagaacattgtgaaacaccgtctctgctaaaaatacaaataccagccgggcatggtggtacatgcctgtaatcccagcttctcgggaggctgaggaaggagaactgcttgaacctgggaggcggaggttgcagtgagccaagatcatgccactgcactccagcctgggtgacagagccagactgtctcaaaaaaaataaaaaaggtggaaaaatatacaaagttccagattaaaatgattaatagatgcaatataataaggtttcccctccttccatcctttctttctttctctctttctttcttcctttcttcccttctttcttccatccttcctttcttcctttcttcccttctttcttccatccttcctttcttccttcctttctttctttcgttctttctttccttccttccttcttttttctttctctttctttctttctttctctctttctttctttctttttttttgtagacagtcttactctgtcacccaggctatagtgcaatggtgcgaacaaaggtcaatgcagcctcaacctcctggtgtcaagcctcccgagcagctgggaccacagttacacgctcagctaatttttgtattttgtgttaagatggggtttcaccatgctgcccaggctgctcttgaactcctgggctcaaggaatccacccctcttggtctcccaaattgctgggattacagacgtgagcgaccgcactggggccctcatttttcttatcaattaacaataatggttacctttaacagatagaggttgactttatttattgattgattgatttttatttttagacagagtctcactctgttacccaggctggagtgcagtggcatgatctcagctcactgcaaattctgcctgcccggttcaagcgattctccagcctcagcctcccaagtagctggtgggattataggtgcatgccaccacgcccggtaattttctgtatttttagcagagacgggattcaccatgttggtcagacagactggtctcgaactcctgacctcaggtggtccagccccttcggcctcccaaagtgttgagattacaggcgtgagccactgtggcgggtcggggttgactttaaaacacaaccccctcaaatgaaaattgcagtttgttgttgttctttttctttttcttttcttttccttctttctttctttctttttttttttttttctgaggtggggtctcctctaccgcctgggctggagtgcagtggctcactgctacctccacctcccgggttcaagccatcctcccacctcaacttcccgagtagttgggaccacaggtgcgaggccactaggcccagctaatttgtgtgtttctttctttctttctttcttttttgattagttggttgctttgtagagccggggtctcactatgttacccaggcgatttcatcccgctgggtgagaaggttctgcattcctacgcatacgttgctgtgcagttggtactgaaggtcgcctgtagagggcgccagagtcagcgaaggggagggctgcgcttcctggttctctggggcacgaggcttctcctcagcactctggcgcccccaacaggttcccagtgttcggctggggcaggcacgctgtggctggctacttcccttcctcccatcccccttgggccaaacgggatcggtgcttctggtgagacgcctccccatgcacatcactcccaggtgccctagggggcacatttcccacaactcccagagggcaggtttctagaaagtgccaccagtggggaggcgccacaacttcactgccattttgtgaggtgccgccgtctctcctccagcaaggtcaggacttcaggactgtgagtgggcagtttttccctggatgctttaatttcgccctggaaagtgtcctttttcctcagaaagagtcttttctgtggtgttctctgtccggtgtgtgggagggctcccttggggaagtggcttagctctggggacactgccatgggcgcctgtgtcagccgcgggggagcgttttccttgggcaccccgtctcggctatgttgtggggccagggggcttttcttgggggctcttcttgggggctccctgtcggtgatggaaaaggcgacttttcctgctgaaatgacctgagcccggggggtgggggccatgccttggttgcctgtgtcggcctcgggtgcggcggtgtttctttcccgctcagtcgctgtcctgaggggggactctgccctggggtcactatctgtgctcatggaacgtggtgggggtggctgtgccccggacacatgatcgtagccctgtggggtcactgtcgggggctttatctcaacctctggtggactcttccttgggtactgatgtcggccgtgaggcgcatttgtcctcggatgttgctcgctctcagttacaatgtgttggcttttctttggttctgcttatccccgttgtggacgcttactggatggatgctttctcttggtgctgggtttttaaaattattatctgtaggtgctctctcccggtgccgccggggaatggggtaatgttccttggattctctaagcctatggtgggactcagg

SEQ ID NO: 1451 - DNA, 6000 bp, Homo sapiens
caggtgcaggattagggaagcttctctttttctgggccccggtccatgctagcagggtttcagtcacttgtcaatgggtccacggtactgcacaacatttaggtatatgctaaaacaagcatctattatgcaactcgtttcatgttccttatttagtagtaagaaaggcaagatgtaagaacttgctgttcaccttataaccaccatcttgacatgccagactaccagattgttaaacgcttcactcagttagaaggcccctgattttgtgtgagaattatttctcacataatgtcttgcaagtgtgttgctaccatgtctggattagttgctacctccttttcagtcagcatgatgtcatcactgcaaagaatggtgtcacatctggtttaagagaaaggtggccattttccctaagaactcgtttaggatataaacctagagagttgatataagcttgaaataggaaatgatagtacattgctgtcctttctagctgaattgaaattcttgtttacgacaattactgaaagaaagccaaacattcacctaatcagtattgtatatcaggttccgagggatgtcacagttgctgacacaacaaaaccacttgtagtacagcagctgcagttggaacaacaatttgattaagtttatggtgcaatctcggctcactgcaacctccacctcccgggttcaagcagttctcttgcctcagcctccttgtgtagctgggactatagaaacgcattatcacacctggctaattgtttgtatttcttagtagagacagagtttcaccatgttggccaggctagtctcaaactcctgacctcaagtgatatgcccacctcagactcccaaagtgcaagtgcgagccactgcgcagggccccagctattttttgtatttttggtagagatgtggtttcgccactttggccagcctcgtctggaactcctgacctcaagtgatccacccgcttctgcctcccaaatcctgggattacaggcgtgagccactgtgtccggtgaaaacttcacttttaagtgaaacgcagaagcaaaatctgataatcagaaaatgagatactgcgtgttctcattcatatgtgggagctaaacaatgggtacacatgaaaataaaggtagaaaccattgactctggggactccaaaatggaggtagaggggagggagggagcgggtcggagggttgaaaaactacctattggatactctcttcactatttgggtgatgagttcactagaagcccaaaccccggcactgtgcaattatatccaagtgagaaatctgtacatgtacccttctggcatctataattttaaaaaagctaacaaagaaagcttcagttttaaatcttaaccaaatacacaggaaaaggattactatacttggacacctttacaggtttctatgttagtttttggtattaaagcagaaacctgttcctcgaccactttattaattgtatgtcctctttgtacaaacatcggaaatagaagactgtcacttttggttctgtaactgtcttgactgcagtcttctacagctttcacagagttaatggtccctagtatctgccattctccaattgccctgggtggcgaaatcgctgccatagtaaacttttcactgataattagagtttctggaaacatgcagggctcgttatttaagagtgactccatttgggcattttggtggatggcctacaggttttcttgcagagtatactagagtctccagaatgaataaccctaggaacttgaggaactagcgctttccagaattttggaagccgagatacaaacattggttttctcaaaagcactgcaagtgggaaggaaaatccatatctagactaaatgtctgttcaggtaagaagaaagcacttctctttttatactagaagtgatctattgtaatccacataccaactagtggctggcagatcattctggagtctggtgccaaattgggggcttagtgttggtctccattcctggaagatttttcactcagcaatgaccgtagccaggtttgccatggtgagtggaggtccatgctactgcgcataatctccaaccctgccagtttgaccactttgtttgttgagccggtaagattgtgacacacgtgttagggaaagaggctgattaatacctagataataagtaccttatccatctgattattaaaattctgctctgctgaggataccctttgctgagaactctcatgagaccccaatatcttcacattgtatgtccgtttggacaggcctgtccacatatttttttttttctcagacttctttgtcgcacatttttaatcgtgtgttctcaaagtccctgacaattcagcgaatgagtgggacacagcctatgcatgatacatacttacacgtctggatatgcctcctccaagaaggtgcactgctcaaagttcttccctctgggaggatttcccttcatcactgtccttcagggctgtcccagtcaggactgtcgtatgcagctgtccacttgtggcttgtgtggtaggcaggattctaattaagccccaacaagattccagtctcatggttattcaatcaaatactcctatgagtactgctctggtgggatttttttaatgcaaaaaatgagtattttattttgatagcactagaggaaacaaacaaaacaactgttcctacatcaaagtgaaaacaatgtttaagctttcctatcaatcaaatatattccaaaagaaaatgtgttctatgaaggttctgaagcacaggcaaatattaacacaataggctaagaagctgtaatactgaatatgactctcttctaacagggtacttaacaaacataatttttaattttaattttaattaattaatttattttgagacggactctccctttgtcccccagtgacaatggatctctgcccctttggagtgcagtgacgcgatctctgctcactgaagcttgcacctctcaggttcaagtgattctcctgcctctgctgccctagtagcagggagtacaggtgcccaccaccatgcctggctatattttttaattttaattttaagttttttacaaacataacttttgaattacaaaaccagtgaagtaatcccttccaaataattgtgtcaatagtgaaactgcctgttccattaaaactcgaaaaatttcgctgtaatattttttaccactatggacaattcaagtaaattttgctgcacttaaaataagttgtgaaagtagaaaaatgggccgggcatggtggctctcccctgtaatcccaggactttgggaggccaaggcagatgaatcacttaaagtcaggagtttgagaccagcctggagaacattgtgaaacaccgtctctgctaaaaatacaaataccagccgggcatggtggtacatgcctgtaatcccagcttctcgggaggctgaggaaggagaactgcttgaacctgggaggcggaggttgcagtgagccaagatcatgccactgcactccagcctgggtgacagagccagactgtctcaaaaaaaataaaaaaggtggaaaaatatacaaagttccagattaaaatgattaatagatgcaatataataaggtttcccctccttccatcctttctttctttctctctttctttcttcctttcttcccttctttcttccatccttcctttcttcctttcttcccttctttcttccatccttcctttcttccttcctttctttctttcgttctttctttccttccttccttcttttttctttctctttctttctttctttctctctttctttctttctttttttttgtagacagtcttactctgtcacccaggctatagtgcaatggtgcgaacaaaggtcaatgcagcctcaacctcctggtgtcaagcctcccgagcagctgggaccacagttacacgctcagctaatttttgtattttgtgttaagatggggtttcaccatgctgcccaggctgctcttgaactcctgggctcaaggaatccacccctcttggtctcccaaattgctgggattacagacgtgagcgaccgcactggggccctcatttttcttatcaattaacaataatggttacctttaacagatagaggttgactttatttattgattgattgatttttatttttagacagagtctcactctgttacccaggctggagtgcagtggcatgatctcagctcactgcaaattctgcctgcccggttcaagcgattctccagcctcagcctcccaagtagctggtgggattataggtgcatgccaccacgcccggtaattttctgtatttttagcagagacgggattcaccatgttggtcagacagactggtctcgaactcctgacctcaggtggtccagccccttcggcctcccaaagtgttgagattacaggcgtgagccactgtggcgggtcggggttgactttaaaacacaaccccctcaaatgaaaattgcagtttgttgttgttctttttctttttcttttcttttccttctttctttcttttttttttttttttttctgagatggggtctcctctaccgcctgggctggagtgcagtggctcactgctacctccacctcccgggttcaagccatcctcccacctcaacttcccgagtagttgggaccacaggtgcgaggccactaggcccagctaatttgtgtgtttctttctttctttctttcttttttgattagttggttgctttgtagagccggggtctcactatgttacccaggcgatttcatcccgctgggtgagaaggttctgcattcctccgcatacgttgctgtgcagttgttactgaaggtcgcctgtagagggcgccagagtcagcgaaggggagggctgcgcttcctggttctctggggcacgaggcttctcctcagcactctggcgcccccaacaggttcccagtgttcggctggggcaggcacgctgtggctggctacttcccttcctcccatcccccttgggccaaacgggatcggtgcttctggtgagacgcctccccatgcacatcactcccaggtgccctagggggcacatttcccacaactcccagagggcaggtttctagaaagtgccaccagtggggaggcgccacaacttcactgccattttgtgaggtgccgccgtctctcctccagcaaggtcaggacttcaggactgtgagtgggcagtttttccctggatgctttaatttcgccctggaaagtgtcctttttcctcagaaagagtcttttctgtggtgttctctgtccggtgtgtgggagggctcccttggggaagtggcttagctctggggacaccgccatgggcgcctgtgtcagccgcgggggagcgttttccttgggcaccccgtctcggctatgttgtggggccagggggcttttcttgggggctcttcttgggggctccctgtcggtgatggaaaaggcgacttttcctgctgaaatgacctgagcccggggggtgggggccatgccttggttgcctgtgtcggcctcgggtgcggcggtgtttctttcccgctcagtcgctgtcctgaggggggactctgccctggggacactatctgtgctcatggaacgtggtgggggtggctgtgccccggacacatgatcgtagccctgtggggtcactgtcgggggctttatctcaacctctggtggactcttccttgggtactgatgtcggccgtgaggcgcatttgtcctcggatgttgctcgctctcagttacaatgtgttggcttttctttggttctgcttatccccgttgtggacgcttactggatgctttctcttggtgctgggtttttaaaattattatctgtaggtgctctctcccggtgccgccggggaatggggtaatgttccttggattctctaagcctatggtgggactcagggagct

SEQ ID NO: 1452 - DNA, 6000 bp, Homo sapiens
caggtgcaggattagggaagcttctctttttctgggccccggtccatgctagcagggtttcagtcacttgtcaatgggtccacggtactgcacaacatttaggtatatgctaaaacaagcatctattatgcaactcgtttcatgttccttatttagtagtaagaaaggcaagatgtaagaacttgctgttcaccttataaccaccatcttgacatgccagactaccagattgttaaacgcttcactcagttagaaggcccctgattttgtgtgagaattatttctcacataatgtcttgcaagtgtgttgctaccatgtctggattagttgctacctccttttcagtcagcatgatgtcatcactgcaaagaatggtgtcacatctggtttaagagaaaggtggccattttccctaagaactcgtttaggatataaacctagagagttgatataagcttgaaataggaaatgatagtacattgctgtcctttctagctgaattgaaattcttgtttacgacaattactgaaagaaagccaaacattcacctaatcagtattgtatatcaggttccgagggatgtcacagttgctgacacaacaaaaccacttgtagtacagcagctgcagttggaacaacaatttgattaagtttatggtgcaatctcggctcactgcaacctccacctcccgggttcaagcagttctcttgcctcagcctccttgtgtagctgggactatagaaacgcattatcacacctggctaattgtttgtatttcttagtagagacagagtttcaccatgttggccaggctagtctcaaactcctgacctcaagtgatatgcccacctcagactcccaaagtgcaagtgcgagccactgcgcagggccccagctattttttgtatttttggtagagatgtggtttcgccactttggccagcctcgtctggaactcctgacctcaagtgatccacccgcttctgcctcccaaatcctgggattacaggcgtgagccactgtgtccggtgaaaacttcacttttaagtgaaacgcagaagcaaaatctgataatcagaaaatgagatactgcgtgttctcattcatatgtgggagctaaacaatgggtacacatgaaaataaaggtagaaaccattgactctggggactccaaaatggaggtagaggggagggagggagcgggtcggagggttgaaaaactacctattggatactctcttcactatttgggtgatgagttcactagaagcccaaaccccggcactgtgcaattatatccaagtgagaaatctgtacatgtacccttctggcatctataattttaaaaaagctaacaaagaaagcttcagttttaaatcttaaccaaatacacaggaaaaggattactatacttggacacctttacaggtttctatgttagtttttggtattaaagcagaaacctgttcctcgaccactttattaattgtatgtcctctttgtacaaacatcgaaaatagaagactgtcacttttggttctgtaactgtcttgactgcagtcttctacagctttcacagagttaatggtccctagtatctgccattctccaattgccctgggtggcgaaatcgctgccatagtaaacttttcactgataattagagtttctggaaacatgcagggctcgttatttaagagtgactccatttgggcattttggtggatggcctacaggttttcttgcagagtatactagagtctccagaatgaataaccctaggaacttgaggaactagcgctttccagaattttggaagccgagatacaaacattggttttctcaaaagcactgcaagtgggaaggaaaatccatatctagactaaatgtctgttcaggtaagaagaaagcacttctctttttataatagaagtgatctattgtaatccacataccaactagtggctggcagatcattctggagtctggtgccaaatcgggggcttagtgttggtctccattcctggaagatttttcactcagcaatgaccgtagccaggtttgccatggtgagtggaggtccatgctactgcgcataatctccaaccctgccagtttgaccactttgtttgttgagccggtaagattgtgacacacgtgttagggaaagaggctgattaatacctagataataagtaccttatccatctgattattaaaattctgctctgctgaggataccctttgctgagaactctcatgagaccccaatatcttcacattgtatgtccgtttggacaggcctgtccacatattttttttttctcagacttctttgtcacacatttttaatcgtgtgttctcaaagtccctgacaattcagcgaatgagtgggacacagcctatgcatgatacatacttacacgtctggatatgcctcctccaagaaggtgcactgctcaaagttcttccctctgggaggatttcccttcatcactgtccttcagggctgtcccagtcaggactgtcgtatgcagctgtccacttgtggcttgtgtggtaggcaggattctaattaagccccaacaagattccagtctcatggttattcaatcaaatactcctatgagtactgctctggtgggatttttttaatgcaaaaaatgagtattttattttgatagcactagaggaaacaaacaaaacaactgttcctacatcaaagtgaaaacaatgtttaagctttcctatcaatcaaatatattccaaaagaaaatgtgttctatgaaggttctgaagcacaggcaaatattaacacaataggctaagaagctgtaatactgaatatgactctcttctaacagggtacttaacaaacataatttttaattttaattttaattaattaatttattttgagacggactctccctttgtcccccagtgacaatggatctctgcccctttggagtgcagtgacgcgatctctgctcactgaagcttgcacctctcaggttcaagtgattctcctgcctctgctgccctagtagcagggagtacaggtgcccaccaccatgcctggctatattttttaattttaattttaagttttttacaaacataacttttgaattacaaaaccagtgaagtaatcccttccaaataattgtgtcaatagtgaaactgcctgttccattaaaactcgaaaaatttcgctgtaatattttttaccactatggacaattcaagtaaattttgctgcacttaaaataagttgtgaaagtagaaaaatgggccgggcatggtggctctcccctgtaatcccaggactttgggaggccaaggcagatgaatcacttaaagtcaggagtttgagaccagcctggagaacattgtgaaacaccgtctctgctaaaaatacaaataccagccgggcatggtggtacatgcctgtaatcccagcttctcgggaggctgaggaaggagaactgcttgaacctgggaggcggaggttgcagtgagccaagatcatgccactgcactccagcctgggtgacagagccagactgtctcaaaaaaaataaaaaaggtggaaaaatatacaaagttccagattaaaatgattaatagatgcaatataataaggtttcccctccttccatcctttctttctttctctctttctttcttcctttcttcccttctttcttccatccttcctttcttcctttcttcccttctttcttccatccttcctttcttccttcctttctttctttcgttctttctttccttccttccttcttttttctttctctttctttctttctttctctctttctttctttctttttttttgtagacagtcttactctgtcacccaggctatagtgcaatggtgcgaacaaaggtcaatgcagcctcaacctcctggtgtcaagcctcccgagcagctgggaccacagttacacgctcagctaatttttgtattttgtgttaagatggggtttcaccatgctgcccaggctgctcttgaactcctgggctcaaggaatccacccctcttggtctcccaaattgctgggattacagacgtgagcgaccgcactggggccctcatttttcttatcaattaacaataatggttacctttaacagatagaggttgactttatttattgattgattgatttttatttttagacagagtctcactctgttacccaggctggagtgcagtggcatgatctcagctcactgcaaattctgcctgtccggttcaagcgattctccagcctcagcctcccaagtagctggtgggattataggtgcatgccaccacgcccggtaattttctgtatttttagtagagacgggattcaccatgttggtcagacagactggtctcgaactcctgacctcaggtggtccagccccttcggcctcccaaagtgttgagattacaggcgtgagccactgtggcgggtcggggttgactttaaaacacaaccccctcaaatgaaaattgcagtttgttgttgttctttttctttttcttttcttttccttctttctttctttctttttttttttttttctgaggtggggtctcctctaccgcctgggctggagtgcagtggctcactgctacctccacctcccgggttcaagccatcctcccacctcaacttcccgagtagttgggaccacaggtgcgaggccactaggcccagctaatttgtgtgtttctttctttctttctttcttttttgattagttggttgctttgtagagccggggtctcactatgttacccaggcgatttcatcccgctgggtgagaaggttctgcattcctacgcatacgttgctgtgcagttggtactgaaggtcgcctgtagagggcgccagagtcagcgaaggggagggctgcgcttcctggttctctggggcacgaggcttctcctcagcactctggcgcccccaacaggttcccagtgttcggctggggcaggcacgctgtggctggctacttcccttcctcccatcccccttgggccaaacgggatcggtgcttctggtgagacgcctccccatgcacatcactcccaggtgccctagggggcacatttcccacaactcccagagggcaggtttctagaaagtgccaccagtggggaggcgccacaacttcactgccattttgtgaggtgccgccgtctctcctccagcaaggtcaggacttcaggactgtgagtgggcagtttttccctggatgctttaatttcgccctggaaagtgtcctttttcctcagaaagagtcttttctgtggtgttctctgtccggtgtgtgggagggctcccttggggaagtggcttagctctggggacactgccatgggcgcctgtgtcagccgcgggggagcgttttccttgggcaccccgtctcggctatgttgtggggccagggggcttttcttgggggctcttcttgggggctccctgtcggtgatggaaaaggcgacttttcctgctgaaatgacctgagcccggggggtgggggccatgccttggttgcctgtgtcggcctcgggtgcggcggtgtttctttcccgctcagtcgctgtcctgaggggggactctgccctggggtcactatctgtgctcatggaacgtggtgggggtggctgtgccccggacacatgatcgtagccctgtggggtcactgtcgggggctttatctcaacctctggtggactcttccttgggtactgatgtcggccgtgaggcgcatttgtcctcggatgttgctcgctctcagttacaatgtgttggcttttctttggttctgcttatccccgttgtggacgcttactggatggatgctttctcttggtgctgggtttttaaaattattatctgtaggtgctctctcccggtgccgccggggaatggggtaatgttccttggattctctaagcctatggtgggactcaggg

SEQ ID NO: 1453 - DNA, 6000 bp, Homo sapiens
gagaccacaggtgcaggattagggaagcttctctttttctgggccccggtccatgctagcagggtttcagtcacttgtcaatgggtccacggtactgcacaacatttaggtatatgctaaaacaagcatcgattatgcaactcgtttcatgttccttatttagtagtaagaaaggcaagatgtaagaacttgctgttcaccttataaccaccatcttgacatgccagactaccagattgttaaacgcttcactcagttagaaggcccctgattttgtgtgagaattatttctcacataatgtcttgcaagtgtgttgctaccatgtctggattagttgctgcctccttttcagtcggcatgatgtcatcactgcaaagaatggtgtcacatctggtttaagagaaaggtggccattttccctaagaactcgtttaggatataaacctagagagttgatataagcttgaaataggaaatgatagtacattgctgtcctttctagctgaattgaaattcttgtttacgacaattactgaaagaaagccaaacattcacctaatcagtattgtatatcaggttccgagggatgtcacagttgctgacacaacaaaaccacttgtagtacagcagctgcagttggaacaacaatttgattaagtttatggtgcaatctcggctcactgcaacctccacctcccgggttcaagcagttctcttgcctcagcctccttgtgtagctgggactatagaaacgcattatcacacctggctaattgtttgtatttcttagtagagacagagtttcaccatgttggccaggctagtctcaaactcctgacctcaagtgatatgcccacctcagactcccaaagtgcaagtgcgagccacagcgcagggccccagctattttttgtatttttggtagagatgtggtttcgccactttggccagcctcgtctggaactcctgacctcaagtgatccacccgcttctgcctcccaaatcctgggattacaggcgtgagccactgtgtccggtgaaaacttcacttttaagtgaaacgcagaagcaaaatctgataatcagaaaatgagatactgcgtgttctcattcatatgtgggagctaaacaatgggtacacatgaaaataaaggtagaaaccattgactctggggactccaaaatggaggtagaggggagggagggagcgggtcggagggttgaaaaactacctattggatactctcttcactatttgggtgatgagttcactagaagcccaaaccccggcactgtgcaattatatccaagcgagaaatctgtacatgtacccttctggcatctataattttaaaaaagctaacaaagaaagcttcagttttaaatcttaaccaaatacacaggaaaaggattactatacttggacacctttacaggtttctatgttagtttttggtattaaagcagaaacctgttcctcgaccactttattaattgtatgtcctctttgtacaaacatcgaaaatagaagactgtcacttttggttctgtaactgtcttgactgcagtcttctacagctttcacagagttaatggtccctagtatctgccattctccaattgccctgggtggcgaaatcgctgccatagtaaacttttcactgataattagagtttctggaaacatgcagggctcgttatttaagagtgactccatttgggcattttggtggatggcctacaggttttcttgcagagtatactagagtctccagaatgaataaccctaggaacttgaggaactagcgctttccagaattttggaagccgagatacaaacattggttttctcaaaagcactgcaagtgggaaggaaaatccatatctagactaaatgtctgttcaggtaagaagaaagcacttctctttttataatagaagtgatctattgtaatccacataccaactagtggctggcagatcattctggagtctggtgccaaattgggggcttagtgttggtctccattcctggaagatttttcactcagcaatgaccgtagccaggtttgccatggtgagtggaggtccatgctactgcgcatgatctccaaccctgccagtttgaccactttgtttgttgagccggtaagattgtgacacacgtgttagggaaagaggctgattaatacctagataataagtaccttatccatctgattattaaaattctgctctgctgaggataccctttgctgagaactctcatgagaccccaatatcttcacattgtatgtccgtttggacaggcctgtccacatattttttttttctcagacttctttgtcacacatttttaatcgtgtgttctcaaagtccctgacaattcagcgaatgagtgggacacagcctatgcatgatacatacttacacgtctggatatgcctcctccaagaaggtgcactgctcaaagttcttccctctgggaggatttcccttcatcactgtccttcagggctgtcccagtcaggactgtcgtatgcagctgtccacttgtggcttgtgtggtaggcaggattctaattaagccccaacaagattccagtctcatggttattcaatcaaatactcctatgagtactgctctggtgggatttttttaatgcaaaaaatgagtattttattttgatagcactagaggaaacaaacaaaacaactgttcctacatcaaagtgaaaacaatgtttaagctttcctatcaatcaaatatattccaaaagaaaatgtgttctatgaaggttctgaagcacaggcaaatattaacacaataggctaagaaggtgtaatactgaatatgactctcttctaacagggtacttaacaaacataatttttaattttaattttaattaattaatttattttgagacggactctccctttgtcccccagtgacaatggatctctgcccctttggagtgcagtgacgcgatctctgctcactgaagcttgcacctctcaggttcaagtgattctcctgcctctgctgccctagtagcagggagtacaggtgcccaccaccatgcctggctatattttttaattttaattttaagttttttacaaacataacttttgaattacaaaaccagtgaagtaatcccttccaaataattgtgtcaatagtgaaactgcctgttccattaaaactcgaaaaatttcgctgtaatattttttaccactatggacaattcaagtaaattttgctgcacttaaaataagttgtgaaagtagaaaaatgggccgggcatggtggctctcccctgtaatcccaggactttgggaggccaaggcagatgaatcacttaaagtcaggagtttgagaccagcctggagaacattgtgaaacaccgtctctgctaaaaatacaaataccagccgggcatggtggtacatgcctgtaatcccagcttcttgggaggctgaggaaggagaactgcttgaacctgggaggcggaggttgcagtgagccaagatcatgccactgcactccagcctgggtgacagagccagactgtctcaaaaaaaataaaaaaggtggaaaaatatacaaagttccagattaaaatgattaatagatgcaatataataaggtttcccctccttccatcctttctttctttctctctttctttcttcctttcttcccttctttcttccatccttcctttcttcctttcttcccttctttcttccatccttcctttcttccttcctttctttctttcgttctttctttccttccttccttcttttttctttctctttctttctttctttctctctttctttctttctttttttttgtagacagtcttactctgtcacccaggctatagtgcaatggtgcgaacaaaggtcaatgcagcctcaacctcctggtgtcaagcctcccgagcagctgggaccacagttacacgctcagctaatttttgtattttgtgttaagatggggtttcaccatgctgcccaggctgctcttgaactcctgggctcaaggaatccacccctcttggtctcccaaattgctgggattacagacgtgagcgaccgcactggggccctcatttttcttatcaattaacaataatggttacctttaacagatagaggttgactttatttattgattgattgatttttatttttagacagagtctcactctgttacccaggctggagtgcagtggcatgatctcagctcactgcaaattctgcctgcccggttcaagcgattctccagcctcagcctcccaagtagctggtgggattataggtgcatgccaccacgcccggtaattttctgtatttttagcagagacgggattcaccatgttggtcagacagactggtctcgaactcctgacctcaggtggtccagccccttcggcctcccaaagtgttgagattacaggcgtgagccactgtggcgggtcggggttgactttaaaacacaaccccctcaaatgaaaattgcagtttgttgttgttctttttctttttcttttcttttccttctttctttctttttttttttttttctgagatggggtctcctctaccgcctgggctggagtgcagtggctcactgctacctccacctcccgggttcaagccatcctcccacctcaacttcccgagtagttgggaccacaggtgcgaggccactaggcccagctaatttgtgtgtttctttctttctttctttcttttttgattagttggttgctttgtagagccggggtctcactatgttacccaggcgatttcatcccgctgggtgagaaggttctgcattcctccgcatacgttgctgtgcagttgttactgaaggtcgcctgtagagggcgccagagtcagcgaaggggagggctgcgcttcctggttctctggggcacgaggcttctcctcagcactctggcgcccccaacaggttcccagtgttcggctggggcaggcacgctgtggctggctacttcccttcctcccatcccccttgggccaaacgggatcggtgcttctggtgagacgcctccccatgcacatcactcccaggtgccctagggggcacatttcccacaactcccagagggcaggtttctagaaagtgccaccagtggggaggcgccacaacttcactgccattttgtgaggtgccgccgtctctcctccagcaaggtcaggacttcaggactgtgagtgggcagtttttccctggatgctttaatttcgccctggaaagtgtcctttttcctcagaaagagtcttttctgtggtgttctctgtccggtgtgtgggagggctcccttggggaagtggcttagctctggggacaccgccatgggcgcctgtgtcagccgcgggggagcgttttccttgggcaccccgtctcggctatgttgtggggccagggggcttttcttgggggctcttcttgggggctccctgtcggtgatggaaaaggcgacttttcctgctgaaatgacctgagcccggggggtgggggccatgccttggttgcctgtgtcggcctcgggtgcggcggtgtttctttcccgctcagtcgctgtcctgaggggggactctgccctggggacactatctgtgctcatggaacgtggtgggggtggctgtgccccggacacatgatcgtagccctgtggggtcactgtcgggggctttatctcaacctctggtggactcttccttgggtactgatgtcggccgtgaggcgcatttgtcctcggatgttgctcgctctcagttacaatgtgttggcttttctttggttctgcttatccccgttgtggacgcttactggatgctttctcttggtgctgggtttttaaaattattatctgtaggtgctctctcccggtgccgccggggaatggggtaatgttccttggattctctaagcctatggtgggactcaggga

SEQ ID NO: 1454 - DNA, 6000 bp, Homo sapiens
agtgaaactccgtctcaaaataaatgaataaataaataaataaataataagtagaaaatcgacttaggactatagcatgaaaagagatttaattagtaatttaaaatctccccagaaatacaagccaagccaagatggcttcgcgtgcaaattctatcaaacatttaaggaagaaataataccagtacttagcaatgtcttccaaaaaataacggaggaacactacttcattctatgcggccaatattaccctgatatcaaagccagagaaatatatcacaagatatatttgcctgtcagctccaaattcacccttttatcccgctgtgtgagaaggttctgtgttcctctgcctctgcccgctgtgcagttgatagtgaaggccacctgtagagagcaccagagtcagctaaggggagagctgcgcttcctggttctcccgctggcgccagcggtcctgctgagcgcaaaacttctcttccggactctggcgccccacacaggttcccagtgttaggctgggggagggcacgcgaaagcggtcagcttcccttccttccatccgccttgagcctttccggattggtgcttctggtgagacgcctccccatgagcatcactcccaagcacgcgagggggcacgtttcccataactcccaaacggcaagtttctacaaagttacaacagtggggaggcgccacaacttcactgccattttgtgaggtgctgccgcccctcctccggcaaggtcaggacttcaggactgtgagtggggcagtttttccctggatgctttaatttcgcccgggaaagtgtcctttttcctcagaaagtgtcttttctgaggtgttctctgtcgggtgtgtggtagggttccctgggaaagtggctccactctgaggacaccgccatgggagcctgtgtcaaccatgggggagcgttttccttgggcaccccatctcggctatgttgtgggtccggggggcttttcttgggggctccctcagtgatgtgaggggcttttcctgctgaaatgacctaagcccagggttggggaccctgccttggttgcctgtgtcagcctcgggtgtggccgtgtttcttccctgctcggtggcagccctgaggggggactctgccttgggagctctgtctatgttcaagggccggggtggtggtggctgtgccctggacacatgatcacagccctatggggtcactctctgtcgcgggctttatctcagcctgtgagggactcttccttgagtgctgttctcggctgtggggcacatttgtccttagatgttgctcgctctcagctaggatgtgttggcttttctttggttctgcttatccctgatggggacgcttaccagacgctttctcttggtgctgggtttttaaaattattatctgtgggtgctgtctcctggtgctgtgggggagtggggtgctgttccttggattctctgagcctgtggtgggactcggggaactcttgtgtcagccacgagggcacccagctgaccttgggagctctgtctcaccccagggttgggtgcttttccttggttggttctcagtcctgagggagctcttccctgggattctatctgacctttcagccatagcctcagatgtctgtgcaggaatcggggtccagaaatgtttgaaggttccagattcgccacatgcacacaactcactgtgcaattattctttcattccagccactctttgggagtgtagtgatctctccttatgtctacacttgcaattttgtgctaattaatgagattgagcaccctttttaaaagtgttcatttatcgatttttgattgttttttgggctcccaggctcgctcgattctcgtgcctcagtagctgggactacaagcgcatgccaccaagcctggctaatctttgtattttttagtagagatggggttttgccaaattgcccaggctggtctcgaactcctggactcaagtgatctgcccaattcggcctcccaaagtgctgggattacaggcgtgagccactgcgcccagctatttattgtttttttttttttcggagcactttttcatgtgtttattggtcatttaaccatgtcttttaggaagttccctttgaggtcttttctgccaaattttattgagatgtttgtattttaaaaatggatttgtagtttacatatattctgggtttcagttgtacacacatgcacacaggcatatatgtacatgtattaaaatacatatacaattttaatgtcttctacaaatctgttttgcttttacactatctcaataatgtgttttagatgaacagattctcttaatcttattaatcagtcttgtttatggctagagctctttattattttaagtgaaaatctttgcctcccccaatgccatgacgataatattctaagttttcttctagatctcctattcacctcaaataaattttcatggaatggagtaaagtcagagtccgggtatattttatgtgattactaaaggtatatttgagtatgactcttatgatatgcatattcagcttttccccccaaattttattgcgatgtttgcttttaaaattgatttgtagttctggatatactctggattccactcagttgttgtcagatacatatatatgtatatatataaaatattatattatatatactatatatatttatatatgattaatgtatatttttatatataacctatcctatacattatataatatgtaatctacatatatgctttgcttttccactctcttaagagtgtcttttgaggaatagaagttttacatttaattatgtctaattaaacaatgtattctttatggttagaccttttttatcctaatcaaaaacaccttggcctattctaaagctgtaaagctaatatcttatattttttactggattcactatctatctttaataatgttttctgcagtgggatggggtaagaatcaaagtttgtattttccctgcatttatgaagtgcatttattaaaagcactagtctttccacaatgatttacaggagctctcctgtggtaaatctagctattttccatttccagattgtttctggcctctgtgtcctctgcccttggtgtatttacctgtcattgctccaataccacacggttttaattactctacctttatagtaaatctcatatttagtagtgtgtatttaccaacttagttctttttcttaaagattgtcttagctttaccaaaccttcgatttgcacatacttaaaacaattatctgtttgtcaattttcagaaaaaattttgttaacacggtggaattttaaatgattggtatgttcattctgagagaattaacaataatgtctcttaataatgtcttccattccatggaaggtaaaccaaagtgccaataaaggcacgcctttttatcaagcaattcaagtcaagtcaaaatcaaaactaaaattatcaagcaattcaagtcaagtcaaaaacaaaaaccaaagggctggtacaggtacaccgtgggtgatctggccatgcttccactcaaatggagtcggcaagttccaaagaccagtcttaccaagttttagatgtccagacttaaagtgccagttccttcctggtgttcagccactgcgttgatcctccgcgggggcctgctgtgcactgctctgacaaggcgttccacaggggcaaatgcctaccccggagcgctctcaggatctgcatcgctcaagctggccagagttcccagcagggatgctctacagggcaggcatgagctgcctaaggggctgcctcgactgtccgttaatcaggaaaccaagaaatgtagcaggatgagccgcagacaaaactcctcaggcactggattaaagaaggaagtggtttattcggctgggagcatcagccaacttgcatcataagagctgagttccccgaaaaagaaattcttggcctttttagaggcttacaactttaaggggtccacgtgaaagagtcgtgataaattgagcaagtgtgggaaatgtgactgggggctacatgcagcagctaacagaacaataagttttacaatgctttttttcatacagtgtctggaatttagagataacacaagtagtttaggtcaggggttgaaattattatcactttttttaactcctagggccgggtggtggtgccaaggttgtctggctatttattttactttttttttttccaactttttgctttctttctttcctcctgtcttgtgaactaggcaaggtagggggaggagggcagcaggagtagtagtggtctccttccttagcgggactacaggtgcgtgccaccacacctggctaattttctgtatttttagtagagacgggattcaccatgttggccatgctggtcttggactcctgacctcaggtgatccagacacttcggcctcccaaggtgctgacattacaggcgtgagccactgcgcccggtcggggttgactttaaaaaacaaccccctcaaatgaaaatttcagtttgttgttgttgttgcttctttttctttctttcttttttttttgatggagtcttctgtatggtctgggatggagagtgcactggcacgatcttggctcactgctacctccacctcccgggttcaagcgatcctcccacctcaacttcccgagtagttgggaccacaggtacacgccaccatgcccagctaatttttgtgtgtgtttttttggttggttggttgctctgtagagccggggtctcactatgttacccaggcgatttcatcccgctgggtgagaaggttctgcattcctctgcttatgttgctgtgcagttgttactgaaggtcgcctgcagagggcgccagagtcaacgaaggggagggctgcgcttcctggttctctggggcacgaggcttctcctcagcactctggcgcccccaacaggttcccagtgttcggctgggacaggcacgctgtggctggctacttcccttccttccatcccccttgggccaaacaggatcggtgcttctggtgagacgtctccccatgcacatcactcccagatgccctagggggcacatttcccacaactcccagagggcaggtttctagaaagtgccaccagtggggaggcgccacaacttcactgccattttgtgaggtgccgccgtctctcctccagcaaggtcaggacttcaggactgtgagtgggcagtttttccctggatgctttaatttcgccctggaaagtgtcctttttcctcagaaagagtcttttctgtggtgttctctgtccggtgtgtgggagggctcccttggggaagtggcttagctctggggacaccgccatgggcgcctgtgtcagccgcgggggagcgttttccttgggcaccccgtctcggctatgttgtggggccagggggcttttcttgggggctcttcttgggggctccctgtcggtgatggaaaaggcgacttttcctgctgaaatgacctgagcccggggggtgggggccatgccttggttgcctgtgtcggcctcgggtgcggcggtgtttctttcccgctcagtcgctgtcctgaggggggactctgccctggggacactatctgtgctcatggaacgtggtgggggtggctgtgccccggacacatgatcgtagccctgtggggtcactgtcgggggctttatctcaacctctggtggactcttccttgggtactgatgtcggccgtgaggcgcatttgtcctcggatgttgctcgctctcagttacaatgtgttggcttttctttggttctgcttatccccgttgtggacgcttactggatgctttctcttggtgctgggtttttaaaattattatctgtaggtgctctctcccggtgccgccggggaatggggtaatgttccttggattctctaagcctatggtgggactcaggga

SEQ ID NO: 1455 - DNA, 6000 bp, Homo sapiens
tggataaagaaaatgtagtacatatacaccacggaatactatgcagccataaaaaggaatgagatcggccgggtgcggtggctcacgcctgtaatcccagcactttgggaggccaaggcgggcggatcacgaggtcaggagatggagaccatcctggctaacacggtgaaaccccgtctctactaaaaatacaaaaaaaattagccaggtgtggtggcgggcgcttgcagtaccagctactcgggaggctgaggcaggagaatggcatgagcccgggaggcggagcttgcagtgagccgagatcatgccactgcactccagcctgggcgacagagcgtgactccgtctcaaaaaaaagaaaaaaaataaaaaaggaatgagatcatgtcctttgcagaaacatggatggagctagaagccgttatcatcaggaaactaacgcaagaaaagaaaaccaaacagcacgtgttctcacttataagtgggagctgaatgatgagaacacatggacacgtcgggcagggcaacacacactgggcctgttgggggaggagttgggggagggaatgcatcaggaaaaatagctactgggtgctgggcttaataccaaggtgatgggttcataggtgcagtaagccaccatgccacacgtttacctatgtaataaacctgcacatcctgcacatgtaccccaggacttaaagtaaaagttgaagaaataaagaatatgctcttgcattaaatatgcaggagcatatttaatgaaaattatattcaaatatataattttgattaaaaaattttccaaaccattttcatttcctataaaagcagagtggagaatgtgtgaaaacatttttactgaacatttactaccctccaggtactgttctcaatgctttacatgtattaactcaatccttggccaatccctatgagtgaggtgtgattcttatgactattgttaaaaaagagaaaataaaggcacagaaaattaaggaaaagcctaattaattgaggagttttgggaatgtggtggaataactttagtctggttttgttacagaagagattattgcctaattgtgtcctagtgcagatgcaatctcctttgtcttcatgttctaatggtgaagttagtaagtctctctcatacacaacacaaaactcacattaagatctccatcaggacaatccaatcatggcaacatcacctagtgcttcatattccacgaggaatacttagtcatttttttaggcagagcactagtgacttggataacagaaagagagactgtagactgcaatctcgatattaaaggagttattgtggggagtgggaaagaatatagactctggagtcagaaagatatgcgttcaaaccctggctctacctcctatcttgtgtcacatggggcaagccatttgaccactgtcagccttgatttcttattaaagggtagatagtaatacatatctgcagaacaactatgagcattaaatgtgataattaaaaacatcagttcggccaggtgcggtggctcatgcctgtaatcccagcactttgggaggcgaggtgggcggatcacctgaggtcgggagttcgagagcagcctgtccaaaatggagaaaccctgtctctactaaaaatacaaaaaataagctgggtgtggtggcgcatgcctgtaatcccagctactcagaaggctaaggcaggagaatcacttgaacccgggaagtggaggttgcggtgagctgagatcgtgccattgcactccagcctgggcaacaagagtgaaactccatctcaaaaaaaaaaaaaaagatataaataaaataaaataaaataaaataaaataaatcagttcctagtacaaccaatccactcttggatcaaaaagttcccattttatgttcacataagatttcctgtgtcatattttatcttttaaatcaagagaattaacacatatagtttatattcatctttccaatgagaaaataattatacgaagaatgtcacaattagggcagaaatagaaagagttatcttacctgcccatcatttgtaaacacataggcagcagcatgaagttcttcaggtggagttggttgactcgtttgaagtggagaagcctgcatctgcagatagtcctcataattaactatgtgtgttactagaacactttgatttataactggaacgtaactggcacataaattggcgctatacagctgaaatatatgatcctcttgagagtacatgatcacagattgtcttagcaatgtgtgccttggtaccagagtttagaatctcatgtctagaatctatatcatgttccatgatctagaatcatctccctttacctaagtcatgactcagtccaccatcactacttcctgtaggttcacaccactaggttaggttaaacaagtcccttatgcctccaacccagtttgagaatgggctgaccttccttataccaccatcccaactaaaaatctataattctaaatattaatactttaatatttagaatgccaattttcactgaattccacaagttcattttttcagacttaaaggataagtatgtattaatgagcatatacactgttctagttatcctacctgcccatcatttataaccacatagtccaaagtataaagctcttcacctagagttagctgactcgtttgaagtggaggaaccagcatctgcagatattcctcatagctaactatgtgtgtgtgactggaacactctgattaaaaactagaacataaatggcaagtaaattggcactattcttcccactggaagggtgtaggctccatggcattctcttatcatccagggaacactgggtagtgggcctaaccctctttggataatttgattaaatctacagatatttttccctgggaaagtacctttacacacaaacttggtgtacaattttagaagtgtgaccagcctaagatctgtttaatttagtggacagatgaccccacttaaaatcaccaaagtgggggtaaagagggtttgtaaactgttgccaattatcctggatactatcaattttgttatttccatataaacaaggaattctctgctgaactcacagcagtaagcagtgtgatatagtattcgtgtgtgcaatctctggaatctgagagacctaggttctgtcacttttccagctggttatacctgggagagctacttaaatgtacactctaagattctatttccataaaaagggcataaaacagtatctaactcatggtgctcttataaggattaccagagataaagcacaaagaggatagtgtatgtgctggttaatacatactttcctttaagttaaaaaacaaacaaacaaacaaacaaacaaacaaacttgtgggatttagtgaacatgggcattctctatattaaaacattaaaaaaataaactgctcatgcaataaacagcttcccacaaactagacttgatattttcaaaatcagtaaaagcccggcacaaaaaaacacttgtttggtttcagcacaccgaatttccttctggttaactggtcgaaatgactgctacttgcaatatcataagcatttctacatgtctaacatttcaaatcttcctttgcgaaacaaatcttttgttattcctgaagttttaaactgatgtatttaatacaagcaagcagaaggaggggaatgatgaaaattagagtagaagaaaatcaatgaaataagaaacagaaaaatcaatgaaatcaaaagttggttcaccgaaaaggtgaaaaaaaaaatctaacaatcttttagcttgactgaccaagaaaaatagaaaggactacacagattatcaaaatcaaaaatgaaaggggggttattaatactgaccttacagaaattaaaaggaatacattatgaacaactttacgccaacaaactaaacaacttaggtaaaatggaaaaaattcttggaagacaaattaccgactcaagaagaaacaggctgggtgcagtggctcacgcctgtaatcccagcactttgggaggccaaggcgggcggatcacctgaggttgggagtttgagaccagcctgacaaacatggagaaactccgtctctactacaaatacaaaattagctgggcgtggtggcgcatgcctgtaatcccagctatttgggaggctgaggcaggagaatcacttgaacccgggaggcggaggttgggtgagccaagatcatgccattgcactccaccccgggcaacaagagcgaacaacaagagtgaaactccgtctcaaaataaatgaataaataaataaataaataataagtagaaaatcgacttaggactatagcatgaaaagagatttaattagtaatttaaaatctccccagaaatacaagccaagccaagatggcttcgcgtgcaaattctatcaaacatttaaggaagaaataataccagtacttagcaatgtcttccaaaaaataacggaggaacactacttcattctatgcggccaatattaccctgatatcaaagccagagaaatatatcacaagatatatttgcctgtcagctccaaattcacccttttatcccgctgtgtgagaaggttctgtgttcctctgcctctgcccgctgtgcagttgatagtgaaggccacctgtagagagcaccagagtcagctaaggggagagctgcgcttcctggttctcccgctggcgccagcggtcctgctgagcgcaaaacttctcttccggactctggcgccccacacaggttcccagtgttaggctgggggagggcacgcgaaagcggtcagcttcccttccttccatccgccttgagcctttccggattggtgcttctggtgagacgcctccccatgagcatcactcccaagcacgcgagggggcacgtttcccataactcccaaacggcaagtttctacaaagttacaacagtggggaggcgccacaacttcactgccattttgtgaggtgctgccgcccctcctccggcaaggtcaggacttcaggactgtgagtggggcagtttttccctggatgctttaatttcgcccgggaaagtgtcctttttcctcagaaagtgtcttttctgaggtgttctctgtcgggtgtgtggtagggttccctgggaaagtggctccactctgaggacaccgccatgggagcctgtgtcaaccatgggggagcgttttccttgggcaccccatctcggctatgttgtgggtccggggggcttttcttgggggctccctcagtgatgtgaggggcttttcctgctgaaatgacctaagcccagggttggggaccctgccttggttgcctgtgtcagcctcgggtgtggccgtgtttcttccctgctcggtggcagccctgaggggggactctgccttgggagctctgtctatgttcaagggccggggtggtggtggctgtgccctggacacatgatcacagccctatggggtcactctctgtcgcgggctttatctcagcctgtgagggactcttccttgagtgctgttctcggctgtggggcacatttgtccttagatgttgctcgctctcagctaggatgtgttggcttttctttggttctgcttatccctgatggggacgcttaccagacgctttctcttggtgctgggtttttaaaattattatctgtgggtgctgtctcctggtgctgtgggggagtggggtgctgttccttggattctctgagcctgtggtgggactcggggaactcttgtgtcagccacgagggcacccagctgaccttgggagctctgtctcaccccagggttgggtgcttttccttggttggttctcagtcctgagggagctcttccctgggattctatctgacctttcagccatagcctcagatgtctgtgcaggaatcggggtccagaaatgtttgaaggttccagattcgccacatgcacaca

SEQ ID NO: 1456 - DNA, 6000 bp, Homo sapiens
catagccgagacggggtgcccaaggaaaacgctcccccgcggctgacacaggcgcccatggcggtgtccccagagctaagccacttccccaagggagccctcccacacaccggacagagaacaccacagaaaagactctttctgaggaaaaaggacactttccagggcgaaattaaagcatccagggaaaaactgcccactcacagtcctgaagtcctgaccttgctggaggagagacggcggcacctcacaaaatggcagtgaagttgtggcgcctccccactggtggcactttctagaaacctgccctctgggagttgtgggaaatgtgccccctagggcatctgggagtgatgtgcatggggagacgtctcaccagaagcaccgatcctgtttggcccaagggggatggaaggaagggaagtagccagccacagcgtgcctgtcccagccgaacactgggaacctgttgggggcgccagagtgctgaggagaagcctcgtgccccagagaaccaggaagcgcagccctccccttcgttgactctggcgccctctgcaggcgaccttcagtaacaactgcacagcaacataagcagaggaatgcagaaccttctcacccagcgggatgaaatcgcctgggtaacatagtgagaccccggctctacagagcaaccaaccaaccaaaaaaacacacacaaaaattagctgggcatggtggcgtgtacctgtggtcccaactactcgggaagttgaggtgggaggatcgcttgaacccgggaggtggaggtagcagtgagccaagatcgtgccagtgcactctccatcccagaccatacagaagactccatcaaaaaaaaaagaaagaaagaaaaagaagcaacaacaacaacaaactgaaattttcatttgagggggttgttttttaaagtcaaccccgaccgggcgcagtggctcacgcctgtaatgtcagcaccttgggaggccgaagtgtctggatcacctgaggtcaggagtccaagaccagcatggccaacatggtgaatcccgtctctactaaaaatacagaaaattagccaggtgtggtggcacgcacctgtagtcccgctaaggaaggagaccactactactcctgctgccctcctccccctaccttgcctagttcacaagacaggaggaaagaaagaaagcaaaaagttggaaaaaaaaaaagtaaaataaatagccagacaaccttggcaccaccacccggccctaggagttaaaaaaagtgataataatttcaacccctgacctaaactacttgtgttatctctaaattccagacactgtatgaaaaaaagcattgtaaaacttattgttctgttagctgctgcatgtagcccccagtcacatttcccacacttgctcaatttatcacgactctttcacgtggaccccttaaagttgtaagcctctaaaaaggccaagaatttctttttcggggaactcagctcttatgatgcaagttggctgatgctcccagccgaataaaccacttccttctttaatccagtgcctgaggagttttgtctgcggctcatcctgctacatttcttggtttcctgattaacggacagtcgaggcagccccttaggcagctcatgcctgccctgtagagcatccctgctgggaactctggccagcttgagcgatgcagatcctgagagcgctccggggtaggcatttgcccctgtggaacgccttgtcagagcagtgcacagcaggcccccgcggaggatcaacgcagtggctgaacaccaggaaggaactggcactttaagtctggacatctaaaacttggtaagactggtctttggaacttgccgactccatttgagtggaagcatggccagatcacccacggtgtacctgtaccagccctttggtttttgtttttgacttgacttgaattgcttgataattttagttttgattttgacttgacttgaattgcttgataaaaaggcgtgcctttattggcactttggtttaccttccatggaatggaagacattattaagagacattattgttaattctctcagaatgaacataccaatcatttaaaattccaccgtgttaacaaaattttttctgaaaattgacaaacagataattgttttaagtatgtgcaaatcgaaggtttggtaaagctaagacaatctttaagaaaaagaactaagttggtaaatacacactactaaatatgagatttactataaaggtagagtaattaaaaccgtgtggtattggagcaatgacaggtaaatacaccaagggcagaggacacagaggccagaaacaatctggaaatggaaaatagctagatttaccacaggagagctcctgtaaatcattgtggaaagactagtgcttttaataaatgcacttcataaatgcagggaaaatacaaactttgattcttaccccatcccactgcagaaaacattattaaagatagatagtgaatccagtaaaaaatataagatattagctttacagctttagaataggccaaggtgtttttgattaggataaaaaaggtctaaccataaagaatacattgtttaattagacataattaaatgtaaaacttctattcctcaaaagacactcttaagagagtggaaaagcaaagcatatatgtagattacatattatataatgtataggataggttatatataaaaatatacattaatcatatataaatatatatagtatatataatataatattttatatatatacatatatatgtatctgacaacaactgagtggaatccagagtatatccagaactacaaatcaattttaaaagcaaacatcgcaataaaatttggggggaaaagctgaatatgcatatcataagagtcatactcaaatatacctttagtaatcacataaaatatacccggactctgactttactccattccatgaaaatttatttgaggtgaataggagatctagaagaaaacttagaatattatcgtcatggcattgggggaggcaaagattttcacttaaaataataaagagctctagccataaacaagactgattaataagattaagagaatctgttcatctaaaacacattattgagatagtgtaaaagcaaaacagatttgtagaagacattaaaattgtatatgtattttaatacatgtacatatatgcctgtgtgcatgtgtgtacaactgaaacccagaatatatgtaaactacaaatccatttttaaaatacaaacatctcaataaaatttggcagaaaagacctcaaagggaacttcctaaaagacatggttaaatgaccaataaacacatgaaaaagtgctccgaaaaaaaaaaaaacaataaatagctgggcgcagtggctcacgcctgtaatcccagcactttgggaggccgaattgggcagatcacttgagtccaggagttcgagaccagcctgggcaatttggcaaaaccccatctctactaaaaaatacaaagattagccaggcttggtggcatgcgcttgtagtcccagctactgaggcacgagaatcgagcgagcctgggagcccaaaaaacaatcaaaaatcgataaatgaacacttttaaaaagggtgctcaatctcattaattagcacaaaattgcaagtgtagacataaggagagatcactacactcccaaagagtggctggaatgaaagaataattgcacagtgagttgtgtgcatgtggcgaatctggaaccttcaaacatttctggaccccgattcctgcacagacatctgaggctatggctgaaaggtcagatagaatcccagggaagagctccctcaggactgagaaccaaccaaggaaaagcacccaaccctggggtgagacagagctcccaaggtcagctgggtgccctcgtggctgacacaagagttccccgagtcccaccacaggctcagagaatccaaggaacagcaccccactcccccacagcaccaggagacagcacccacagataataattttaaaaacccagcaccaagagaaagcgtctggtaagcgtccccatcagggataagcagaaccaaagaaaagccaacacatcctagctgagagcgagcaacatctaaggacaaatgtgccccacagccgagaacagcactcaaggaagagtccctcacaggctgagataaagcccgcgacagagagtgaccccatagggctgtgatcatgtgtccagggcacagccaccaccaccccggcccttgaacatagacagagctcccaaggcagagtcccccctcagggctgccaccgagcagggaagaaacacggccacacccgaggctgacacaggcaaccaaggcagggtccccaaccctgggcttaggtcatttcagcaggaaaagcccctcacatcactgagggagcccccaagaaaagccccccggacccacaacatagccgagatggggtgcccaaggaaaacgctcccccatggttgacacaggctcccatggcggtgtcctcagagtggagccactttcccagggaaccctaccacacacccgacagagaacacctcagaaaagacactttctgaggaaaaaggacactttcccgggcgaaattaaagcatccagggaaaaactgccccactcacagtcctgaagtcctgaccttgccggaggaggggcggcagcacctcacaaaatggcagtgaagttgtggcgcctccccactgttgtaactttgtagaaacttgccgtttgggagttatgggaaacgtgccccctcgcgtgcttgggagtgatgctcatggggaggcgtctcaccagaagcaccaatccggaaaggctcaaggcggatggaaggaagggaagctgaccgctttcgcgtgccctcccccagcctaacactgggaacctgtgtggggcgccagagtccggaagagaagttttgcgctcagcaggaccgctggcgccagcgggagaaccaggaagcgcagctctccccttagctgactctggtgctctctacaggtggccttcactatcaactgcacagcgggcagaggcagaggaacacagaaccttctcacacagcgggataaaagggtgaatttggagctgacaggcaaatatatcttgtgatatatttctctggctttgatatcagggtaatattggccgcatagaatgaagtagtgttcctccgttattttttggaagacattgctaagtactggtattatttcttccttaaatgtttgatagaatttgcacgcgaagccatcttggcttggcttgtatttctggggagattttaaattactaattaaatctcttttcatgctatagtcctaagtcgattttctacttattatttatttatttatttattcatttattttgagacggagtttcactcttgttgttcgctcttgttgcccggggtggagtgcaatggcatgatcttggctcacccaacctccgcctcccgggttcaagtgattctcctgcctcagcctcccaaatagctgggattacaggcatgcgccaccacgcccagctaattttgtatttgtagtagagacggagtttctccatgtttgtcaggctggtctcaaactcccaacctcaggtgatccgcccgccttggcctcccaaagtgctgggattacaggcgtgagccactgcacccagcctgtttcttcttgagtcggtaatttgtcttccaagaattttttccattttacctaagttgtttagtttgttggcgtaaagttgttcataatgtattccttttaatttctgtaaggtcagtattaataacccccctttcatttttgattttgataatctgtgtagtcctttctatttttcttggtcagtcaagctaaaagattgttagattttttttttcaccttttcggtgaaccaacttttgatttcattgatttttctgtt

SEQ ID NO: 1457 - DNA, 6000 bp, Homo sapiens
aaaacacgtgtataaactcttgtataatcactgtgaccaattatattaaaataactaggcaagagaaaaactaacaactatctagtgcagcacactgcaggcaattaattctatattatggcaatacaaaagcctatacatgaagaatacaaaatacttaatataaaacattaattcataaaaatctttcagttacagaaagctgattttccagttctatatctggaactatgactttatttgcaccacgctttttctatatcatctaagaaactgaagcgttgagtctccttagagagagagaacaagagagggcaaaatttgaattttcaacaatcttattaagtgatattttgtgagaaggagaggtcttaagaatgttccttttttattttaagacatcaatattatttaaggtatttcaaccataagaatacatcaatttagtacattaataaacatgtaaaaatgtttccagcactttagtaagctggagagggcaaagacaggagggaggaagttgtgcctcttcattcctctctccgggccagaggtctctattgccctccaagtgaggtttctgtaaaaagcagtcccaggtgcacctggctaagaagggggatgggggaagtctatgtgggaagagatctggctcttggcagcattcatgcagtcctctcacaaatattctttccgaagctgtttctgttcctggctgtatatttgagtgctgagttagttcacccagtcgatgtgtgcacactcatctggtggctcaagaatcatgggaaattttcatgttcaagagaattttacagtctggatgcttgatgtgtaccagggcacggtttggagcctgaaacatggtggtagtgagtgccttggacttgtgctcttgccaaacggtggagtctaagccacccttagggcgttccaacccagagctgtcctgataaattttactggcccgagacaagtactccctatgagtacttgtcacagggagtacttgtgtctgcccccagcatattcacgttaagtggaaaggaacacttaagggccactcgagaaggggaaagaaaatgaggaaggcgacatgcagctgtgagcagggtgaatggagaaggaagtgctgatatgcattggcactggtgggagagcctcacaggcacctggaagctggttaaaatgagcattaagattctacatcttctatcaactgatactacatacctcttcctgactgcttctgttgtgagtcagtgctaagctgcttgtctccattccctttctccaaccagggaagcacctcccaaagtcactgctcagttctgggcaggacatttcctgtcttccagggtctcagagcacactcagagggaacaatagtggttgcctcgtctggtttcctccctgaatccctctgctgtggggttgtagggagaaaattagggcagcatctgcctaatcatctctggttccccactagacctgcctgggcccactgaagtcacaagggtccagcacatattaattattcagagcaagggcatgggcgggctttagagttagagaggttggcatgaaggtatagcaccatcaacctattgctttattaggtttagatatttacctcctgggtctctggctctaaaatgcccattcccatgtctggtccttgtgtatgagtcattgtgacagccctgccaatcacctggcccagtgtctgctacagaaagtgtgctctaggccgggcgcggtggctcacgcctgtaatcccagcattttggaaggccgaggcgggtggatcacctgaggtcaggagtttgagaccagcctgaccaacatggaaaaaccctgtctctactaaaaatataaaattagctgggcgtggtggcgcatgcctgtaatcccagctactcgggaggctgaagcaggagaatcgcttgaacccgggaggcggaggttgcagtgagtcgagattgtgccattgcactccagcctgggcaacacgagcaaaactctgtctaaaaaaaagaaaaagaaagaaagaaagtgtgctcccaggagtcgaaccctgagtactcttcctgtattagggcctggatatgaaaggtgaagctggacactacctctgtcccagtcaggcccatcctgtactctgaactgtaaatgggcatgatggccagagacctactttccacatttcacatccctcccctcaatccttacactgaatgtttacggagcagctagtaaacactgccaggtgctgaagataaaattaagagtgagagtggatccctgcctgccaacttctcaggtggcggagctcatagcacaggagaggccaaaagctcacattcctcctatctctttttttcactgcttatcctttcaccactgtgatcttccccgtgtccctgcttggggcttggccctgtttctctgctctttcccagcctcctacttccatggatgatcattcaattctatcctaaaggaccgaatcgaatttctttaaaaatctattcagccagttttattacatcagtcattgtttcacaatcgagactgatccatggtcagagataaaatacactgaacaattttttttcttttttttttttctttttgagatggtgttttgctcttattgcccaggctggagcacaatggcgtgatctcggctcaggcaacctctgcctcccaggttcaagtgattctcctgcctcagcctcccaagtagctgggattacaggcgcccaccaccacacctggctaattttgtattttttggaaagacagggtttctccatgttggtcagcctggtcttaactcctgacctcaggtggtctgcccccctcagcctcccaaagtgctgggattacaggcatgagccaccacgcccaaccttacatttaacaatttgaagagtattttttgactctttgtgcagcgacaacttctgattttcatctcagcatcttcactctgggatgattttactcgccaaacattaatgaagcctctactctgggccagaacttttctaggcattagggatagaccagatagcaaaagcagtgtttgacttatatattctaaaatggaagcagatgatgagcaaagtactgtatatacatacgacatggtggccggtagcacaataaatgttatgtagataaatgaagcagagtaaagggttacagattgggggcagagaacagggtgctctgataggtccggtggtcagaaaagttctctctgaaagcagtaggaggagtcaggcagccaactgggatgacagccttgcaaggcagaaggaatagaagatgcaaaggctatgaagccagaactgcttgatgggtgtgagaatcagcaaggaggacagtgattagagcacagcagaaactgggaagaggcacaggatagaaggaggggccttgtaggccttggctgcaactttgctctttattctcaggtgaaactgttggaggattttgagcaggagagtgaagggatctttttttttttcttttgaaatggagtctcgctctgtagcccaggctggagtgcagtggcgctatctcggctcactgcaacctctgcctccagggttcaagcaattcccctgcctcagcctcccgagtggctgggattacgggcatgcgccaccacgcccagctaattttttgtatttttagtagagacgggtttcagcctgttagccaggatggtctcgatctcctgacctcgtgatccgcccgcctcggcctcccaaagtgctgggattacaggcgtgagccaccgcgcccggccctaatttttgttttaaaggattcccgtggctactctatggagaatatactataggaagaaaagagtgaaagctaagtgattagttgcagcagtctgggtgagaaagaaaggctaggaatcagggtggcagtggcagaaatgacaagacgtgattgaattggcaatatatttgaaagcagagccaacaattcatgttggctctagaatcagggatccattcaaagtagaaaaacaaaattatttaaaaacacaaacatcttaacagttcatttttaagtacagaataatacccagtggccaacggcactaatagcaagacaagaaatagagaatcaaagatatgtgggatgcctgcaattgactattggatgctgattttgcagaacttttctatatcttgttacttaggttttgtgtgtgtgtgtgtgtgtgtgtgtgtgtataccatattatttccctactaaagaagtcactgtttaaatactacctttttcatgaaaggcaggaccccctgagggtcttcatgattctaaaaggaagtgtgactcccacagggcagccagcagtgtcaatacttctctgagtgagatttaaataagaaagaaaatgtgttaataaaacatcaagccaagagaatctagtggccacagacccacgaaggaacactgagttgtgcaagctacctaggtagaagggtggctaatcctttcagtttgaacaaatttaccttctctgagaccggactcagcgctcgccaagtcctctgctaacgcaggccccacaactaggagctaggggagcctatcccagcctttaactgcccgccgagagacctaccacaagccggtggttcagcgacccagcgcatccttttcctggccacgccctctttgtctacacccttcccatcccggccacgcccccacgccgccgcggcccccccactcccagcctagccacgcccctcccccgtcgcgccggcgcaccgtccgtccgaatggcctcgtgggcggagcttgcgtagcctcccggaccccggcgcacaccgccccccgccccccgcccctggccaccaagcgcctccgtggacacgcacttcctgcgaggcctccgtgcgcaccttggccgagccgaaccgagccgagtcctgtccttccaggccgttcgcaatggtggatgagttggtgctgctgctgcacgcgctcctgatgcggcaccgcgccctgagcatcgagaacagccagctcatggaacagctgcggctgctggtgtgcgagagggccagcctgctgcgccaggtacgtccgccgagctgcccggtgcccttccccgaaacgtttaatggcgagagctcccggctccccgagtttatcgtgcagacggcgtcttacatgctcgtgaacgagaaccgattctgcaacgacgccatgaaggtggcattcctaatcagcctcctcaccggggaagccgaggagtgggtggtgccctacatcgagatggatagccccatcctaggtgattaccgggccttcctcgatgagatgaaacagtgctttggctgggatgacgacgaagacgacgacgacgaagaagaggaggatgattattaggccctcgaccctcgggcctcgggggggagggccctgcacgccgccaccccctccccgcagccctcaccccgccaggagccactgctctcccccttgccctccggtccccttacctacccgcgcccgtctgctctctctcttcatttctccgtagtgcttgtctttgttccaggaatagcgctccagttacctgctgctggggtcggggctggagcctcactcactcggaagtgcttggaagtgtcatctaccctggccatccccgggatccctcccctgctaatctgaactgtgtcctgaaccccagctattggccaggcccctgttacaaactgcgcagaccacccatagccctgctgctgccacctgccctgctgccaggcttacatcttcccagagaactatgctgccacttcacatccactcaccacatcccacctacagactaccacctttcgagatcaggaccaacctggaaaatgccagagttggctatgccttttcagacattgatttggacagctcaccaacccctgaaggggccgttcagcctggttagttttctac

SEQ ID NO: 1458 - DNA, 6000 bp, Homo sapiens
cagagggcaaaagttgaggcttgggaacctctgcctagattcagaggatgtatggaaacgcctgaatgtccaggcagaagtctgctgcaggggcggagccctcctggggaacctctactagcgtagtgcagaagggaaatctggggttggagtccccactggggcactgcctagtggagctgtgagaagggggccaccatcctcaagacccccgaatcatagatccactgacaactcgcattatactcctggaaaagctgcagacattcaataccagcccaggaaagcagccgagggggctgtaccctgcagagccacaggagcggagctgcccaaggcctcaggagcccaccccttgcctcagtgtggcctggatgtaagacatggagccaaaggagattattttggagctttaagaattaatgacgattttctgctccgcccgcccacagatgtagtttcctccgcacgtgcgcaccttccctcctccccgcctgcagggtccatggcctccatggcgttttaggggcagcagtgcctgtggcagccttggcctttgcagcggtggcagcagcaccaggctctgcagtggcatccaccggcggcttaagccgtagcacttctcacagcattcagcagcagcattgctgtaaccgacaaagacaccttcgaattaagcacattcgttgattccagcaaagcactgcaccatgaccgagatgagcttcctgagcagcgaggtgttggtgggggcttgatgtccccccttgaccagtcaggtttggggactgaagaaagcctaggtctcttagatgactacctggaggtggccaagcacttcaaacctcatgggttctccagcgacaaggctaaggcagactcctccgagtggctggctgtggatgggttggtcagtgcctccaacgatggcaaggaggatgctttctttgggacagattggatgttggagaaaactgatctgaaggagttcgactttgatgccctgttgggtatagatgacctggaaaccatgccagacgagcttctggccacgttggatgactcgtgtgatctctttgcccccctagtccaggagactattaaggagcccccccagtccaggagactattaaggagccccccccagatggtgaacccgatttgccatctcccagaaagtttaacccgaccaggttgcccccttcaccttcttgcaacctcttcccctttccccaggggtccagtcctccactccagattattcctttagtctagagctgggcagtgaagtggatatctttgaaggagctaggaagccagactccactgcttacatttccaagatccctcactgcacaaaggaggaagacgccccctcagataatgatagtggcatctgtatgagcccagagtcctatctgggctctccctctacctccaggggctctccgagtaggagcccgccatctccaggtgtcctctgtggctctgcctgccccaaaccttatgaccctcctggagagaagatggtagcagcacaagtaaagggtgagaaactggataagaagctgaaaaaaaaatggagcaaaaccaaacagcaggaactaggtatcgccagaagaagagggtggagcaggaggtcctcactggtgagtgcaaagcggtggaaaagaagaacgaggctctgcaagagagggcggattccctggccgaggagatccagtacatgaaagattcgatagaagaggtctgcaaggcaagggggaagaaaagggtcctctagttgagggtagtcaggagcgtcaatgtgcttgtacataggagtctcgcgctgtagctgtgtgttcgaataaattattttgtagtggaaaaaaaaaaaaaaaagaattaatgactgtcctgttgggttttggacttgcatggggcctgtagcccctttgttttggccgatgtcccccttttggaaagggagtatttacccaatgcctgtacctcaattttatcttggaagtagctaacttgttttagattttacaggctcataggcagaagggacttgccttgtctcagttgagactttggactgtggatttttgagttaatgctgaaatgggttaagacttgggggactgttgagaggagattattgtattttgcaatgtgagaagtacatgagatttgggagggggcaggggtggaatgatatgatttggatttgtgtccccacccaaatctcatgttgaattgtaatccctagtgttggaggaggggactggtgggaggcgattggatcatgggggtcgatttcccccttgctattctcgtgatgttgagctctcacaagatgtggttgtttaaaagtgtatagcacctcccccttcactttctctttctccttctctggccatataagatgtgcctccttcctctttgccttccgctatgattgtaactttcctgaggcctccccagccatgcttcctgtagagcctgcagaactgtgagtcaattaaacctcttttctttataaattactcagtcttaggtagtcctttatagcaatgcgagaacggattagtaccgtcaatattgatgagaatgttgagctatgtgtatgtacgctgacacattatggtggaagcgaaaattggctcaaaccacttgggaaaacatggcattatctagtaaatttcgagatatgtattggctgtgatacagcaattccaaaaaaaaacttggacatgtgcttcaagagacctgtacaagcatgttcatagccaagggctggaaactatccaaatgcctgcccatcatcagcagaatggataaattagaggactataaaactctgccgtaatgtaataggtagtttccaagaaatccaatcacatacaatgtgaaaatgtgttactgtggggttaatgaaatgaatgaggcaagcccgctggaccatccaaatctgtcctgctcccggctggagtttgatgccatctagtggcagacgttgctctggctgaaatattgatggagatttccggtccagtggctggctgagacttccaggacagtggcagtatctccaggaatctctcaatcagttaggacttcctttcttgacttgatctgaggataataggccgggaaaataatggggacccggagaccctccctctgtcttcctgcttcctaagacagggtcacatgcactttactctcccttccctgacctgttgaaggtaagaactttagcctgcctctgtctgagaatggggagactgagcagaggacgacaggaaggatggcaatcactaaccgggttatgtctgattttcagctattccaggtgttaacaagttgtgttctctggtttttaaaattcatcatttaatgaaatatatgtaatgaaatacagcagtgaaaataataaactggaggtacacgcaagagcttgggtgaatttttcttttctgtaagtaaaaacatttttaactgatgtatgataactctgcatatttatgggatacatgtgatattctgatacatgcacacgcacacacgatgtaatgatcaagtcggggtatttaggatctccaccacctcaagcatttatcatttctttttttggggaacatttcctatcttttagctattttgaaatatacaataaataattacctatagtccctctacggtgctatcaaacactagaacttaatccttctatgcaactatatgtttgtccccattaacctccccaccctccccacctttcccagcgtctggtaaccatcattctgctctacctccaaaagatcaacgtttttagtttccacatgagtgccaatatgcttttcccaggtgcagaggctgctgattcctggatttggaaggtgggggagagtggtttggatttcagtacctcccccttcctcagggctaggccctgtctggtcacctcctgttgctacaggtgtgcctggcacagacattcagctcccggggccgtgccgccctcacccctgcatgcctctagaggtacctgtcccgtggatttgacccccttccagacacacaaatagatcaccactgagcagacacagggtcacctcccagctccctaccaggcaagagcgaccagggcagggactgatactgccgaacccaggagccaggcccgacccagcctcaggtccagcaggtcccgcctgtccacctgggccaggcctagagcccgggagcccctggctggtgggaggccacccgcaacccaccccacacgcagctccagctcccccaccaggcggggcgactaggacagggacagaacccgttgaacccaggagtgagatccggccccgggtcccgctgggccctcccgtccaccttggctggacctggcgcctgggagaccttggctggcgcgaggccacgcccaccagacatgcagttccagctaccccaccagctgggcgaccaggacagggacggaggctgctgagcccagttagaggcctgccccccggggtctgtcctgggcgctcccccaaggacggacagggcaggcagggtccgggacgatggccgcacagtcccggccccgtgttcccaggcccgtcttgctcctcgatgtgagggagacccgggggatgggacaggctgggccccgcagtgcctgactccctgcagggctcccgggacaggggtccggcggacagccggctgctcaggggtgaggggtccaagctggcattgcggccaccttccggcccgggctctcttggggaggggcggggttggtgagaaccggtcacgtgctccggggctcactcggggtctcccagggccggaagtagggcccctgtgcgcaggcgccctgaggatcccgggctgcccatctcacgccagggggcggaacttcctgcagcctctctgcctccgcatcctcgtgggccctgaccttctctctgagagccgggcagaggctccggagccatgcaggccgaaggccggggcacagggggttcgacgggcgatgctgatggcccaggaggccctggcattcctgatggcccagggggcaatgctggcggcccaggagaggcgggtgccacgggcggcagaggtccccggggcgcaggggcagcaagggcctcggggccgggaggaggcgccccgcggggtccgcatggcggcgcggcttcagggctgaatggatgctgcagatgcggggccagggggccggagagccgcctgcttgagttgtattctgttctgttctgttctgttctgacagttctggtggcgaggtgggggccgggagatggggagggcagggccaggtgggggaggaggcgggggagatgcgagtaagtggttgggtgggggtgggggtgggggttgggaggtggggatatgagaggccagctgcgaggaggggaggaggtaagggctgggaggtagagggggtgggggtgggggagaggggctgggtgattgggtgaggggcaccgggtcatgcggggaggggagcaggggccaggagatagggggacccaggtgtaggaggggatcaggaggtggggggaagggggcaagatgggagcgggtggcgggaggtggttgggatggagggtcgagtgatgaggagggggccgggtgatgccacagggggcagggtggggaggggtcttgtaagggcatggaggagtcagcttggggtgcagcaaaggaaagtggggaaccaagacagctgggtggggtgtgctactgggccagtgcctggggagacagcctgggggggatgggctgggcaatccggggtaggggggaggggtgggggagtgggggagggggaagctggcctggggtaagcagcaggccggagccacaggccaagtcctaggagaggatgccttaactgggcccccaccagctacctcgccatgcctttcgcgacacccatggaagcagagctggcccgcaggagcctggcccaggatg

SEQ ID NO: 1459 - DNA, 6000 bp, Homo sapiens; identical to SEQ ID NO: 1458

SEQ ID NO: 1460 - DNA, 6000 bp, Homo sapiens
ctcaaagggtcaacacagctgcctttcactgttctcaagtgatggcgggtgggcgctcagagaagaccaaaggctcaaggccaggacactaggccatccggggcttcccaacagacccccatcccgagtcccgcacaagagcctgcaatgacccccacagggcgaaacaagccgtgctcatcagccctggtaggtatggctgggccctccccctgggccatatgaggccagcctacatcatccccacttagaccgccccactcaggccaaattcctaggaaaggggccgggaatctgtgtagaccgggggagattgttctcatcatataggtgagagatgatgccgacctggcctagggagggtggagaggacacattgaaggaaactgactggacggaaggtgagatgacagagtgcgggaccatggaaacgcgtgtcgccaagacagagaatgaagcagagggaagccattccgggagtcgggggacaggcagtgaggtcagctgggggcaggttgggttggaagtacctacaggccatccaagctcacatgactgtgctggtttgaaactctggaattcaagcaaagagatccctgcttaactttaattcaatggccctctttgaatatagacatcctggccctgtcacctctgaagcttcaccattccagatgatgcctaatgtgatttcaaatacatttcatccattccaagcaagtcttctctgattcggaaacacaaagactgtctgccagcgtgtgtggaccaggaccggccctctggaggggaggggctgttatgggcctcggtaggttttgtgtttaagcacacatgtgttcttcatgagtacctccaaggtgcagaagaaaaaaaaaatctcactgtgtaatagtgacaaaatgctgatgaagcaaactatcaacagccctctggaggaataactttcaaggtaggatgaactgtgtgtgtggaatttggaaacaattgttttttggaagcggctgaaagccacagagatgaccgggagagccgggcgacatctgccccgtggtgtctagcgtgggccccgaggctcggtgacttcagagacttcatcacggcaccgtccgcctcattacatcaagaaaaggtgccaattagaacaagtttcagaggaaaaatatggcctccaatgaattgaacaggctaatttaaactttggcaaactggctcactccagagctaattagaaattttcctcaacagcaagtaatgaataactttcttaatcgctttctgcttataaatgtaatacatgttcactgcaaaagaagaggaaatatgggcaagttcggaagagaaaataaaaaaccaaccgttatctcaccgccaaggataacgacaatgaaaatgtggtgtatttctggataaatgagccaattcttgtctagtgcttacaacagtggcttgggacgtggtgaccacccaacaaatgttattggttattattattctcattgctagtaggcttagaaaagtcttttccaatgctatccctcccccagccccccacccccaacaggccccggtgtgtgatgttcccctccctgtgtccacattgttcaactcccacttacgagtgagaacatgcggtgtttggttttctgttcctgtgttaatttgctgaaaatgatggtttccagcttcatccatgtctctgcaaacgacatgaactcattctctttcatggctgcatatatttcatggtgtatatgtgccacagttttaaaatccagtctaacattgatgggcatttgggttggttccaagtctttgctattgtgaagagtgctgcaataaacatacatgtgcatgtgtctttatagtagaatgatttacaatcctttgggtatatacccagtaatgggattgctaggtcaacaagttgatgggtgcagcaaaccagcatggcacatgtatacctatgtaacaaacctgcacgttgtgcacatgtaccccagcacttaaggtataataatgaaaaaaaggaaagaaaagaaagaaagaaagaaaaggagagaaagaaagaaagaaagagagaaaagtcttttccattccaacaatcaaataaagttcatctaaattttcttccaatgtttttacttttattgtgtatatattaggtcaatacattctaaacacttcagatactatagaaatatttctctatatagcattcccccgtgcttctactgagatatgtatcggcagcctgagaagtcggcattcctttgtccacacccatccccgtgcatccgtttcatttcattcgctccacagtcagccgcacctcagagttgtccttcaaagggtgagagactaagacttttatccagtgactcttggccccatcggtggggggctgtgtccaagggtacaacttccccagagcttccaggcccaccctgtgcagggcgcaggagaaaaagcagatgtgttgtgagctgcaggagaggcgctggcacagggcacagaggtccccaccccagcagccgagaggcagaaggcacgtgcagggggcccagaggctcagcaggatctgagatgtgagaagatgtctacgaacacagaggcgcaggaggaggccggagatgacggtcactggaggggctctgagacgtgcacagaaaacaggacagagcttggcagcagcactcatttgtcgccctgccacacacagcctgtgttttctccttgacagcatctcagtaggacccaataatgccaacgcctggagatccctctggacaaccgtcttcatcctccacatctggtcctcccctacacctggggcctggacctgctaaggagctctttccagttttctagacacctgtggaatcccttcacccacccttacccatcggtgtggctgctctccagctcactctcgtcctgctctccccaactgcctcggctccggggggacgaggctttccctgggctgctgccttccctgcccccttcccagtccccagaagggtgccagcctcagaggcctccagagcagagccttgctcaccgcagcagctccagctggaggaggttccccctgcctcctgcaccctgaccccttcttagagcagcagaggcagaagcaggagcctgctttggaaaatgacatgtttttattgctatgtctgcagtggctttttagcacagtagaatgtccccgcaggcccgccaccctcacccagccccagccctgcagcctctgtctgggtgtcggggaagcctttcttggggtcactcagccgtctgaggactggatgtggcacagacatacataggttaaagctgctacacggaagactggagatgcgggaagtgcattcgctttaagcctagaggtggtagccgtgtccggggtcccttcctgggggtgtgcctgttaccgaaataccaagggtttggtctacgtcctgctgctggccgcacagaaagccaatgactgactgagacgaagagcattaccagggaagacggctttaattgggtgctgcagccggggagatgggagttaagtctcaaatccatccccctgactaaaactaggggtttatatagccaggaagaaatgcaccaatgtgtaggaaaacaggaactcgggagggcccagaaagcaatcctgatgaatttggggggtccagcatctcattgtctggatgtggttatctggtgagtttcagttctttgatattttgagaggcccgaaggtcatttcctgaggaaggaattcagataaaacaactgtaaggttcaagcttgaagaccagaagggtcagtttctatgtgtatcaaaaagaacagcctatgggacgattggatcggtttcatgcccaacccagggtacaggatgtgggaagcctgagccggcctggtgagcagcccagacacccgggatggagtattgcagcctctcgccccacagacttgtgaacagggcgtggggacagacacccagctcctagggccatgccacccccacccctgcccgcctctcgcagcacctttcctgtggatctgacccccttccagacacagaagtaagccagcacccagcagacacagggtcacctcccagctccctaccaggcaagagcgaccagggcagggactgatactgccgaacccaggagccaggcccgacccagcctcaggtccagcaggtcccgcctgtccacctgggccaggcctagagcccgggagcccctggctggtgggaggccacccgcaacccaccccacacgcagctccagctcccccaccaggcggggcgactaggacagggacagaacccgttgaacccaggagtgagatccggccccgggtcccgctgggccctcccgtccaccttggctggacctggcgcctgggagaccttggctggcgcgaggccacgcccaccagacatgcagttccagctaccccaccagctgggcgaccaggacagggacggaggctgctgagcccagttagaggcctgccccccggggtctgtcctgggcgctcccccaaggacggacagggcaggcagggtccgggacgatggccgcacagtcccggccccgtgttcccaggcccgtcttgctcctcgatgtgagggagacccgggggatgggacaggctgggccccgcagtgcctgactccctgcagggctcccgggacaggggtccggcggacagccggctgctcacgggtgaggggtccaagctggcattgcggccaccttccggcccgggctctcttggggaggggcggggttggtgagaaccggtcacgtgctccggggctcactcggggtctcccagggccggaagtagggcccctgtgcgcaggcgccctgaggatcccgggctgcccatctcacgccagggggcggaacttcctgcagcctctctgcctccgcatcctcgtgggccctgaccttctctctgagagccgggcagaggctccggagccatgcaggccgaaggccagggcacagggggttcgacgggcgatgctgatggcccaggaggccctggcattcctgatggcccagggggcaatgctggcggcccaggagaggcgggtgccacgggcggcagaggtccccggggcgcaggggcagcaagggcctcggggccgagaggaggcgccccgcggggtccgcatggcggtgccgcttctgcgcaggatggaaggtgcccctgcggggccaggaggccggacagccgcctgcttcagttgtatcctgttctgttctgttctaggaggttctggtggcgaggtgggggccgtgagacggagacaacagggtcaagaggtggggggcagggccaggaggtgggtgagggcagggccaggtgcggaaggtggggtttgggagatgggggtaaggggccgggtggggtgggggtgggggctgggagttggaggtcgaggggtggctcagaggaagggagtaggtaggggatgggaggtggagcgtgtgcacagttgggtgctgggcgatggggtgaggggcagggggacaggagacaggggttcttgggtgtgtgaagggatcaggagttggggggaagcgtgcaaggtgggagccggtggctggggtgtgggctggatgggggtggtgtcaagcgatggggagaggtcccggctgatgcggcagggggcatggtggggagggccttggaagggcacgcaggagtcagcttgaggtgcaacagaggaaagtggggaatcaagacagctgggtggggttgctgcaggacctgggccagtgcgtggggagacagcctgaggggatgagatgggcaccggccaaatcctaggagatggcaccttaactgggtccccaccaggcacatcacgatgcctttctcgtcgcccatggaagcggagctggtccgcaggatcctgtcccgggatgccgcacctctcccccgaccaggggcggttctgaaggacttcac

SEQ ID NO: 1461 - DNA, 6000 bp, Homo sapiens
ttgtgtaaaataattacactgttgtcgtggtatgtggcataaatggactgcacaaagaagacagggaatgaagctgtgttacaacagttttatattgtactggacttgagctagtatcatgaggcatatggtgatccctagagcaaccactaagaaagttgttttcttagtgttctaaaaagtacaaataaattaaaatggtatgctaaacgtatgtaatttaaaatcaaaaagggaagaataaaaaagacacaacaaagcaaggaaagtaaatccaactgtacgtgtaattatatgacatgtgaaaggtctctgtgccccaaacagacagggcagattatcagatagaaaaacaagatctaactgtatgctgtctgctagagaacaggaaaagacgcagcgtacaaacatcagctgtcataggagagcttgaatggctgtactcataccagacaaaacagatgttaagaaatattagaaaccagcctggccaacatggtgaaaccctgtctctagtaaaaatacaaaaatcacctgggtgtggtggtgcacacctgtaatcccagctactcgggaggctcaggtatgagaatcacttgaactcgtgagatggaggttgcagtgagccgagattgcgccactgcactccagcctgggtgacaaaccaagaccctgtctcaaaaaaaaaaaaaaagctagaaacaagaaggagcaaggacttcacagccagaaacaggccaatacagcaggaagatacagcaatgatacatgtgaatgcatctaaccacagagcccaaaatccatgaagcaaacaccgatcgaatggaaagaaatggatcatttattaattagaattggaaatggcagctgggcacggtggctcgggcctgtaaacccagcactttgaaaagcggaggcaggcggatcacgaggtcaggagattgagaccatcctggctaacatggtgaaaccctcgtctctactaaaaatacaaaaattagctgggagtacagggcgcacgcctgtaatcccagctactcgggaggctgaggcaggagaatcgctcgaacccgggaggcggaggttgcagtgagccgagatcgcgccaccgcactccagcctgggggacagatgaagactccgtctcaaagaaaataaaataaaaaaatgaaaaaaaaacttcacggattgaattacgtagaaagccagcttacaaatgtggacaaaaacgcgataagcaagcttctgtttagggggaatgatggcgtgtgcctcttcagggaccgcttggagcagttagaaaggaagcgggagcgggagcgcaagatgcgggagcagcagaaggagcagcgggagcagaaggagcgcgagcggcgggcggaggagcggcgcaaggagcgggaggcccgcagggaaggtaggcggcgcggtgggcagctgtgctcggcgggacgcgtgtctgctgccccctggtgctgggcacttgctgtcacaggcgggcgcttggttccggtgcttgcttttcgcccctgcctttttttttttttttggaggcagagttttgctcttgtcccccaggctggagtgcggtggcgcgatctcggctcactgcaccctctgccccccgggttcaagtgatcctcctgcctcagcctccggagtagcagggattacaggcacccgccaccatgttcagctatttttttatatttttagtagagacagggtttcaccgtgttagccagaatagtctcttgatctcttggcctcgtgatccacccacctcggcctcccacagtgctgcgattacaggcgtgagccaccgcggccggccagtacgagcttttatagtcacccacgtcctcaccttaatggagatctttatttcttcacccagcttccggtttctgtctcgcgtcctttccttacaccccacacaactccctggagcttattcttcaaggcaggtctaggtctagtagtaatgaactccctctgcttttgtttatctgagaatatcctcatttctccctcatctttgaaggaaagtttgctggatacgtggttcttggttgacaattttgttgttgttgttttgagacagagtcttcttctgttgcccaggctggagtgcagtggagcgatcatagctcactgcaacctcgaactcctgggcacaagtgatcttcccacctcagcctcccgcgtagctgggacctacaggcgtagcgtgtgccaccacacctggctcatttttcagtagaaacaaggtgtccctgtattgcccaggctggtcttgaattcctgggctcaaggaaccctcatgcctagctgacagtttttccttttcacttggactatttcagcccattgtcttctggcctccaaagtttctgatgagaaatctgatgatcttatagaggatcccttggatgctttaatctgatgacctaattgaggatcccttggatgctttgaagattctctttgccttaggctttcaactgtttaataatgggttttcctgtgggcctcttgacttcattctacctggagttcactgagcctctctaatgtttatatttacggttttcatccaatgtgggggttttgaggaattcttcagataccctctctgctcctctcctccctcctgggctcccacagatctgttggggtccccgaggccgctcagcactgctcccttttcttcagtctcttctgctttcttttcctcagacgatgtgattttattgtcttcaggctcaccgattatttcttctgcctgctcacatctgcctgtgagtttctgttgtgaatatttactttttagtgtctattgtgagcatgtacttattagctctggaatttctctctggtttcttgttggatcttctgtctctgttgatatttccgtcgtgttcacgcgtcattttcttgactttctccacatcttcctttcgttctctgaggaactgaaggtttaagacagttccctaaaatctttgtctgggacatctaccgtcaggtgattttcaggaaccgtgtctgttggcttctttttttcccctctgaatgggacatactgtcctgtttctttgtttctcttgtgtttttcttagtcaaaaaaatggacatttgattctcatgatgtgattcttcctggtccccactcaagggtgtgcacttgttgttttggttgtgctgggctgtgtctgtggggtcggcctgttgtggaaactcagggtcttcacgggtcttttctgagcctgagccttttcctggtcacgtgcagccactttttaacgttcccgtcaatacagatgtttttaatgttcttgtcctgaagtgtctgcctcctaaagggggaatagagagaaatgaagggggcaacgggggacgtggtgctcatgccctggaagtaccttcagcttgggggtggccgtggctgctgcctcttcatgcctctggggtgggacacgcagtcatcacactgacctcgggtgtgtgtgtccgtctgcccacctgggtccggcgagctgcatgcaggctgctgcctgccagcggggagtgaggtgggagccactaatgtgcgaagcggtgacgttgattaatgaatcacagtttactctccaagattccccctgaagttgcaaaccttcagtagactccagagcacctcagtagttgcacaggcctgatcctgtgatgcaagtgttgtctcggtggggagactgattcccagtgcttcctactccatctttccagaatcttctcccgccccttcctttttgaccagtgaagatcagtctagaaggtccacctgggtcctcgggctcacggcctccaggttggagctttttctccctgggcttcctgggagacctctggcctctgaccccgatgctgtcagcaccctgtgcacgctgtgggtgtgtctgccaggtgcgggtgtgggagacgaggcagctgtgccgggtggggccttttgaggaaggcagtgctgctagtgccatctccctctctgccctgcgcgccagtgtctgcacatcaccgaacgatgagagaggactacagcgacaaagtgaaagccagccactggagtcgcagcccgcctcggccgccgcgggagcggttcgagttgggagacggccggaagccaggtgaggccaggccggcgcctgcgcagaagccagcacagtgtgagtcttttctgggggatgtttggcataagtgtgtaggattcatttaaagcccagctaagtaaccgcttcagaagaaagtgagagatgtgctggctgaagtcctctcgtgtcgtgagagggaccgtgagtgtctgtgtgcggccaggacacaggacgtgtgtttatccgctgggacattcgccactggccccgttagagaagtggcttccagcgtctgtggatgagctggtttccgaccaagcaaagttaatcgttacgtgaaaggcactagttttggggtggtggtagcttgtttgtttaaaaacatttccccaaattcacctttatggtttatctcataagtaaaagaagagaaaatggaagaaagggacctgctgtccgacttacaggacatcagcgacagcgagaggaagaccagctcggccgagtcctcgtcaggtacctggaaccgcctggccaaggccttgaccactgctgcccaggaaggcccaggttcaccctctgctctgctgtctttctacagcggaatcaggctcaggttctgaggaagaagaggaggaggaggaagaggaggaggaggaagggagcaccagtgaagaatcagaggaggaggaggaggaagaggaagaggaggaggaggagaccggcagcaactctgaggaggcatcagagcagtctgccggtgaggcaccgcgacgactgtgtgaggtgttgtgacttcactatagtgttagaaaccgcagagaagtagctggcgggcgggggagttgaaactcccttctatctaggactctctcgggacacctccacatcgattctttttgtttgtttttttgagatggaatcttgatctgttgcccaggctggagtgcagtggcatgatctcggctcactgcaacctctgcctcccgggttcaagtgatcctcccgcctcagcctcccaagtagctgggagtacaggtgtgcgccaccacgcccggataatttttgtatttttagtcgagacggggtttcaccacgttggccaggatggtctcgaactcctgacctcaggtgatccacccgcctcggcctcccaaagcactgggattacaggcgtgagccaccgcgcccagcctccatatccattcttgggaacacttgttgcttagctgaagcggagcccgcatcctgcctgtggcagcactcgccccggtgctggtctgagcagacgcctcctttctcttgcagaagaagtaagtgaggaagaaatgagtgaagatgaagaacgagaaaatgaaaaccacctcttggttggtaagaacctccctggagacagagccccctccttgtctgtctccgagtgcagcagccctctcctaagacagccggtcctgcgcggcgtggggcacgccagggtctgggaggccgcctgattcgttggccgctccaggctgtgccggtggggcccgcattcctcagcgaggcacagtgctgaccaagggcgtcctgagtgcccagcagggccgaggagctgggaagcccaggaccagttccccacaggggaggcccgtcagatggtggctccgggcctgtccctgcagaacagaggcctggcccagcctccgacaggcagtgaggttatgtcctcagcctggtggacgtggatgtgggcttgtcccccacatgacacccgacgcctcctcccagctcagcatccgggctctgtctcagccgagcctgccagcactcttaggcctcggtgccctgtgtccaggggacgagagcccagcgccagcacctcccagcgggacac

SEQ ID NO: 1462 - DNA, 6000 bp, Homo sapiens
agcaaagctttgttctgtagtctttgtgaagagtggtttttgtattataaaactgataattatagtttattcagtatagaaaatttttaaaagatgaatattacaattctcttctgtgatagcagaattgtttttcttttttcttctttcttcataattagacgcttactgcagatagttttctattttcaaagttttttatttaacataaaatcatgattattcgactgggtgcagtggcccaggcctgtaatcccagcactttgggaggacaaggatggaggatcacttgagcccaggagttcaagaccagcttggccaatatagtgagaccctgtctcttcaaaaaaaaaaaaaaaaagattaggattacttaacatcattatttaaatatttaatgttcttgatttaatttcattttcatgtgattttttttttttttttttttttttttttttttttttttgagatggagtctcactttttcgcccaggctggagtgcagtggcacgatctcggctcaccgcaacctccacctcccaggttcaagtgattctacagcctcagcctcccttagtacctgggattacaggtgcctgccaccacgcccagctaatttttgtatttttagtagagacggggtttcaccatgttggccaggctggttttgaactcctgacctcaggtgatccacccgcctcggcctcccaaagtgctgggattacaggcgtaagccaccgtgcccggcctcgtgaaatttttgaagtgaggtttctttgcatgacactttatttctcattagggaagcatgctagagtgaaagaaagagagcacgaacgtcggaaacgacatcgagaagaacaggataaagctcgccgggaatgggaaagacagaagagaagggaaatggcaagggagcattccaggagagaaaggtgagtgggctgggtcagttgaggactttatgaaagggccgtggtagtgtgtcctgtcacagcaatgaagaagaatttggcaatagaagtcacatttgttgcagaagtggtagacatggaaacagcacagtgaacgctggacgaggctgaccaagagaactgtcctgagggagtgagttttcactgcatctggaagtaagaacgggtgtgatttgattgagggaagacaatgaagggatcagaaatctgcacgtcccgccgggcgcagtggctcacgctagaattccagcacttacgaggctgaggtggttggatcccttgagcctgggaggtcaaggctgcagtaagctatgaccatgctactgcactccagcctggttgacagagtgagactgtctcaaaaaaaggagaagggagatcccaaaaaccttgaaacagtctggaaatcgggacactggactcctaggactcctggccattagtctgtatattcgttcccctttatgagccagattcccaagaaagaacatcggtgtagccccagatctgttctgtgaaccaggaaaaaggctgtaggccaggtgcgagcaggcccatctccgccttcagagtgagtccacagaaagcttgcaagctgctccaggaagagaggagtctgaagcggaagggcgtgtgcagcgatgtttgccagcagccagggctgggtacacagcatgtaaagatgatgagagggcgctggttcttgttgatgccgaagggtgtgggagacactgaggcccaggggtcaaggtccgagaccgctgctgggtgagcaaggtttcagttggcctagttcctgttagtgtgtgaaacattcatgtatgccacgccctgtgccagacattgagtgtgtcttgtcccacgagagtagagcttgggatagaagtggaggttggtagatgaaatttgggctgtcatattgatttcccagaaggtaaagacaggagagtgaatgaacaaaaattgttgggggcagacttctgggtagggccgattcagatcagccaatccagaactgggtgtggtagcatatgctacgtgggaggctaaggccagaggaccgcatgacgccagcctgggcaacgtagagagaccttgtctctgacaaaaaggaaactgataaggataatctgagaagcactgatgcttggaaaactgctgagctgtgggtaaaagcagtaagaatctgaccttctggcctgagagctgctccctttactgcttccactctgcacttggaagcacggaggttccactgggacagggcagctgcaggacctgcagtttccttgctgccttggaaggggttactccgtttagagcagtgggcagtggccttgcccaccagcatcctcagtggagggaggaaaaggccaagaggtctgctagaatgaagtacagtgtggttgggagcagctgtgatcccgccaaagacgtgcagcagagactggagagagctcgagccgccacccacttgtgaccagccctgaggatgcagctgcgtgaaaggacctagcagaaaatagaagccgccacagatgcgaatgacgcctgaacgttcagtgtgctccctgtccacacacagccgtgggccaaggaagccttactgtgctcgaggtatttgagcccagcctttttccagtgctggctaattgctaagctgtgcagccatggtggtgacccctaggaagccaaggttgaaaattaaaataggcatgtgggaaggaacggggtggccatgagctatgagggagatggatttcacggacaaccagacaggccttggtggtaacaacgaaagggaaaacttagaatccagaattgctacaaatgtattatctaaaatacaaagaagtatgacagtgtgacccgtactgaggaagaacatcatcagtagaaactgtcttgagtgtccagatgttgaatttagtaaaggcttggaaacaacttgtggatggagcagtagaaattatccattctgaagaacagagagaaaaaaacaagaaaaatgcacagagcctcagaaacccgtggtacaacatctgctgtaccaaagcacgtcgaatgggggttccaggagagaggaaagatatttgttacaataatggttaaaaactttccaaattttaattaaaaaatatgcacattcaagagcacaggaagtttgaactagaataaatgcaaagtcacatcatagtcaaactggcaaaggccaaagagaaaatgttgaaagggctcagagaagaatgacccatcccatgaaaggggagcttcaataccgccagccactgacttcttagaaacaatggaggccagaaggcagtggagtggcatactcaagctgcttagagagaagaaccatcagccaggaatcaaaactgttctacacaagtgaaagggaacgaacgacattccctgagaagcagagactggtgggattcattgttggcgaaacctgccttaaaggaaatactaaaggaagaccttcaagttgaatagaaatgacaccagacggtaacttgaatcctcaggaaggaaggacaggcactgcagatagcaagtgtaggttgacgtcaatatcctgtaaatatctctcctcacatcttaggttttactggaactacgattgtgtaaaataattacactgttgtcgtggtatgtggcataaatggactgcacaaagaagacagggaatgaagctgtgttacaacagttttatattgtactggacttgagctagtatcatgaggcatatggtgatccctagagcaaccactaagaaagttgttttcttagtgttctaaaaagtacaaataaattaaaatggtatgctaaacgtatgtaatttaaaatcaaaaagggaagaataaaaaagacacaacaaagcaaggaaagtaaatccaactgtacgtgtaattatatgacatgtgaaaggtctctgtgccccaaacagacagggcagattatcagatagaaaaacaagatctaactgtatgctgtctgctagagaacaggaaaagacgcagcgtacaaacatcagctgtcataggagagcttgaatggctgtactcataccagacaaaacagatgttaagaaatattagaaaccagcctggccaacatggtgaaaccctgtctctagtaaaaatacaaaaatcacctgggtgtggtggtgcacacctgtaatcccagctactcgggaggctcaggtatgagaatcacttgaactcgtgagatggaggttgcagtgagccgagattgcgccactgcactccagcctgggtgacaaaccaagaccctgtctcaaaaaaaaaaaaaaagctagaaacaagaaggagcaaggacttcacagccagaaacaggccaatacagcaggaagatacagcaatgatacatgtgaatgcatctaaccacagagcccaaaatccatgaagcaaacaccgatcgaatggaaagaaatggatcatttattaattagaattggaaatggcagctgggcacggtggctcgggcctgtaaacccagcactttgaaaagcggaggcaggcggatcacgaggtcaggagattgagaccatcctggctaacatggtgaaaccctcgtctctactaaaaatacaaaaattagctgggagtacagggcgcacgcctgtaatcccagctactcgggaggctgaggcaggagaatcgctcgaacccgggaggcggaggttgcagtgagccgagatcgcgccaccgcactccagcctgggggacagatgaagactccgtctcaaagaaaataaaataaaaaaatgaaaaaaaaacttcacggattgaattacgtagaaagccagcttacaaatgtggacaaaaacgcgataagcaagcttctgtttagggggaatgatggcgtgtgcctcttcagggaccgcttggagcagttagaaaggaagcgggagcgggagcgcaagatgcgggagcagcagaaggagcagcgggagcagaaggagcgcgagcggcgggcggaggagcggcgcaaggagcgggaggcccgcagggaaggtaggcggcgcggtgggcagctgtgctcggcgggacgcgtgtctgctgccccctggtgctgggcacttgctgtcacaggcgggcgcttggttccggtgcttgcttttcgcccctgcctttttttttttttttggaggcagagttttgctcttgtcccccaggctggagtgcggtggcgcgatctcggctcactgcaccctctgccccccgggttcaagtgatcctcctgcctcagcctccggagtagcagggattacaggcacccgccaccatgttcagctatttttttatatttttagtagagacagggtttcaccgtgttagccagaatagtctcttgatctcttggcctcgtgatccacccacctcggcctcccacagtgctgcgattacaggcgtgagccaccgcggccggccagtacgagcttttatagtcacccacgtcctcaccttaatggagatctttatttcttcacccagcttccggtttctgtctcgcgtcctttccttacaccccacacaactccctggagcttattcttcaaggcaggtctaggtctagtagtaatgaactccctctgcttttgtttatctgagaatatcctcatttctccctcatctttgaaggaaagtttgctggatacgtggttcttggttgacaattttgttgttgttgttttgagacagagtcttcttctgttgcccaggctggagtgcagtggagcgatcatagctcactgcaacctcgaactcctgggcacaagtgatcttcccacctcagcctcccgcgtagctgggacctacaggcgtagcgtgtgccaccacacctggctcatttttcagtagaaacaaggtgtccctgtattgcccaggctggtcttgaattcctgggctcaaggaaccctcatgcctagctgacagtttttccttttcacttggactatttcagcccattgtcttctggcctccaaagtttctgatga

SEQ ID NO: 1463 - DNA, 6000 bp, Homo sapiens
actctttcctagggctactgtgacggggtgtgctgttttaactattgaggtttactcttccctagggttacgtgacggggtgtgctattgtaactattaaggtttactctttcctagggttactgtgacagtgtgctcagtgtgctgttgtaaatactgaagtgtactctttttttttttgagacggtgtctcaagagtcttgctcacccaggctggagtgcagtggcgccatctcggctcactgcaagctccgcctccctggttcacaccattctcctgcctcagcctcctggctaacacggtgaaaccccgtctctactaaaaatacaaaaaattagccaggatggtctcgatcttctgacctggtgatccgtccacctcggcctcccaaaatgctgggattacaggtgcgagccacgacctaggattactgtgacagggcatgctgttacaactattgaggtttactctttcctagggttactggtgaaagcctgtctctactacaaatacaaaaattagcctggcatggtggtgtacacctgtagtcccagctactcaggaggctgaggcaggagaattgcttgaatgtgggaggcaaaggttgcagtgagccaagattgtgcctctgtattctaccctgggggacatagcaagattctgtctgaaaaaaataataagtccgggtgcgatggctcatgcctgtaatcccagcactttgggaggctgaggcgggtggatcatgaggtcatgagtttcagatcagcctgaccaatatggtgaaaccccgtctctactaaaaatataaaaattagctgggtgtggtagcgcacgcctgtactcccagctactccggaggctgaggcaggagaattgctcgaacctgggacaggaggcagaggttgcagtgagccaagattgcgccgctggactccagcctgggcaacagagcgagactccatctcaaaaaaataaatacaggccgggcgtggcggctcacacctgtaatcccagcactttgggaggctgaggcgggcagatcacaaggtcaggagatcgagaccaccctggctaacacagtgaaactccgtctctactaaaaaatacaaaaaaaattagccgggcgtggtggtgggcgcctgtagtcccagttacttggaaggctgaggcaggagaatggcatgaacccaggaggtagagcttgtagtgagccgagagtctcgccactgccctccagcctgggcgacagagcaagactccaatctcaaataaaataaataaataaataaaattaaattaaataaataagatgtgatgtatttttacatgcccctgaaactgtcaccacagtcaagctaatgaacctgcccctcaccccctgcaggtcctctgagaggcatttcgttccatctgcacaaaacattgatttcttacatttttcatctgaatcttaagactcctaggccgggcgcggtggctcacgcctgtaatcccagcactttgggaagccgaggcaggcagatcaccaggttaggagattgagaccatcttggctaacacagtgaaaccccgtctctactaaaaatacaaaaattagctgggtgtggtggcgggtgcctgtagtcccagctactccggaggctgaggcaggagaatggtgtgaacccggaaaggtggaggttgcagtgatccgagatcgcgtgtctacactccagcctgggtgacagagcgagactccgtctaaaaaaaaaaaaaaaaaaagatgcctgaagttggagaattaatgtaattttttaaatgatgtttcagcttcgttcctatctgaatcatgcatttttctgggttgaaaaaacctcataatagcctgatgcttttccgcactttctcaagcatgacgcagtgctgttgtgttttatttcagaggagaagaagatgattctttggccatcaaaccaccccagcaaatgtctcggaaagaaaaagttcatcacagaaaagatgaaaagagaaaagaaaaatgtaggcatcatagccattcagcagaagggggtacagaagcatttactttctttgacatcatgttcaagtgtggtttctttcctgttcctactcttctgccttccccagagcaccactgaaaaaccagagaaagcaaactgtagctgaaagcataatggtgtcacagaccgttcagaagggctatagagagaatagctgaaagcatgcatgtgtcacagaccattcagaggggctatagagagcaaactctagctgaaagcatgtgtgcgtcacagaccgaaaaccagagagagcaaactagctgaaagcatgcgtgtgtcacaggccattcagaagggctatagagagagcaaactctagctgaaagcatgcgtgtgtcacagaccattcagaagggctatagagagaatactctagctgaaggccgggcgtggtggctcaagcctgtaatcccagcactttgggaggctgaggcgggtggatcacaaggtcaggagatcaagaccatcctggctaacacggtgaaacccagtctctactaaaaatacaaaaaattagccgggcgtggtggcgggcacctgtagtcccagctgctctggaggctgaggcaggagaatggcatgaacctgggaggcggagcttgcagtgagccgctatcgcaccactgcacactctagcctgggcgacagagcaagactccgtctcaaaaaaaaaaaaaagaatactctagctgaaagcatacgtgcgtcacagaccgttcagaatggctatagagagaatactctagctgaaagcgtgcgtgtgtcacagaccgaaaaccagagagagcaaactctagctgaaagcgtgcgtgtatcacagaccgaaaaccagagagagcaaactctagctgaaagcgtgcgtgtgtcacagaccattcagaagggctatggagagcaaactctagctaaaagcctgcgtgtgtcacagaccgaaaaccagagagagcaaactccagctgaaagcatgcgtgtgtcacagaccgttcagaggggctatagagagaatactctagctgaaagcatgcgtgtgtcacagaccgaaaaccagagagagcaaactccacctgaaagcatgcgtgtgtcacagaccattcagaagggctatagagagaataccctagctgaaagcatgcgtgtgtcacagaccgaaaaccagagagagcaaactctagctgaaagcatgcgtgtgtcacagaccgaaaaccagaaagagcaaactctagctgaaagcgtgcgtgtgtcacagaccattcagaagggctatagagagcaaactagctaaaagcatgcgtgtgtcacagaccgaaaaccagacagagcaaactccagctgaaagcatgcgtgtgtcacagaccattcagaagggctatagagagaatactctagctgaaagcatgcatgtgtcacagactgaaaaccagagagagcaaactctagctgaaagcatgcgtgtgtcacagaccgttcagaggggctatagagaggatactctagctgaaagcgtgcgtgtgtcacagaccgaaaaccagagagagcaaactctagctgaaagcatgcgtgtgtcacagaccgttcagaggggctatagagaggatactccagctgaaagtgtgcgtgtgtcacagaccgaaaaccagagagagcaaactctagctgaaagcatgcgtgtgtcacagaccgaaaaccagagagagcaaactctagctgaaagcgtgcgtgtgtcacagaccattcagaatggctagtccatttttcctctggggttttctctcccccattatattgtttgggagcagtttgtttacatttaaaatgacctgaattcaacaagtataggagaaaaacacaccccaaaatgggtatttgctcaagtccaaagaatgggttaggcttgagcagtttgatctcgtaccaacatcaggagattcttacgggtgttaggaaaattggacctggagcccgattgaaatctcattattataaatacgcttgattaattaatgtggcttcattgcacagtggagaagcccactgatagcaaagctttgttctgtagtctttgtgaagagtggtttttgtattataaaactgataattatagtttattcagtatagaaaatttttaaaagatgaatattacaattctcttctgtgatagcagaattgtttttcttttttcttctttcttcataattagacgcttactgcagatagttttctattttcaaagttttttatttaacataaaatcatgattattcgactgggtgcagtggcccaggcctgtaatcccagcactttgggaggacaaggatggaggatcacttgagcccaggagttcaagaccagcttggccaatatagtgagaccctgtctcttcaaaaaaaaaaaaaaaaagattaggattacttaacatcattatttaaatatttaatgttcttgatttaatttcattttcatgtgattttttttttttttttttttttttttttttttttttttgagatggagtctcactttttcgcccaggctggagtgcagtggcacgatctcggctcaccgcaacctccacctcccaggttcaagtgattctacagcctcagcctcccttagtacctgggattacaggtgcctgccaccacgcccagctaatttttgtatttttagtagagacggggtttcaccatgttggccaggctggttttgaactcctgacctcaggtgatccacccgcctcggcctcccaaagtgctgggattacaggcgtaagccaccgtgcccggcctcgtgaaatttttgaagtgaggtttctttgcatgacactttatttctcattagggaagcatgctagagtgaaagaaagagagcacgaacgtcggaaacgacatcgagaagaacaggataaagctcgccgggaatgggaaagacagaagagaagggaaatggcaagggagcattccaggagagaaaggtgagtgggctgggtcagttgaggactttatgaaagggccgtggtagtgtgtcctgtcacagcaatgaagaagaatttggcaatagaagtcacatttgttgcagaagtggtagacatggaaacagcacagtgaacgctggacgaggctgaccaagagaactgtcctgagggagtgagttttcactgcatctggaagtaagaacgggtgtgatttgattgagggaagacaatgaagggatcagaaatctgcacgtcccgccgggcgcagtggctcacgctagaattccagcacttacgaggctgaggtggttggatcccttgagcctgggaggtcaaggctgcagtaagctatgaccatgctactgcactccagcctggttgacagagtgagactgtctcaaaaaaaggagaagggagatcccaaaaaccttgaaacagtctggaaatcgggacactggactcctaggactcctggccattagtctgtatattcgttcccctttatgagccagattcccaagaaagaacatcggtgtagccccagatctgttctgtgaaccaggaaaaaggctgtaggccaggtgcgagcaggcccatctccgccttcagagtgagtccacagaaagcttgcaagctgctccaggaagagaggagtctgaagcggaagggcgtgtgcagcgatgtttgccagcagccagggctgggtacacagcatgtaaagatgatgagagggcgctggttcttgttgatgccgaagggtgtgggagacactgaggcccaggggtcaaggtccgagaccgctgctgggtgagcaaggtttcagttggcctagttcctgttagtgtgtgaaacattcatgtatgccacgccctgtgccagacattgagtgtgtcttgtcccacgagagtagagcttgggatagaagtggaggttggtagatgaaatttgggctgtcatattgatttccc

SEQ ID NO: 1464 - DNA, 6000 bp, Homo sapiens
actcgggaggctgaggcaggagaatcacttgaacctgggaggtggaagctgcagttacccaaaattgtgtcactctactccagcctgggtgacacagtgagacttatttctcaaaaaaaagggcagggtgctgtggctcacgcctgtaatcccagcactttgggaggccaaggcaggcagatcacgaggtcacgagatcaagaccatcctggctaacacagtgaaacccggtctcaactaaaaatacaaaaaattagccgggcatggtggcccagctactctggagcctaagatgggagaatggagtggaggcgggagaatggcgtgaacccaggaggcggagcttgcaatgagcggagatcccgccactgccctccagcctgggccagagcgagtctccctatcagaaaaaataaaaatagctaggcgcagtggctcacgcctgtaatcccagcactctgggaggccaaggcgggcgaatcacaaggtaaggagatcgagaccatcctggcgaacacagtgaaaccccgtctctactaaaaaaaatacaaaaaattagccaggcgcggtggcgggtgcctgtagtcccagctactcggcaggctgaggctcgcaggataatggcgttgaacccgggaggtggggcttgcagtgagccgagattgcgccactgcactccagcctgggcgacagagcaagactccgtctcaaaaaaaaataaaaataaaaaaatagggagatttccccagttaccaagaactcaggaagcaacattaagagcttgggggaggccaggcgcggtggctcacgcctgtaatcccagcactttgggaggcagaggcaggctgatcacgaggtcaggagattgagaccatcctggctaacacggtaaaaccccgtctctaccgaaaataaaaaaaaaattagccgggcatggtggcaggcgcctgtagtcacaggtactcaggagcctaatgcgggcgaatggagtggaggcgggagaatggcgtgaatccgggtggcggagcttccagtgacccgagatcgcgccactgcactccagcctgggcaacagagcgagactccgtctcaaaaaaataaaaataaaaaaagagcttgggtacacaaagcaagcagcatttcattccgggatgaaaagaattccgatacccatcgcccttcttgggcccttgtcagtttcttgccacatctttcattttcccatttcaggcccagtaaatgcggatgtttatcttccattgtttgtttcctgagattcagatgtctaaagcatttttctgtgacttttcaaggcaagaggaaaacctgacatatggaaagggaattaattgctcgttttatcctcttctcctgcaatgctctgaatccatgggtttggagtggggccctgggagttgggggaagcaccatacccagtgagtctgcactttgaggacccactgccagtgtcagcttcaaaatcacattgtaaaaggcccggcgcggtggctcacgcctgtaatcccagcactttaggaggacgaagcaggcggatcacttgaggtcaggagttcgagaccagcctggccaatatggcgaaacctcgtctctaccaaaaatataaaaattagccgggcgtggtggcgcgggcctgtggttccagctactcgggaggctgaggcaggaaaattccttgaacccgggaggaggctgcagtgagccaagaccacgccactgcactccaacctgggcggcagagcaaggctccgactcaaaagtaaatacatgaataaataaaataaaatcacatcgtaagagctctccctgctttgtttctgagtaaggttcagagttaaattccgagatcggcctttacaagacacacagacctgaggcgcctcacgaggtaaccagcaggtaaatggagcgcgctccacccacccgccactaggggtcccagcggtcaagggggtggaatgcgggcgtccatcgcgaaggcattctgctcgcaagccttggcacaggcgcgggcttcgctaccggaaaagtcccggtaggattccggaagccggccacgcgttccgcgcaggcgcaaactgctccaaaagtcggcgtcgctctgctcggcgccccggcccgcgccgaagtcggaagtgcagctcacggcgcagtttcttttggagtcctggacctgagcaagcgctgttttatgcgtcatcatcccgcgcagacacaggaagtgccgcacagagcgagcccctgtcgtcttgagttctgggccagaggtcggctattatatcatcattaggcgtcaacacaggaagtgaggatacttctggcgagcgccggttgctgtttcttctcaggctcagggaccggccgcggccccgtaggggtgagttccgactgggcggaccaggtgtgggagcgcgacgagaactgcgcaccgaggtctttcttccgagcaggcctcggagcggggcggacccgggcccgggggcgagcgacaccctcgcttccgcggacagtctcatcccgcacggaactttgggtggtggaggcggcgggtccaaacgctgtctggagccaacgtctgccaggctgaacctcaagtgtgcgggactgaacccgaggaaatagcccagtgcccgggtcaggtggccttgttcgcgagcacatctcggagcatctccccggtctcaaggtgcagctgtccagtgtgctagtggcttcacgtagtccaagcggtctttctagcagattctgacagtaaaagcagtgtttgatgagtggcaggtcctgagttaagagcctttaaacggatgatctttaatccgcgatcgatactatcacgtaggtgttgttattctggttgtacggaagactgaactgaggtgaattacgttacccaagaccatacaagaatgacagaaacgagacttgatttcaagcggtcatttttcagaacccatcactcttttttgtcgcccatgctgcagcgcagtggctgttcacaagcgcacttcagcctggaactcctgggctcaatcggtctcccatctcagcttgcagagtatatgggactacaggcgctcgccaccttgcctggcttacaacttatcattcttgtttttttttttttttttttttttttttttttttttgagacggggtcttgctggagtgcagtgacgcgacctcggctcaccggaacctccgcctttcggattcaagcgattctgctgcctcggcctcccgagtagctgggattacaggcacccgccaccacgcccagctaagttttgtatttttagtggagacagggttttcgccgtgttggccaggctggtcttgacctcccgaccttgtgatccacccgcctcagcctagagcttacctttttttttttttttttttaaccaagtcttactttgttatctaggctggagtgcagtggcgcagtcttggctcattgcagccttgacctctctgattcaagtgatcctcctgcctctagcagcctccttcctgtagctaggaatacaggcacgcgccaccacactgggctaacttttgtattttttgtagagacgaggttttgccatgttgcccgggctggtgttgaactccggaactccagcgatctgctcgcctcggcctcccaaagtgctagggttaccgtcttgagccactgcgccgggcacaacttcttattcttaatgaggatttattctgaatccctcaaaagtgactaggttcaagtgttcagcaccatagcttgctgtgtcctgatgtaggctgaattatttttctttttgcagtgttttaactcaaatgggtgatgaaaaggactcttggaaagtgaaaactttagatgaaattcttcaggaaaagaaacgaaggaaggaacaagaggagaaagcagagataaaacgcttaaaaaatgtaagccatatttttttaagtaagtggttttcttaaaggagatttaatttctttgccctcatttttccattagaacaacgcttcttcggtgaagttcttttgtacttccaaatgtcgcaggtgagcccaaaatgtattctaatattcagttgacattaaaggcagatttaacacactaaagctgtgtctagattgagcatacatggagaataaaatacgttgaatgttaagtcattagcaaaactggactaatttttctcggttcattattagtatattcataatactatctctaagtatttttaatatagtgggaacttgccttgaaattaatataaatattttacgtctttcttggtttgcatggtaatgtactcaggaaacctttttagtaatttggtaagaggcattggcaaagtacctcttttgctaagatttgtagcatcatttgggatgttagtgagtacaggcataccttgcacttcactttattatgcttcacagatattgaaatttttccaaattaaaggtttgtagcaactctgctttgagtatttttccaatagcatgtgctcactttgttagctttttttttgtttttgagacggaatctcgcactgtcgcccagggccaggttcacaccattctcctacctcagcttcctgagtagctgggactacaggggctcaccaacatgccaagctaattttttgtatttttagtagagatggggtctctccgtgttagccaggatggtcttaatgtcctgacctcgtgatccacccgcctcggcctcccaaagtgctgggattaacaagcgtgagccactgcacctggccaaaaattctttatattttataacactggctcattcagagtacatgtgaaagtttgttttgggatgttgcccaggtttgattatcattaaaaatacttttatctatgaagaaaaaaaaacttataaagaaaatgattaactttctctttgcttcttagtctgatgaccgggattccaagcgggattcccttgaggagggggagctgagagatcactgcatggagatcacaataaggaactccccgtatagaagagaagactcaatggaagacaggtgagcggatgtacagatgtgcaagacccaactgtacacagccctggcctggccagtccttcctagggtcactgtgacaactgtgtgctattgtaactattaaggtttactctttcctagagttaccgtgacagggcgtgttgtagctgttgtactactgagattactctttcctaaggttaccgtgacagggtgtgctgttgtaactattgaggtttactctttcctagggctactgtgacggggtgtgctgttttaactattgaggtttactcttccctagggttacgtgacggggtgtgctattgtaactattaaggtttactctttcctagggttactgtgacagtgtgctcagtgtgctgttgtaaatactgaagtgtactctttttttttttgagacggtgtctcaagagtcttgctcacccaggctggagtgcagtggcgccatctcggctcactgcaagctccgcctccctggttcacaccattctcctgcctcagcctcctggctaacacggtgaaaccccgtctctactaaaaatacaaaaaattagccaggatggtctcgatcttctgacctggtgatccgtccacctcggcctcccaaaatgctgggattacaggtgcgagccacgacctaggattactgtgacagggcatgctgttacaactattgaggtttactctttcctagggttactggtgaaagcctgtctctactacaaatacaaaaattagcctggcatggtggtgtacacctgtagtcccagctactcaggaggctgaggcaggagaattgcttgaatgtgggaggcaaaggttgcagtgagccaagattgtgcctctgtattctaccctgggggacatagcaagattctgtctgaaaaaaataataagtccgggtgcgatggctcatgcctgtaatcccagcactttggga

SEQ ID NO: 1465 - DNA, 6000 bp, Homo sapiens
tgtttgtggaccagaaacaaacgtttttccaaaggattagcaaataggttgatttcctgtgtaacgctgctctggggcctcttcctcatcctggcagaaggagcctggagcccatgaggcagccagcactgtgcccttgctcagtcgtgctgtcccctccctctccctcagtctcttctccatgcccaagtcagtttccagccgctggtcttcatggcattcccagcacagctggacaccaagaggcaaaacccaaggcctggcttggccgtgttaacgattgtacagacatttttttaaataactttgtgtaatacttttctagaatagtaagttcttgttgaactgtcacagatgagcttctaggaacacaccgggtgtggttacttccactgggtgtgtccatggtcgtggtctgtgcctttgtaaacaaacagaacacttgaaccaccttccgaattgggtcatcggcttctttacattgatacttagagatttgcagctctctaactttcaaggaaacttcccctactgaaaggcataaaaaggttaaaaaagaaaatccgagagtcccaattccctgtataacagcattaaaataatctgcctgcctggaaagatgagaacactgttgcacaacccaaaatgtgtttttaatttgtgaaaaattaccatggtgagtcagacagtcattttaaacagctgaacagagactatcatcagcaaatagagctcagctttgtagctgcctttaaaatccttgtcccaaatccggtgagctctgcttgctgccgccgcgctcctgggtgatcactcagacgggtcagtgggaataacgggccaacaagacagctttttacatgtgtccaaaggatggcctttcgaaggcctggaagtatttcactgttggaagaagtaaacaagaatgacattccagatggaaatagaattctctctcttgcctttgaccaacatggtactaaggggtttcttctttcccaatgtatgtacgtgccctgctgggggccttactttatagaatgagagcatctgagcttccctaatgaatctggctagttctgtgtctggctgaggatacaggagtgggacatccactctcggatccctcagagcacagaaaccttcagctttgctgtctctgaagtatttcctccagtttccctgcgggcccctatgtttgagtttgatggctgctggatcctcactcaacgaaaactcggttggaaactgttccgcctggcagtccttttttgttgttttccatctcatttcccttccatctgaaagtggcattcagctgacttgctcatttagactgttcacggagtctgaatctgccaacgtggtgttggaggctccaccttgaaaagggccacagtcagggcaactttccccatacaggaaaacttgaaaattacatcaacagtctacgtcacagccaaattatatttcctttataccaaacaaaactatggagaactaaaagtacatcacacaaaacgtttatagtgttttgcatgtgacctatttcagtatttatataactagattagtgctttctagcaaacggttctgttaattagcgagtcactgttgattctgctgtggtggtaagttgataccgtgtaactaatcccgtggatgcctcctggttatttttgtccaaacgaagcagccgtggtagtagctgtctatgattcttgctcagcaaagtaaaataaatgttaaatatggactgctttgttttcttccttgtggacctctggtgttcatgctactttgttcaccggtggggctggctattgctagcaaagaggctcttcacagaagtggctggacccaaagttctggttgggaaaggcctttgtggcagctcctatcaagcgcaagtgcgaggccaccccctcctcgtgggctctggggtcgattttgttagggtttgacatgagtggctgcatttgggtactcaacagatttcacaaaggaagggtaaactggagatttttggccgggcacggtggctcatgactataattccagcactttgggaggctggtgggcagatactttaggtcaggagttcaagaccagcctggccaacatggcaaaaccctgtcgctactaaaaatacaaaagttagccaggtgtggtggcgcacgcctataatcccagctactcgggaggctgaggcaggagaatcacttgtacccaggagacggaggctgcagttacccaaaattgtgccactgcactccagtctgggtgacacagcgagactttctctcaaaacagaaaaaaaaaggtgctgtggctcacgcctgtaatcccaaccctttgggaggccaaggcaggcagatcacaaggtcatgagatcaagaccatcctggctaacacagtgaaaccccgtctcaactaaaaacacaaaaaaattagccgggcgtagtggtgggcgcctgtagtcccagctactcgggaggctgaggcaggagaatcacttgaacctgggaggtggaagctgcagttacccaaaattgtgtcactctactccagcctgggtgacacagtgagacttatttctcaaaaaaaagggcagggtgctgtggctcacgcctgtaatcccagcactttgggaggccaaggcaggcagatcacgaggtcacgagatcaagaccatcctggctaacacagtgaaacccggtctcaactaaaaatacaaaaaattagccgggcatggtggcccagctactctggagcctaagatgggagaatggagtggaggcgggagaatggcgtgaacccaggaggcggagcttgcaatgagcggagatcccgccactgccctccagcctgggccagagcgagtctccctatcagaaaaaataaaaatagctaggcgcagtggctcacgcctgtaatcccagcactctgggaggccaaggcgggcgaatcacaaggtaaggagatcgagaccatcctggcgaacacagtgaaaccccgtctctactaaaaaaaatacaaaaaattagccaggcgcggtggcgggtgcctgtagtcccagctactcggcaggctgaggctcgcaggataatggcgttgaacccgggaggtggggcttgcagtgagccgagattgcgccactgcactccagcctgggcgacagagcaagactccgtctcaaaaaaaaataaaaataaaaaaatagggagatttccccagttaccaagaactcaggaagcaacattaagagcttgggggaggccaggcgcggtggctcacgcctgtaatcccagcactttgggaggcagaggcaggctgatcacgaggtcaggagattgagaccatcctggctaacacggtaaaaccccgtctctaccgaaaataaaaaaaaaattagccgggcatggtggcaggcgcctgtagtcacaggtactcaggagcctaatgcgggcgaatggagtggaggcgggagaatggcgtgaatccgggtggcggagcttccagtgacccgagatcgcgccactgcactccagcctgggcaacagagcgagactccgtctcaaaaaaataaaaataaaaaaagagcttgggtacacaaagcaagcagcatttcattccgggatgaaaagaattccgatacccatcgcccttcttgggcccttgtcagtttcttgccacatctttcattttcccatttcaggcccagtaaatgcggatgtttatcttccattgtttgtttcctgagattcagatgtctaaagcatttttctgtgacttttcaaggcaagaggaaaacctgacatatggaaagggaattaattgctcgttttatcctcttctcctgcaatgctctgaatccatgggtttggagtggggccctgggagttgggggaagcaccatacccagtgagtctgcactttgaggacccactgccagtgtcagcttcaaaatcacattgtaaaaggcccggcgcggtggctcacgcctgtaatcccagcactttaggaggacgaagcaggcggatcacttgaggtcaggagttcgagaccagcctggccaatatggcgaaacctcgtctctaccaaaaatataaaaattagccgggcgtggtggcgcgggcctgtggttccagctactcgggaggctgaggcaggaaaattccttgaacccgggaggaggctgcagtgagccaagaccacgccactgcactccaacctgggcggcagagcaaggctccgactcaaaagtaaatacatgaataaataaaataaaatcacatcgtaagagctctccctgctttgtttctgagtaaggttcagagttaaattccgagatcggcctttacaagacacacagacctgaggcgcctcacgaggtaaccagcaggtaaatggagcgcgctccacccacccgccactaggggtcccagcggtcaagggggtggaatgcgggcgtccatcgcgaaggcattctgctcgcaagccttggcacaggcgcgggcttcgctaccggaaaagtcccggtaggattccggaagccggccacgcgttccgcgcaggcgcaaactgctccaaaagtcggcgtcgctctgctcggcgccccggcccgcgccgaagtcggaagtgcagctcacggcgcagtttcttttggagtcctggacctgagcaagcgctgttttatgcgtcatcatcccgcgcagacacaggaagtgccgcacagagcgagcccctgtcgtcttgagttctgggccagaggtcggctattatatcatcattaggcgtcaacacaggaagtgaggatacttctggcgagcgccggttgctgtttcttctcaggctcagggaccggccgcggccccgtaggggtgagttccgactgggcggaccaggtgtgggagcgcgacgagaactgcgcaccgaggtctttcttccgagcaggcctcggagcggggcggacccgggcccgggggcgagcgacaccctcgcttccgcggacagtctcatcccgcacggaactttgggtggtggaggcggcgggtccaaacgctgtctggagccaacgtctgccaggctgaacctcaagtgtgcgggactgaacccgaggaaatagcccagtgcccgggtcaggtggccttgttcgcgagcacatctcggagcatctccccggtctcaaggtgcagctgtccagtgtgctagtggcttcacgtagtccaagcggtctttctagcagattctgacagtaaaagcagtgtttgatgagtggcaggtcctgagttaagagcctttaaacggatgatctttaatccgcgatcgatactatcacgtaggtgttgttattctggttgtacggaagactgaactgaggtgaattacgttacccaagaccatacaagaatgacagaaacgagacttgatttcaagcggtcatttttcagaacccatcactcttttttgtcgcccatgctgcagcgcagtggctgttcacaagcgcacttcagcctggaactcctgggctcaatcggtctcccatctcagcttgcagagtatatgggactacaggcgctcgccaccttgcctggcttacaacttatcattcttgtttttttttttttttttttttttttttttttttttgagacggggtcttgctggagtgcagtgacgcgacctcggctcaccggaacctccgcctttcggattcaagcgattctgctgcctcggcctcccgagtagctgggattacaggcacccgccaccacgcccagctaagttttgtatttttagtggagacagggttttcgccgtgttggccaggctggtcttgacctcccgaccttgtgatccacccgcctcagcctagagcttacctttttttttttttttttttaaccaagtcttactttgttatctaggctggagtgcagtggcgcagtcttggctcattgcagccttgacctctctgattcaagtgatcctcctgcc

SEQ ID NO: 1466 - DNA, 6000 bp, Homo sapiens
ctttttttttttttttttttagacggagtctcgctctgtcacccaggctggagtgtagacacgcgatctcggatcactgcaacctccacctttccgggttcacaccattctcctgcctcagcctccggagtagctgggactacaggcacccgccaccacacccagctaatttttgtatttttagtagagacggggtttcactgtgttagccaagatggtctcaatctcctaacctggtgatctgcctgcctcggcttcccaaagtgctgggattacaggcgtgagccaccgcgcccggcctaggagtcttaagattcagatgaaaaatgtaagaaatcaatgttttgtgcagatggaacgaaatgcctctcagaggacctgcagggggtgaggggcaggttcattagcttgactgtggtgacagtttcaggggcatgtaaaaatacatcacatcttatttatttaatttaattttatttatttatttattttatttgagattggagtcttgctctgtcgcccaggctggagggcagtggcgagactctcggctcactacaagctctacctcctgggttcatgccattctcctgcctcagccttccaagtaactgggactacaggcgcccaccaccacgcccggctaattttttttgtattttttagtagagacggagtttcactgtgttagccagggtggtctcgatctcctgaccttgtgatctgcccgcctcagcctcccaaagtgctgggattacaggtgtgagccgccacgcccggcctgtatttatttttttgagatggagtctcgctctgttgcccaggctggagtccagcggcgcaatcttggctcactgcaacctctgcctcctgtcccaggttcgagcaattctcctgcctcagcctccggagtagctgggagtacaggcgtgcgctaccacacccagctaatttttatatttttagtagagacggggtttcaccatattggtcaggctgatctgaaactcatgacctcatgatccacccgcctcagcctcccaaagtgctgggattacaggcatgagccatcgcacccggacttattatttttttcagacagaatcttgctatgtcccccagggtagaatacagaggcacaatcttggctcactgcaacctttgcctcccacattcaagcaattctcctgcctcagcctcctgagtagctgggactacaggtgtacaccaccatgccaggctaatttttgtatttgtagtagagacaggctttcaccagtaaccctaggaaagagtaaacctcaatagttgtaacagcatgccctgtcacagtaatcctaggtcgtggctcgcacctgtaatcccagcattttgggaggccgaggtggacggatcaccaggtcagaagatcgagaccatcctggctaattttttgtatttttagtagagacggggtttcaccgtgttagccaggaggctgaggcaggagaatggtgtgaaccagggaggcggagcttgcagtgagccgagatggcgccactgcactccagcctgggtgagcaagactcttgagacaccgtctcaaaaaaaaaaagagtacacttcagtatttacaacagcacactgagcacactgtcacagtaaccctaggaaagagtaaaccttaatagttacaatagcacaccccgtcacgtaaccctagggaagagtaaacctcaatagttaaaacagcacaccccgtcacagtagccctaggaaagagtaaacctcaatagttacaacagcacaccctgtcacggtaaccttaggaaagagtaatctcagtagtacaacagctacaacacgccctgtcacggtaactctaggaaagagtaaaccttaatagttacaatagcacacagttgtcacagtgaccctaggaaggactggccaggccagggctgtgtacagttgggtcttgcacatctgtacatccgctcacctgtcttccattgagtcttctcttctatacggggagttccttattgtgatctccatgcagtgatctctcagctccccctcctcaagggaatcccgcttggaatcccggtcatcagactaagaagcaaagagaaagttaatcattttctttataagtttttttttcttcatagataaaagtatttttaatgataatcaaacctgggcaacatcccaaaacaaactttcacatgtactctgaatgagccagtgttataaaatataaagaatttttggccaggtgcagtggctcacgcttgttaatcccagcactttgggaggccgaggcgggtggatcacgaggtcaggacattaagaccatcctggctaacacggagagaccccatctctactaaaaatacaaaaaattagcttggcatgttggtgagcccctgtagtcccagctactcaggaagctgaggtaggagaatggtgtgaacctggccctgggcgacagtgcgagattccgtctcaaaaacaaaaaaaaagctaacaaagtgagcacatgctattggaaaaatactcaaagcagagttgctacaaacctttaatttggaaaaatttcaatatctgtgaagcataataaagtgaagtgcaaggtatgcctgtactcactaacatcccaaatgatgctacaaatcttagcaaaagaggtactttgccaatgcctcttaccaaattactaaaaaggtttcctgagtacattaccatgcaaaccaagaaagacgtaaaatatttatattaatttcaaggcaagttcccactatattaaaaatacttagagatagtattatgaatatactaataatgaaccgagaaaaattagtccagttttgctaatgacttaacattcaacgtattttattctccatgtatgctcaatctagacacagctttagtgtgttaaatctgcctttaatgtcaactgaatattagaatacattttgggctcacctgcgacatttggaagtacaaaagaacttcaccgaagaagcgttgttctaatggaaaaatgagggcaaagaaattaaatctcctttaagaaaaccacttacttaaaaaaatatggcttacattttttaagcgttttatctctgctttctcctcttgttccttccttcgtttcttttcctgaagaatttcatctaaagttttcactttccaagagtccttttcatcacccatttgagttaaaacactgcaaaaagaaaaataattcagcctacatcaggacacagcaagctatggtgctgaacacttgaacctagtcacttttgagggattcagaataaatcctcattaagaataagaagttgtgcccggcgcagtggctcaagacggtaaccctagcactttgggaggccgaggcgagcagatcgctggagttccggagttcaacaccagcccgggcaacatggcaaaacctcgtctctacaaaaaatacaaaagttagcccagtgtggtggcgcgtgcctgtattcctagctacaggaaggaggctgctagaggcaggaggatcacttgaatcagagaggtcaaggctgcaatgagccaagactgcgccactgcactccagcctagataacaaagtaagacttggttaaaaaaaaaaaaaaaaaaaggtaagctctaggctgaggcgggtggatcacaaggtcgggaggtcaagaccagcctggccaacacggcgaaaaccctgtctccactaaaaatacaaaacttagctgggcgtggtggcgggtgcctgtaatcccagctactcgggaggccgaggcagcagaatcgcttgaatccgaaaggcggaggttccggtgagccgaggtcgcgtcactgcactccagcaagaccccgtctcaaaaaaaaaaaaaaaaaaaaaaaaaaaaaaaaaaacaagaatgataagttgtaagccaggcaaggtggcgagcgcctgtagtcccatatactctgcaagctgagatgggagaccgattgagcccaggagttccaggctgaagtgcgcttgtgaacagccactgcgctgcagcatgggcgacaaaaaagagtgatgggttctgaaaaatgaccgcttgaaatcaagtctcgtttctgtcattcttgtatggtcttgggtaacgtaattcacctcagttcagtcttccgtacaaccagaataacaacacctacgtgatagtatcgatcgcggattaaagatcatccgtttaaaggctcttaactcaggacctgccactcatcaaacactgcttttactgtcagaatctgctagaaagaccgcttggactacgtgaagccactagcacactggacagctgcaccttgagaccggggagatgctccgagatgtgctcgcgaacaaggccacctgacccgggcactgggctatttcctcgggttcagtcccgcacacttgaggttcagcctggcagacgttggctccagacagcgtttggacccgccgcctccaccacccaaagttccgtgcgggatgagactgtccgcggaagcgagggtgtcgctcgcccccgggcccgggtccgccccgctccgaggcctgctcggaagaaagacctcggtgcgcagttctcgtcgcgctcccacacctggtccgcccagtcggaactcacccctacggggccgcggccggtccctgagcctgagaagaaacagcaaccggcgctcgccagaagtatcctcacttcctgtgttgacgcctaatgatgatataatagccgacctctggcccagaactcaagacgacaggggctcgctctgtgcggcacttcctgtgtctgcgcgggatgatgacgcataaaacagcgcttgctcaggtccaggactccaaaagaaactgcgccgtgagctgcacttccgacttcggcgcgggccggggcgccgagcagagcgacgccgacttttggagcagtttgcgcctgcgcggaacgcgtggccggcttccggaatcctaccgggacttttccggtagcgaagcccgcgcctgtgccaaggcttgcgagcagaatgccttcgcgatggacgcccgcattccacccccttgaccgctgggacccctagtggcgggtgggtggagcgcgctccatttacctgctggttacctcgtgaggcgcctcaggtctgtgtgtcttgtaaaggccgatctcggaatttaactctgaaccttactcagaaacaaagcagggagagctcttacgatgtgattttattttatttattcatgtatttacttttgagtcggagccttgctctgccgcccaggttggagtgcagtggcgtggtcttggctcactgcagcctcctcccgggttcaaggaattttcctgcctcagcctcccgagtagctggaaccacaggcccgcgccaccacgcccggctaatttttatatttttggtagagacgaggtttcgccatattggccaggctggtctcgaactcctgacctcaagtgatccgcctgcttcgtcctcctaaagtgctgggattacaggcgtgagccaccgcgccgggccttttacaatgtgattttgaagctgacactggcagtgggtcctcaaagtgcagactcactgggtatggtgcttcccccaactcccagggccccactccaaacccatggattcagagcattgcaggagaagaggataaaacgagcaattaattccctttccatatgtcaggttttcctcttgccttgaaaagtcacagaaaaatgctttagacatctgaatctcaggaaacaaacaatggaagataaacatccgcatttactgggcctgaaatgggaaaatgaaagatgtggcaagaaactgacaagggcccaagaagggcgatgggtatcggaattcttttcatcccggaatgaaatgctgcttgctttgtgtacccaagctctttttttatttttatttttttgagacggagtctcgctctgttgcccaggctggagtgcagtggcgcgatctcgg

SEQ ID NO: 1467 - DNA, 6000 bp, Homo sapiens
cagagggctgttgtgcggattcaccgctgtgcagagagtgcttcggaccctccagcagcacagtcagggctgtgtcagtgttactaattgtcgctgtttgtctactgataatgagatcagaatccagtttttctttttgcctggcagcatggacaactgtcctggtatcatagactgaataaagtttccttcttcagcaattcgtggtgcctccattctgcgtacaccagacctgtttgtttttttttttttttttaagacagtctcgctctgtcacccaggttggagtgcagtggtgcaatctcagcttactaaagcctccgtctcccaggttcaagcgatcctcgtgcctcagcctcctgtgtacttaggactactggcacccaccaccatgtccagctaatttttgtatttagtaggatttcgccatcttggcaaggctggtctcaaactcctgacctcaggtgatacgcccgcctctgcctcccaaagtgctgggattacaggcgtgagctactgcacctggcctacgtatgtttattctgttttgcttttttttttttttttttgagagagggtcttgctcagtcgcccagggtggagtgcaaaggcgcgatgttggctcactgaaagctccgcctcctgggttcacgccattctcctgtctcagcctcagcgtcccgagtagctgggactacaggtgcccgccaccacgcccagctaatttttttgtatttttggtagagacggggtttcactgtgttagccaggatggtctcaatctcctgacctcgtgatgcgcccacctcggcctcccaaagtgctgggattacaggcttgagccaccgcgcccgacctcgaggtccttattcttttgcatttgtttactcgcccagccctgcaccaaggtctcagactgaactagaagtcctcatgtcttgggaggacggctgccaccccctccctgcgcctccgtctccttgcaggacgtgtttgtcttctactcatcgtgcgtgcatagctttctctctgattcacacatgctttgtgcgtgcatagctttccctctgtgattgacatgtgcctcatagggctggatctatctcgagactacatagcctcttgtttctaagctttatttttttctgggacagagtttcgctctgccgcccaggctggagtgcaatggcgcgatctctgctcactgcagcctccgcctcctgggttcaagcgattctcctggctcagcctcctgagtagctgggattacaggcacgcgccatcatgcccggctaattttttgtagtagaaatggggtttgactgtgttggccaggaggatctcgatgtcctgaccttgtgatccgcccacctcagcctcccgaagtgctgggatcacaggcgtgagtcaccgtgcccagcctctttttttcatttttatttttattttttcactacaaggctgccttgaaggacttcctttcgtgtttgcatctcgcttcactcacatgatgaaatctggctctcgtcatgtacaaaatgtttatgtgtttgcccaatccagaattctaacccatgagtcagccaaaaaaaaaaaagaaaagggaggctgggcacagtggctgatgcctgtaaatcccagcactttgggaagccgaggtgggcagatcacgaggtcaggagttcgagaccagcctggccaacatggcgaaaacccgtctctactaaaaatacaaaatcagcagggtttggtggcacgtgcatgtaatccccactacctgggaggctgaggcaggagaatcgcttgaacctgggaggcggaggttgtggtgagccaagatcgtgccattgcactgcagcctgggcaacaagagtgaaactccatctaaaaaatgaaataaaaatacaaaaattcactgggcatggtggcgggtgcctgtaatcccagctactcaggaggctgaggcaggagaatcacttgaacccgggaggtagaggttgcagtgagctgagattgcgccattgcactccagcctgggcgacagagactctgtctcaaaaaaataaaagaccaggcacggaggctcacgcctgtaatcccagcactttgggagtccaaggaggtcggatcatgaggtcaggagatcgagatcatcctggctagcactgtgaaaccccgtctctactaaaaatacaaaaaattagccgggcgtggtgacgggcacctgtagtcccagctactcaggagcctgaggcaggagattggcgagaacccgcgaggcggagcttgcagtgagccgagatcgcgccactgtacttcaggctaggcgacacagcgagactcccgtctcaaaaaaaaagaaagtagcatggaattagtcctgggcacccggcagcggcagccacaaagcccatcgagaaggtgcagctgccaggcagggcgtgaaggacccacagccccaggtctgccaggacgacagtcaagtgtgccaggagaccgtctctcaagagcaaggatccgccaacacgcgcagagaaaaacgggattcaattgctaaaaatctttggacagtgaacgattgcattttctttttttcttttcttgagacagagtctcactctgtcactgaggctggagtgcagtggtatcatgtcggctcactgcaacctccgtctcctgggttcaagcaattcttctgcctcagcctcccgagtagctgggattacaggcgccggccaccatgccctgctagtttttatatttttagtagagacggggtttcgtcatgttggccagggtggtctcgaactcctgacctaaggtgatccacctgcctcggcctcccaaagtgctgggattacaggtgtgagccaccgtgcccggcccaattgcattttcaaagtgattttaaattggtggttgaaacctttgaggacattaaatgttcaaaacgggtgatgtgtttccttttcttaatattttagcgtctgcttctacgctttgcctgggagaggccctggtggcctcgttcctggcgcccggagtccctgctgcggccccacccccgggcggtcacggtgacccatgctgcccagcctggaggtaaaatcgttcgtggctgtggcttcagcatgtcgtcctcggtgaaaaccccagcactggaagagctggttcctggctccgaagagaagccgaaaggcaggtcgcctctcagctggggctctctgtttggtcaccgaagtgagaagattgtttttgccaagagcgacggcggcacagatgagaacgtactgaccgtcaccatcacggagaccacggtcatcgagtcagacttgggtgtgtggagctcgcgggcgctgctctacctcacgctgtggttcttcttcagcttctgcacgctcttcctcaacaagtacatcctgtccctgctgggaggcgagcccagcatgctaggtaggcggcggctcgggcagggtggaagccggccacctgccaccccacagggagcagccagcaaccacccgggagggccgggggagcccaggtcaggatgggagaccgggggtggagcccactgcaggcacgggaggggtgattctccctcttgtcttcggccccctccctcccgcaggtgcggtgcagatgctgtccaccacggttatcgggtgtgtgaaaaccctcgttccttgctgtttatatcagcacaaggcccggctttcctacccacccaacttccttatgacgatgctgtttgtgggtctgatgaggtaaagaatctcctggttttggttgagtgtctctttttctttaaatgtaaagtccctctcgttactagagcggggactctgctggctggtgagttttcagtgcagactttataaaagcaccagggctgtccagatttcaggacaccaaatgaatgtggcttcgtggctctcactgccacgtgtgttcagtcagcttctttccgggctggtggtctcaggacagggtgcctccttgtctctgggacgttttcaaggggtggcagaagtcacttcccattggacgcagtgccgtttcctgggggctcgacctaaagcgtcacagaagcgggtccaggcaccatgttggtgatgaggaggtgggcggagaggggccgacgtgccaaccgagcgagcgagccccttggagagcctgcccggtgggtgcaggcagacagactcgttctaaggtgatggtgcttttggctcatttttaggtttgcaactgtggttttgggtttggtcagcctgaaaaatgtggcggtttcgtttgctgagacggtgaagagctccgcccccatcttcacggtgatcatgtctcggatgattctgggggagtacacaggtgaggccccctgggccccacccctccgcctgcgccccaccatcccaggcctccatccgtggtgcccgtctctgctgcctgccatggggctctgccgcgaggaccactcagagtggtgcccacactggcagtgccttcacttctctcacggtcacatgtgcgggggtgtcttggagcctggcgtctgccaggtgttctcacactggcatgcggaggtcagggcagggttgtgtctcgtggccctaactgggtggggagacaggtgggggctgggcagattcctggcaagcaagattactgcaggtgccaatcactgatccgaagaggacgggcgggggccgccttcggccagcaccatacaggcggccgtggcccctggtccgtgggccctcctgtgccagcaccccacagcctccccagcacccgccaccacaggcctgtcctgggccccagcccctgacctcagctgcaacccaggctcctgcctctcccacctcttaatgactcacaggcgatttccagtgacatgtcagccccatgtcgcgtacccagtgtggctgcatgaaaaccagcgaggagcagaggcgcccacagagcgcggcatcttgaacggagtgtgggggtgcacacgtgttcgcttatttaagaaacgacaagatcttaaggccgagggaagtgtctgtctgcctttggggacgggaggaggccgagggtccaggatggggttgggcttgccccacatgcacttgagacccgcacacacgtttaggtgattataacaaaatcaaagcctaaaagtcaactctggtttttttttgttttttttcttttgttttttttatgtttttgagacagggtcttgctctgtcgcccaggctgcagtgcagtggcgaggtcacgactcactgcaacctcggcctcccaggcttaggcaatcctcccacctcagcctgttgggtagctgggacctcaggcatgtgccaccatgcccagctaatttttgtattttgtgtgtctttttgttttttcactgtgagtatacgttagtcatttttcttaacaattgaaactgggaactctggggattcagaattaacagccttggctgtgagcttcttatcgataccagaaaaagtttggaccttgcgttccacgttgttctgctgggctttgtccgaatgaacccttgtgagctgctgtgtccatttcacgcggattctcctgcccacaatttcacctgggaagaccgagtcctcgaggattgcgacgtgcgcagctgtcggagcgtggatcctgggacgcttttgcttattttttgtacaccttttttgagttggtttaggcagaattttcctctaagcaatagacgacatacttaccagtgaactttttctccaattcacgtactagccagacttggatgttctggaattatttcagtggcagaagaagaacaaagattatgataacttccttttttttttttttctttctttctttcttttttttttttttttttgagacagagtgtcgccttgtcgcccaggctggagttcagtggctcagtattggctcactgcaacctctgcctcccaggtgcaaacgattctcctgcctcagactcccaagtag

SEQ ID NO: 1468 - DNA, 6000 bp, Homo sapiens
tttgagaccagcctgaccaacacggtgaaaccgtgtctctactagaaatacaaaaattagccgggtatggtggcacacacctataatcccagctactcaaaaggctgaggcacaagaattgcttgaacctgggaggcagaggtggcagtgagctgagatcctgccactgcactccagcctgggcaacagagcgagactctgtctcaagaaaaaacaaaacaaacaaacaaacaaacaaacccagctcagaattccttggggagatggatttgaaggtctcctcctgttacagtagatagctagtcaggcatgagcagagcaggagaggcccccaccccctaaccccaggaatgtcaagcaaccattgggtgatggtcaggcagttgttaagctatctcgctaaaataataattgattgcagctggtgccagagaaaggcagtctcccaaaagatagaaacacctgaaactggtgatcagcagcttcccataagatctcaggagctgggcgagtaggctcaagcatgggcactaagaggcaaaatcgcagatgatcactaacaggcaaaatcgccgatgatcttcctctaggaacactggactggtaagggaaacacatcttgagtgagcatgcccacaactccagtaaacacactgcacatgcgcccctacccaagtgctgacaggccaccatgcatgtggacagcccaccccaagggaagaatcaggggagaagggatgcaagaccctggaagtatgccaaccccgagtcaaggtcaaacagcgcacttgatctctcaggtcaactgcttggttctcttccaagtgtcctttacttcctttcattcctgctctaaagctctttaataaacttcgctcctgttctaaaacttgcctcagtctctcactctgccttatgcccctcagttgaattctttcttctgaggaggcaagaactgagcttgctgcagaccatgtaaattcagcgctggtaacactcccatctcctcagttggctgccctgcgatcactaaactctttctctgctgcagactctgctgtctcattgcattggtcaactgttgctgtgcagcaggcatagaatcctgttggaactacaagagaaagatctacaagatgcagtaaaattttaaaaatgcaaaatagtgcgtatagtataacaaaaggggaaaataaaaatatatgtatgggctgggcatggtggctcgtgcctgtaatcctagcattttgggaggctgaggcaagcggatcaactgaggtcaggagtttgagaccagcttggccaatgtggtgaaaccttgtctctactaaaaataaaaaaattagccacgcatgatggcacagacatgtaatcccagctattggggaagctgaggcaggagaatcactttaacctgggaggcagaggttgcagtgagccaagatcatgccactgcactccagcctgggcgacagagtgagactctgtctcaaaaaaaaaaaaaaaaaaaaaaaggaatatacatacgtatatatttgcttgtttttgcagacagaaaatctagggatgcataagaaactgagaaaatacatagtcaaggggcaagggtggagcaagacttttcatgataaatgtaacttgtttattttgagatttgaatagcgactatattgcatattagaagcttttaatgataaaaatatagatgttgggccaggcacaatggctcacgcctgtaatcccagcactttgggaggctgaagcaggcggatcacctgaggtcaggagttcaagaccagcctggccaacatggcgaaaccctgtctctactaaaaatacaaaaattagctgggtgtggtggcaggtgcctgtaatcccagctactcaggaggctgaggcacgagaatcacttgaacccaggaggcggtggttgtagtgagccgagattgcgccactgcactcctgcctgggtaccagaacgagactccatctaaaaaaaaaaaaaaaaaaaaaaattgaacatcagtgaaaatgtaaaatttagaggaatacttatctcacaggagcaatgaaaagaggctaaatctaaagtagccattattactcgagaggctgaggcaagagaatcgcttaaacctgggaggcagaggttgcagtgaggtgagatggctcccctgcactccagcctgggtgacagagtaagattctgtctcaaaaaaaaggagcaattatatatatatatatatttatatatatatatatataattttttttttttgagacagtgtctcactctgtcaactcaggatggaatgcagtggtgcagtggtgagatcacagctcactgcagccttgacctcctgggctcaagtgatcctcccacctcaacctcttaagtagctgggaccacaggtgcatgccaccacaccaactaattttttgcattttttgtagagatgaggtttcaccatgttgcccaggtgggctcaaacaatccacctgcctcagcctcccaaagtgttgggtcactgtgcctggccaatatcatagatattaacaataacaacaacaacaacaaaaaccctgccaaacaaagcattttgttagccacggaatattgacatctttatttgtttatttatttatttatttgagatggagtctcactatgttgcccaggctggtctcaaatgcctgggctcatgcaatcttcctgctttggcctcccaaagtgctgggattacaggtgtgagccaccgcacccagcccaactatctttaatttggcagtttagaccttctgaaaactcatttcttctaccttcacttgtttttattacataagtaattgataatgtataaagaaaaaaagtgtgtctttcccaaattacatcttagttgtgcacatttcccccatgtaaacagagacatataagaaatgcataaatatttttgtaaatggttgtattatacttacattgttgcacaacttgtaatttttaaactagttgtgaaccttttccttcttagcaaatattcatctaattaccactatttattgttattattattatttgagacaggatctttctctgctgcccaggctgcagtgcagtggagatcacagatgactgcaaccttgaagtcatagactcaagtgattctcgtgcctcagccttccaagtagctgggactacaggcatgtgctaccacacacagctaatttttaaatttcttttgtagagacaagggtctcactatgttgctcaggctggtctggaactcctggcctcaagcaatcctgcctcggcctcccaaagtgctgggattccagggatgagccaccatgctaggctctaaattataattattaatggctatgtatttttcttattatgaatgcatctttttttttttttttttttttttttgagatggagtctcgcactgtcaccccagctggagcgcagtggcgcgatctcggctcactgcaacctccgcctgctggcttcaagggattttcctatctcagcctcctgagtagctggcattacaggcacctgccaccacgcctacctttttttttttttttttgtatttttagtaaagacggggtttcactatgttggtcaagctggtctcaaactcctgacctcatgatccgcccgcctcggcctcccaaagtgctgggattacaggtgtgagccaccgcgcccaaacgaatgcatcatattttattggactcctactttgaaatatttaggaattttcagtgtttactatgacaaatagcactgtgattaaaaaaaaatgtagtcaaatccacttttgctgttgatttttttttttttaatctgtagagacatcgtctcgctatgttgcccaggctggtctggaactcctggcctcaagcgatcctcctgctttggcctcccaaagtgcgtgggccaccgtgaccagcagttatttattttctttggttgtgtgtgtgtgtgtgtgtgtgtgtgtgtgtgtgtgtgtgtatgtatgtattgagacggagcttgctctgttgcccaggctagagtgcagtggcacgatctcggtgcatgcaaccttcacctcccgggttcaggcgatactcgtgcctcagcctcccgagtatctgggattacaggcgtgagccaccatgcccagctaatttttgtattttcagtagagacggggggtgcgggtgggggaatttcaccatgttgaccaggctggtctcgactcctgacctacggtgatccgcctgcctcggtctcccaaagtgctggaattatgggcgtgagccaccgcgccgggccagctattgattttttgaaaggatttttaaaaaataatgttgctttgaaaatttttatttatgactagctcttttggttaaaacttggctatggtttctctggagtgatcctgagttggataattttgggaaagttagagaatctaattaaaaacattttcaaatgcttattaattgtaacaaaagagatatcacaggatccataaagagcgctagcccgaaacgtcttttgatgcagtaattcctgggcaccggcatcgctcacattctcctctcagaattacaccgggaggggtcgcgaacctctgctagccgctctcgctgcgatccggagatacccagacaccggactccttgagttcacagcccggatgcagaagggaatcctagcagcgccgtaccggatgtgtgagtggaagtgactgaggtgaactcacgaccgattggttctcccgagtggacccaagcctgttttcacctgccactggccgcgtggtttgtctatttgaacagtccccgccccctggagaagccgggtcctgaagcttctcttcttcattactattggcctgtttttcagtccatcttctccctatacctgtcgattggtcctcagggctgggaaccctccttccctcgctcccggcttagaggacagcggggaaggcgggcggtggggcagggggcctgaagcggcggtaccggtgctggcggcggcagctgaggccttggccgaagccgcgcggtgagtctagggcctggcacgacccctctagggcggcgtaatgtccagacccacggccagcctgcccgtgggggggccaggggaagccgcccgtctgggacgtggggtccccacattgccggccccacgacctgggcaccgtctgaggccttgactcccacccctcgaggcaacgcccacctccccgggacccccaagagacccctggacccttcggcccgcggtacgtccgcccgaaggccggcccatcagctctggtattgccctttgggtcttttgcctgtcacagccaccctttcttttgagccacgtataaaaattgtgtatctctgccccagggaacactagcgtccgtgtcagccccttgtcctccactgtggacacctctcagagatccagtccccgaaactgagcttggttacatcgttggggtacatcttctctccctctcccccagccccatccctgtttcccccatccaatcttaacttccttaagccctatcaacaccattaggatatttgacttcagatatcctaagtttaattgaattcagtctggagcagatggcctgtgggcctcagatcatataaagatacactggttctttcctgagaatagaaatcccttgccagccaccttcccccctttcggacgcacacacatacacacaaactggagtagttttcttagcagggattcttaagtttcttctcccctaaaggatgacatttctttctgcagtcttcttcttggcagtggagtatttgaaagctttacaaaaccaattattcccaggtttttcctctgtgccttacaaattctttcaaaaataagaattttgagaaattggttttgtagcataagctgaacatacttgggataggtgtatgttacacccatggcagtgtgggcataattgaggaatg

SEQ ID NO: 1469 - DNA, 6000 bp, Homo sapiens
tagtgtatatagaccttaatatcattgtcataacagtcattaattgagcatttatgtgccaggcattgtgcactttatttatttgtttattttttgagacagggtctcactttataacccaggttggagtgcagtggtacaaacatggctcactgcagcgttgatttcctgggctcaagtgatcctcccacctcagccccctaagtagctgggaatacaggtgcacgccaccatgctcagctaatttttatattttttgtagagtttttgccatgttgcccaggctggtctcgaagtcctgagctcaagtggtccgtccaccttggcctcccaaaaagctgggattataggcgtgagccaccatgcctggcattgtgcactttatattttttataaacatgaacatggacataaacatttgctctttgctcaatcctatgaaattagaactaccattatgccattttacagatgagcaaactgaggttcagagaaagaagggcctcgcagctggttaaggggcagtgttggggagagaagcagcaggttggacacatgagcaggcccagtgggtgctggggacaccatagggaacatgccacagcccttgcttttgtttttgaaaatagcttttctctgcatagtgccacccatagcccgggcactgaagtcgacgtgttttgctcctcatccagactcagttgggattcaagtcaggcaagtggtaatgagccactgtccaccatcacttcattcctctgccattcattctttcattcactcatttgacacacatttgctgagaacctgaattcgggctgggcatggtggctcaagcctgtaatctcagcattttgcgagggtgagaggcaggaggatcacttgagcccaggagttcgagaccagcctaggcaacatggggagaccctgcctctgcaaaaaatttgaaaaatcagccaggtgtggtggtgcacacctgtaatcctagctactcaagaggctgaggtaggaggatcccttgagcccaggagtttcaggctgcagtgagctatgattgccccactgcactctagcctgggtgacaaggagagaccctgtctctgggaaaaaaaaaaaaagagagagagagagagaacctgaatttggccaggcactatattgaaataatgaatgagggctgggtccctgccccggagcattgcaactggatgggcccctgagcgtcaggatatcaggagattgtcaccaggctatgtgtgtctcactctgtatgtcccccatacccatgtgattggtgtcctgggaaccttaggcagggtgggagagctgattcattctgccatcagcctggtggggatgggaggggtcttggaatcatttctggggtctggaaacttcattgcccggttcactcactgtgggtttgttccataaaccccagcagtcctcctctgcccgagcaggtcttcctctttgctgggctggtgctcacagctcaccttctcagtttccatttcagtgtctcttgggagtgattttccctccgtccccatcagagatcctcagggacctgctctagttggcaaataaactcttgctccccctaaacacccatccttccttcccagccgccctcctacatattgtcattatggtgaaaaatatgcaaataactttgaacaacagtctcccagcagacggatgttcaaaaatgtaataaattaaccccataatgtaatctggatcccacaaccatccatcatgctgatgcgattaagatatgcaaaaccagatgctgaagagcgcatggatggagtgttggcagagctccccggatgggcccatgctgactcggccccctgcccctgcccccgcccccatggaacctgaggccatcagaggtttagggaacatctatctggcctgttcatttcactaatgagactgaagccttttaggggtttggggtcagatgggtttgaatccctccccatctgcttcctaacccaccttccttctgtttgtgattggatctgaacccaaggccccaaacccagactttttttgtttttttgagatggagttctcgctcttgttgcccaggctggagtgcaatggtgcgatcttggctcaccacaacctccgcctcccgggttcaagtgactgtcctgcctcagcctcctgagtagctgggattacaggcatgcgccaccacacctggctaattttgtatttttagtagagatggggtttctccatgttggtcaggttgatctcaaactcctgacctcaggtgatccaccagcctcagcctcccaaagtgctgggattacaggcgtgagccacccaccgtgcccagctgacgtttttttttaattgcaataatttttggttacatgggtaagttatttagtggtgactgctgagattttggtgcatccatcacctcagcagtgtacactgtacccagtatgtagtcttttgtccctcaccttcccacccttccctcaccttcccacccttccttccccccgagtccccaaagtccaatatatcattcctatgcctttgcatcctcataggttaactcccacttacaagtgagaacatatgatatttgcaaacccagatatttttatccacaggtttctagttgacagggtgggtactccagtgtcaagagctgttgggacctcagtttccccaaggaaaaatgacagttgagtttatgtcctccaaggtttttctgacgttcttagctctgtgtgtcaggagttctacgggtggctcgtattgtgttttctcagggcagagggctggggctgggagctcatggagggagggcctgacttgagccccaatgcccctcacactgtgtcctgaaggccatcccacaggagtcacttggctctcagtttccccaccccaggccccagtctgaagggctcctttgcaaggagttgccccctatgactgccactgcctgtcaccaatgcaaaagctgcttaagcagcctccagagagggaaaggaaagacccttgcttttcccaagttctgcaatgagtcagtctcaaggagccacggaactctgtgtataagccagtgagttgcttggccagctctgtgtggaaatggcatgatgtgtgcaggatccccatatcttgagaatggttgctgtgcccagaatgtgctgccaagtgcaccagttcctaaaacaaaatcatccatccctttggatggatgattttacatcacaattttacaaaatgcatcgcatttttacaaaatgaagatattctctgggaacagtccaaacctctgtggtgattcccacactttgctgggcatccgggcccctggggagcttgttaaagggccagtgccctgctgtgcaccccacctcgatcaggttgctctaggcagcagggcagctgtgattaatgggctcctgggggattctgatgcagatttcctaggactgcatttgaagaaatgttttgctgacattcctagcttaatgggttacttacaggttactttttctctccccattagaagtctggaaatgcaggtttgaaggcatcagggggcggggggagggatccaggtcttctataatgagctgtaaacgataaacaagtctggctagatctgtgtccaaacagacggatgggactaacaagctcttacgtccctggaggtcacagacaaagtcctcttggcttctggtcctgacttgttgcccactaactccgtagctgcttctcagatcttagttttctcacttgtaaaataagggggctgtaaataagtggaagccctggtgtcagaagaggcatcagagctgggtttgtattcccactgtgtgattttggcgaattagagaacgtttctgggcctgtttaaccatctgtaaagtggggctataaaatggagacttagctgctagggttaatgagagaattaacggaatcagtgtttgacacataagaagtgctcgatgttagtcattattttttattattttagtaatatcatctctgagggcccttacaggacttccagaccgagtccacgcccctgggggacttgggagcagtaaaatgtagtggcaggaggcacctcggccatcgcccaccccaccagctgggagactcgggcaggttattcacccttctgcacctcgcttgacttatctgtataaagagaacagtcacagtaactgcctcatggagttactcccaggactgagataatccacggacacacttagcccagtgcccagcactcggctggagctccaaaaaggtcagctattgttatgaagcgtagggcggggagggttcatcctcttgggcggtcaggccaggctgcatttaggtacccggtgggggcggagcaggggcgacgccggtgcacgccctcttttttttatttttaaaatttcacccgggccttgacaaccggtacaatcctgtcctcccctgttcccgcccccgagccagaggattcgcttttgcgtgggcagctgcagggatggtgactcgggctagctcagatgtggctgccgttagtccccagctgcgcgctcccccgtccctccccagccctcttccggcgcctgctaaagcgagagaaatgccctcgggggaagatatgtagcgatccaatggaacgtggagatcaacgttgtgttttcttcgcgcccacccgaagttgaagggaggtggcgcggcgggtctcagcccctcccggacgccgaggcccggcccccgcccctcggagacccgcccccgcatgcggaaccgccctctgcgaggcccggtttgggccgtgcgggaatgggcgtggcctgggcggggcgggcgctaggacccaccggagcgccgtgaacgtcaccgagcggcgccgaggccccgggttgagcgggaggcgcgatcggtccggtcggtggctccccgcggcggggccgggcccgatctcgggcgggaaccgagcgcagagccggtactgggggaggggagagggggcgggattcccgccgggagggatccggcgtagcagggggcggagtcttattccaaccccgcttcgctttccgcatgtcccgctttgcgctcccggccctgggcatcccgctgtttccctctgcgtccgcggccctgcccttttcgggggcacagctgtggtctttccaccccgcgagacagcggggcgagggggcgcgggcggccagtggatagaggctgatgcccccaagcacggacgccagcgtgggggtggaggttcttccagctgccctgagcctgtgcgaagcgggaggtccttccccagttcccacagactgtggggagggaagagacggtggaagcgagcgggttctgggctcctgggtctctggaactaccctctgcccttgccccaacactcaggtagcgggaaggatgaccacgctcacacgacaagacctcaactttggccaaggtagggaggctggacctgcgggcccgggggcgggggcgtctgggccggcgggcttcctcgagcgcgccaccggcttgtgcccccctgcagtggtggccgatgtgctctgcgagttcctggaggtggctgtgcatctcatcctctacgtgcgcgaggtctaccccgtgggcatcttccagaaacgcaagaagtacaacgtgccggtccaggtgaggcacgtcccagaaccacagagtgggtacagggtggacttttaaaaattctttggtcgggcgccgtggctcacgcctgtaatcctagcactttgggaggccgaggcgggcggatcacctgaggtcaggagttcgagaccagcctgacaaacatggtgaaaccccgtctctactaaaaatacaaaaattagccgggcgtggtggccaaggcctgtaatcccagctactcaggaggctgaggcaggagaatcccttgaacccaggaggcggaggttgcagtgagccgaaattgtgccactgcat

SEQ ID NO: 1470 - DNA, 6000 bp, Homo sapiens
aaggtaagaacttttgatccagctcaactgccactttaaaaaaaaaaaaaaaaaaaaaaaacttctctgtggagatataattcacaaaccataaagttcacattttccctgggtacaattcagtgatttttagtatagttacaatgttgtacatcgctactctctaattcggaacattttcatcactcctgatgtcttgagaagggttgttcatgcccaaagtgtgttgccaggtacatcagttccaaaactactaatctactttctgttctatggattgtccaatttttttatttttttattttattttttggagacagggtctcactctgtcatctaggctggagtgcagtgacgcaatcacagctcactgaagcctcaacctcctgggctcaagcgatcctcccacctcagcctccccaatagctggggctacaggtgtgcaccatcacacccagctaatttttatttcatttatttcttttttgagacggagtctctctctgccacccaggctggagggcggtggtgcaatctcggctcaatgaaatctctgcctccccgattcaagcgattctcctgcctcagcctcccgagtagctgggactacaggcgacctccatcacgcttggctaatttttaaatttttagtagacatgaggttttgccatattggccaggctggtctcgaactcctgacctcaggtgacccacctaccttggcctcccaaagtgttgggatgacaggcatgagccaccacgcccagactaatttttaaaattttctgtagagaaggggtctcactatgttgccaggctggtctccaactcctggcttcaagaggtcctcctgcctcaccctctcaaagtgctaggattacaggcatgagccactgcgcctgacctggacttgccaatacggaacattccatataaaagtaattgtacaaaatatggtcttttatgtctggcttgttccacttagcataatgttttcaagattcatccaggtcgaatcacatattgatacttcattccttcgtagaaccaaaatactcccgtgtatggatagaccacatctgcttatccagtcatcagttgatgaatattggagcctgctttggcccctcaagtacctcattttacagacaaggaaactgaggccctaaagtcatcataaactggatgggataggagtccaggcctctcctaacatccaccttttcatattgtgtcaccccagctccaagcacatcggaagatcacccagccaggggacagccacagtagcagcatttgaaccagagactccaaggtttttctcctggctcatgaatactggcccacagctctatccttggcgacgcaaatcatgctggctgcacactgccccctctcccaggcccaggtgaccatcatctcttctctgccacagtacttagctggtctcttgctttcacccttgtcccactgcagactactcccaaccttaggaatcagcacacgtggccgggcacggtggctcatgcctgtaatcccagaactttgggaggccgaggctggcgaatcacctgaggtcaggatatcgagaccatcctggctaacatggggaaactctgtctctactaaaaatacaaaaaattagccaggcatggtggcaggtgcctgtagtcacagctactcaggaagctgaggcaggcgaatcgcttgaacttgggaggcagaggttgcagtgagccaagatcgcgccactgcactccagcctggacaacagagcaagactgcatctcaaaaaaaaaaaagaaaaagcaatcagcaaacctgctaaaaacctaagtcggatcatgtctctgctctgctcatggtccctctaaaaagctcaagtcctccctgtggcctttgcaggctcacattgttagaggtgtctgaaccagagcaaccccatcttgagtaggggctgggtcaaatggggttgggacttgctgggccatattcccagatggctaaggcattctaagtcacagtatgagacaggagatcagcacaagatacaggtcataaagaccttgctgataaaacagtttgcagtaaggaagcctgtcaaaacccaccaaaagcaagatggccacgagaccaacctctggtcatcctcactgctccactcccaccagtgccatggcagtttacaaatgccatggcaacatcaggacgttaccctatatggtctaaaaaggggaagcaaaggccaggcacactggcttacccctgtaaccctagcactttgggaggccaaggcaggcagattgcctggggtcaggagttcgagacccgcctgggcaacatggcgaaaccctgtctctactaaaaatacaaaaaattagctgagcatggcggtgtgtgcctgtaaccccagctaactgggaggctgaggcatgaatcgcttgaacctgggaggcagaagttgcagtgagccgagactgtgccactatacaagcctgggcaacaaagtgagactctgtctcaaaaaaaaaaaaaaaaaaaaaaaggctgggtgctgtagctcgagcctgtaatcccagcactttgggaggctgagacaggtggatcacctgaggtcaggagttcaagaccggcctggccaacatggtgaaaccccatctctactgaaaacacaaagttagcgggcatggtggtgtgcacctgtaatcccagctactcgggaggctgaggcaggagaattgcttgaacccgggaggtggaggttgcagtgagctgagattgtgccactgcactccagcctgggtgagagcaagactccctctcaaaaagaaaaacaaaaggcggggggaggggagaagcatgaataatccaccctttgtttagcacatcatcaggaaataaccataaaaatgggcaaccagcaacccttggtgctgtgctgtctatggagtagtcattctttttattcctctactgtcttaataaactttttactctatggactcgccctgaattatttcttgtgcgagatccaagaaccctctcctgaggtctgggtcaggacccctttcctgtaacaacatggtcctatcccagctccctgtctgatgtcacctcactctgttccagactgactcttctccaccaaacacaccaagcacactcccgctccaggacctttgcagtggctcttctgcttgcaagtcttctccccacaaccacgtggctcattacctccttttctttgccaaaagaactgccccagcaaagaggcctttcctaataactttatgtaaaacaacacctcgtcccttcatgctttgtctgtaatgtgctttacttttcttcatagcactaatcaccacctgacatcatttatatttatttgttcacttatcttctgtctccttcactagaatctgagctccatgggggcagggattcttgtccatgttgtttactactgtacctccggtgccggcacatagtaggtgttcaataggtatttatgggatggatgactcaaacctttcagtgaataaacagttcagtgttctcatcaatccatcctggtgcccaccaagctaataatatcacggtaacaatggcagctaattttacaggagcatttcctatgggccagaccttagaaacgttatctccttacacagggcactgcattcacgcctagaacactgaaatttaggtataatcatgagctcagaggtcaggcgacttgctcgaggtcataggggacggcatcagaagaggaacacagacatttagcctgacggcagaactgtgttctaaaacctcaaagtcataatttgccacacgctggagaaagaaaacagtcgaaatggaagccacctggcgagctcagggcgccaggtgggagcgctgcttcccacatatgggagtccggccccatcgctctttgatctttgcagcgtccgtggccccaccgaccccgtcgtgagttatgggaggcacgggacccataacccagcattctcagactcccagggtcgtcaggacacggcgccccgcgcggtgatggatgagccggccccagcgctggctttgtccgggttgggccggtctgagaagcttcaggccggctttggacggggcgtggcgagagccgcgccgcgtgtgagtgtgtgtgtgtgtgtgtttgtgtgtgtgtgtattggggcggttgtctttctcccttccctaccgggaaagagggcacaggtgcgccgtcagcgccccaggtgagctggtagcactttgaagaccctttgtacccctacatccaggagcgacctctcggagaaccccgcctgcccactctgcgcactttctgcggctacaaaggccccgccgttccccgtcccgcctcccccgccctgggcatttcttccgtcccttttgacagtctaggcggaataatccttttgtggccccgggcccctgccctgacagacgcggccgcagctgagcgcgcagcctcgctccattgttggggtccaccgaggaccgcccgccgcggccctttgtcgcccgccctgcgcggggccgctccagaggcgccacaactgccggagcccctcccgtcccacgcgccctgggccgcgccgaggcggctcttacgcaccgggaggagtgggcctgcctcgcccggtgcccgcacggctgctgggctgcgcccgcctttgtctgcctcctttgtctgccccgcgccctcgcggcggcggcgcctaggcctctggggagctggcccagaactcagagcgcagctggcgagggcgcgctggccgggtgcgcgccgggcccggccccggggctgcccctcggctgggggcagtcgagcccgccacccgccgcccctcctctgtcccctccccgcgctcccgcccccttccctcctgcccgcccactcccccttccttccagtcccgctcagcccgggcacatcctccggctgcccgcgcacctctccacgccggccccgttccgcggctcgccctcggctgcgctcggctcccgcgggcgctcggccccgagcccctcctccccctacccgccggccggacaggtaaggcacggcctcggcccgcccctggctccgcccctcccgccccacctggctgcgagcccggacaaaggtgggctacctggcgcgcccaggggcggggtgcgcggggtcccgaggctggaagtgaggatgctgcctccttcccagccctcggacccgtctatccgccagtccttccgccgcctcctctcctcgccgcgtctgcccacggaccctggctctgctcccgggctccccatccgtccacctaccgctggacgcccacttttccacgctctgacactcggcctcgcgcgcgccctcgccgccctctggggtcccggctcgcacctactctcctcggcactagccttctctctccctgacccagtctccctttgtctctctgtctctgagtctccgggtggtctctcaggcagggggccccagtccgccaccgttggaagaagtcttcgaagactccctgagccccgggcagagctggcgggcgtgccctccagcccctttcgaggccgcccaggaggctggggtgtgtggccggggtcgctgagtgcgcccggaaccagcaccgccggtggccccgcgccgtcccatctgtgcccaggaaggtactcagcctggctcccccgacggcgctggtctttcgcctgtggtctcccgctctgtccctcctgctccccaccgccggcttttggcttttctccgtccgctcgtcaagggtctcagccgccttcggggccggggtatgagatgagagagggctggggtttcccgccaagtctttcttgctttcctcagctgggtgctccctgggccatcctctccgcccggtggtctcccctgccctatatgctccctccacgctgcccacctcccagcccagtgacacactggtgtctggaaccggttcagtacta

SEQ ID NO: 1471 - DNA, 6000 bp, Homo sapiens
tctcctgcctcagccttccgagtaactgggattacaggctcccaccaccatgcccggctaatttttgtatttttagtagagacggggttttaccaccttggccaggctggtctcgaactcctgacctcatgatccgcctgcctctgtctcccaaagtgctgggattacaggcgtgagccaccgcacccggctggggagtaaatgtttataaagtaaatgggacacagaagggtgaaataaacagtagttgttactatgggaaggggagacagagggagtaaggtggcaggcatgggtgtggtgggggccagggagtttcctggaagcatttgtgcatctgtgcctgggtgtgcaaaggggcaggcgcaggtggctgcgtcctctgtcctcagtggggtgatcgatggcagggcaggactgtcctaggccagcctggaggggaccattgtcctggcaaatgaggtttggcttccctgcaggggcagctccatctgcttttattgtttccgacagcagccttgggattttcaacccaccccagacctcacaccttaaaaacctgtacaggggctttgcgggagttcatcagaggccccacccattcaaaggcctccagcttccagcattccccgctcacctgctgaactcgagtcctacctcctgctagattataggtacttgtggcccctcttcctcctctcctaggcaatttgtgggtgggggaagcaaccctcagcctccatattcctcaaacttcattatcttggtacctagaccatttagctctgtgtttgtttgggtatcatctactgttctaggttctaggcccagagctttataggcattatttaacttgaccctttgaagtatatatatatatatatatttttttttttgagacagaatctcactctgttgcccaggctggagtgcagtggtgcaatctcagctcactgcagcctctgctccctgcaacctgtgcctcctgggttcaagtgattctactacctcagcctcccaagtagctgggattataggcgtgcaccacacttcccagctaatttttgtatcttttttttttagtagagatagggttgcaccatgttggccaggctggtctcgaacccctggcctcaagtgagctagctgcctcggcctcccaaagtgctgggattataggcataagccactgcacctggcctgaagtggataatatttttcagatggtaatagcaacaatggctgtgtaggaacattaagacaatgaccaagggacttgcctaagatagcctagtagagcaagtgatagagctgggattcgaacccacagccatctgactcctcagactcatcatccctgctccatcacattcctggccgagactgctcctcatgctgccatccagtaaccaacaccagtgcagctgctgtgagtcccagggaaggtggcatgagctggggcctgacccagagcctggtacacctgaaaaccattaagtcctgcaatgagctccttccagttgctctgggttctagcaggagcctcatccctcataaccaccccttcaaccccatcccatcaagagaagtcttggtgttggggcatgggtgggtcatggtgttggggcatggggcgttgtcaagctggaacctggggtggcagagcctctactggcaaggattcagccatcctcccacaaccttcttcttcttggggaccactggccacagcgactcacccctgagaaggaaggctggagtagggcatgcagagagggccagcggagcaagagggaggcagctccaacccactgggccagaacaggggtgctcctatgacctgccccccaggaacatgctcatgcctctgagggaagttcggggaggctgggatgcaagtccctgctccatcacattcctggccgacacacgtgaaggaactccctctgggtcccacagctgctaagtgatcagctgggcttcaaacccaatctgcacggctggggtgagccacttcgttctctggtctcagtttctacccctataacaggcacagagaccaccctcattttccagagtgatacagggcctcagtatcacaggggtttccgggcagcttgctccccctccaacctccccagccagagggccagctccgccctggccccaccagcaggacccagcagaactcagcaagacactggggcttgcagttttcagttcattcctgtgcctttgaccaggaatcacattcaatataacaggtgtgcacagagcccctactgcgtgccaggcactgggaccacaagcagaaggagacccagcccccacccagggaggagcagacccctcccagatagggattatgccgtgcagttcacaagagctagggaggcaagggagtgccggggtgcttcccacaggagaggacatcagacctccttggtcagcaaagacagagggctgagatcaaacacagggcagggcagaaagagccctagcaaaagctcagaggagggcagactgtggagatggtcagttctccatcgtggctgcaacctgggacgcagaggggacaatgctgggaggcaggcaggacagggctaggctgggctgaggtctctgtagttaactgagtggccacagtgagccactgaggactatggactgggagggcgatgaattgaatagtggggaggaaggcagcggagagagcagagaggacctgagcaaggttcccaagcctctgagctggctttgctgcagaaggcagggggtagagatggtatgaagggccgggttcaccaaagtagggcctgtctgccaggtcggatttcgagcaggagcctggatgggggatgtcgtggggatatccagccgttcttgcctctaaagagaaaggttccagttgccagccctggctgtggctgaaataagaactcagccaggggagcctggaacctgccagctgggaggtttccctcttctgaagttgccctcattaagacactcaggccacgtcactgccagactcctggagtggtgtgtcacatgttatgaccacctagacagtggtcagggggcttgggcaagcacacagcaggtccaggagccagcaagacaatcccctcagaggaaaggaagtggcctgtgagctggtgccgctattaaaggcatcaagccaagactgaggttcagaattgggggtgagtcaccggacgccttctgatgggtgatcagttgttggcaacaccagctcagccacactgatctcattttgaaaaaaagtgacccattggccctgattgttttagctgattttaggacaagcaaagaggaggagagagagaaagagaagagtgcttgcaagggtgtggacgcctgtatgggcacgaggaggtgaaggtgacaggaagtgtgatgggggaagaggctgtggtggtggggttactctgaagtgtctctaagccttgactttgagatccatttctgtggagccccctgtccccaccccatcccaggtctgtagactcccctcccctcccctcccttcctccacagggtgtgtgaaccagcaccaagcggcaccccacaatttccacacacatccctataggtagggactagcaccatccctgttttgtgacaggaacactgaggctcagagaggtgcattcctttgtccgagatcactcccagagccccagtgtacccgactccagatgcatagtactgaaccggttccagacaccagtgtgtcactgggctgggaggtgggcagcgtggagggagcatatagggcaggggagaccaccgggcggagaggatggcccagggagcacccagctgaggaaagcaagaaagacttggcgggaaaccccagccctctctcatctcataccccggccccgaaggcggctgagacccttgacgagcggacggagaaaagccaaaagccggcggtggggagcaggagggacagagcgggagaccacaggcgaaagaccagcgccgtcgggggagccaggctgagtaccttcctgggcacagatgggacggcgcggggccaccggcggtgctggttccgggcgcactcagcgaccccggccacacaccccagcctcctgggcggcctcgaaaggggctggagggcacgcccgccagctctgcccggggctcagggagtcttcgaagacttcttccaacggtggcggactggggccccctgcctgagagaccacccggagactcagagacagagagacaaagggagactgggtcagggagagagaaggctagtgccgaggagagtaggtgcgagccgggaccccagagggcggcgagggcgcgcgcgaggccgagtgtcagagcgtggaaaagtgggcgtccagcggtaggtggacggatggggagcccgggagcagagccagggtccgtgggcagacgcggcgaggagaggaggcggcggaaggactggcggatagacgggtccgagggctgggaaggaggcagcatcctcacttccagcctcgggaccccgcgcaccccgcccctgggcgcgccaggtagcccacctttgtccgggctcgcagccaggtggggcgggaggggcggagccaggggcgggccgaggccgtgccttacctgtccggccggcgggtagggggaggaggggctcggggccgagcgcccgcgggagccgagcgcagccgagggcgagccgcggaacggggccggcgtggagaggtgcgcgggcagccggaggatgtgcccgggctgagcgggactggaaggaagggggagtgggcgggcaggagggaagggggcgggagcgcggggaggggacagaggaggggcggcgggtggcgggctcgactgcccccagccgaggggcagccccggggccgggcccggcgcgcacccggccagcgcgccctcgccagctgcgctctgagttctgggccagctccccagaggcctaggcgccgccgccgcgagggcgcggggcagacaaaggaggcagacaaaggcgggcgcagcccagcagccgtgcgggcaccgggcgaggcaggcccactcctcccggtgcgtaagagccgcctcggcgcggcccagggcgcgtgggacgggaggggctccggcagttgtggcgcctctggagcggccccgcgcagggcgggcgacaaagggccgcggcgggcggtcctcggtggaccccaacaatggagcgaggctgcgcgctcagctgcggccgcgtctgtcagggcaggggcccggggccacaaaaggattattccgcctagactgtcaaaagggacggaagaaatgcccagggcgggggaggcgggacggggaacggcggggcctttgtagccgcagaaagtgcgcagagtgggcaggcggggttctccgagaggtcgctcctggatgtaggggtacaaagggtcttcaaagtgctaccagctcacctggggcgctgacggcgcacctgtgccctctttcccggtagggaagggagaaagacaaccgccccaatacacacacacacaaacacacacacacacacactcacacgcggcgcggctctcgccacgccccgtccaaagccggcctgaagcttctcagaccggcccaacccggacaaagccagcgctggggccggctcatccatcaccgcgcggggcgccgtgtcctgacgaccctgggagtctgagaatgctgggttatgggtcccgtgcctcccataactcacgacggggtcggtggggccacggacgctgcaaagatcaaagagcgatggggccggactcccatatgtgggaagcagcgctcccacctggcgccctgagctcgccaggtggcttccatttcgactgttttctttctccagcgtgtggcaaattatgactttgaggttttagaacacagttctgccgtcaggctaaatgtctgtgttcctcttctgatgccgtcccctatgacctcgagcaagtcgcctga

SEQ ID NO: 1472 - DNA, 6000 bp, Homo sapiens
cactgggtcaccctgtcctggatgcctctgaagagagggacagaccgtcagaaactggagagtttctattaaaggtcatttaaaccactgaagggaagatgctcagggcgagtgggtgtgtgtgtgtcttggtgtgagtgtctgcagggagagaggttttaagagccctctttttttttttttttctttttttgagacagagtctcactctgtcttccaggctggagtgcaatgacgctatccccgctttctgcaacccccgcctcctgggttcaagtaattctcctgcctcagccttccgagcagctggggctacaggcacccatcaccacgcctggctaatttttgtttttttattaaagaaagggtttcaccaggttggtctggctggtcttgaactcctgacctcagatgatccacccacctcggcctcccaaagtgctgggattacaggcatgagccaccgtgcccggccaagagccctctttttagagcctttaagaaaggtcatgctagcctctcgacccctgagtagctgggattataggtatccatgcctgacacatttttgtattttttgtagaaacggggtttcatttcaccgtgttggccaggctggtctcgaactcctgacctcaggtgatccatccgcctcggcctcccaaagtactggattacaggcgtgagccaccatcccaggcctgaaagtcttttaaaaaagatttttgaggccaggcacagtggctcacacctgtaatcccagcacttaggctgaggcaggcggattacctgaggtcaggagtttgagaccagcctgggcaacgtggcgaaaccctgtctctactaataatatgaaaaaatcagccggttgtgttggcatgcgcctgtaatcccagctactcgggaggctgaggcaggagaatcgcttgaacccaggtggtggaggttgcaatgagccaagattgggccactgcactccagtctgggtgacagagcaagactccatctcaattaaaaaaaaaaaaagattttttagtcttttcattttcaaaattgactcattgtaaattcaaacagcacaaatcttaatctttctgtcatcctttccccccagctgctcagttcctctctctgaaagccaccatgtctaatctgttttttgaacgttcttgagctggtttgtgccgacacaagcctgtgtgtgtgtttgtgtatgttagggttatttttgtttttgtttttgagatggagtctcactctgtcgcccaggctggagtgcaatggcatgatctcggctcactgcaacctctgcctcccgggttcaagcaattctcgtgcctcagcttcccgagtagctgggattacaggcacccgccaccacgcccagctagtttttgtatttttagtagatatgaggtttcaccatgttggccacggtggtctccaactcctgacctcagatgatccacctgcctcggcctcccaaagtgctggcattacaggtgtgagccactgtgcccggcatagggttgtttttaactgttaacttttttctgattacaaactcatcttcaccatgaaaaagtcaaacaaaataggtaacatggggggccggatgctgtggctcacatctgtaatcccagtactttgggaggctgaggcgggtggatcacttgtggtcaagagtttgagaccagcctggccaacatggcaaaacccccatctctacaaaaaaatacaaaaattagccaggtgtggtggcaggtgcctgtaatcccagctacttgggaggctgagctgggagaatcacttgaacctgggaggtggaggttgcagtgagccaagattgcaccactacactccagcgtgggtgacagagcaataacctgtcaacaacaacaacaacaaaaagtaatatggaccgggtgcagtggctcatgcctgtaatcccagcgctttgggaggctgaggtggtaggatcacttgaggccaggaattctcaaccagcatggccaacatggcaaaaccctgtctctattaaaaatacaaaaataaggtgggctttatggcacatgcctgtaaacccaactactcaggaggctgcagcacgagaatcgcttgaacccgggaggcagaggttgtagtgagttgagattgtgccactgcactccagcctgggtgagagagcaagactcttgtcttaaaaaaaaaaacaaaaacgtaagaaagaaaggtctcctggagttgtacatcagtgtgctctgcacccattcccaataacactcagcactgctaggagagttttgtcatcccgagggttgaaacgaggattcagccatctcaatgagaaacacatgttaatgggttgaaacatatctccaaactgagatttcctctacttgctgggcaagtatgcagatgtgtttcagagataaagcccagctgctgggcagagtacaagactaaatgcctgggaatggattcagaggttcctacagcagtccaggcaagtgaccaggacctagaccaatgcttgcagggaaatttagggaagaggagggagtgggcaggggagatgtttaggagagagaacatccaggctttcacctgacgggcaagattctgctaaaaaggaaaaggaaggctgggcgtggtggctcacacctgtaatcccagcactttgggaggctgaggcgggtggatcacctgaggtcaggagtttgagaccagcctggccaacatggtgaaaccccatctctactaaaaatacaaaaattagccaggcatggtggtgcacgcctgtaatcccagctagtggggagactgaggcgggagaattgcctgaggcggaggttgcggtgagccaagatggtgccactgagctccagtctgggcaacagagtgagagcgagactctttctcaaaaaaaaagaaaaaaaaaaaaaaagaggaaatggaatttatagttcctgccctcagagaatggaagtggaatttagagttcctctccttagggagtccagagattgtggaggaggaaacaatccgacccagtaccaggcagctagcagctgaggccccaaggcacgctacatcccagacagggccctgtctacaccctgaggctgagtctgcgtgtggccccacagtccacagtcagacccgcggggcactaggctactcagagggcagtgtgggcaggacagctccctttggccatcgtcatgagactgataaaccagtcacttctatatcagagtactgatttgcctcttgaggttgtttgtggcaataaattgaggttgttctaccatggttatagagcagcaccatcccacagaattacagtttgacccacaaatgcaagctacttatgtaattttaaattttctagtagcgacatttttaaaaagaaacaggtgcaattaatcttagtaatgtatttaacccaaatgacccaaaatattatcacttcaacatgtagtcagcatataaatagtaatgggctaatagccctgcactgtggcaggtacctgtaacccggcattttgggaagccgaggcaggagaagattgcttgactccaggagtccaggagttcaggacaccagcctgggtaacaaagtgaaatgcttccccatgtctacaaaagataaatactaggcatggctgcagcatctgtggtcagctacttgggaggctgagtgaggtgggaggattacttgagcccaggagttcgaggctgcagtgagccgtgattgcaccactgcactccagcttgagtgagagtgagactctggctcaaagatagattttttttttcttttttgagacggagtctctgttgcccaggctggagtgcagtggcatgatctcggctcactgcaacctccaccgcccgtgttcaagcgattctcctgcctcttcctcccgagtgcactatcatgcctggctaatttttgtatttttagtacagacggggtttcaccatgttggccaggctggtcttgaactcccgatgcacccgcctcgccctcctaaaatgctggaattacaggcttgagccaccgcgcccggtcgatatttttttttcctaaaaattgagatagtttaacagccttttttgtcctaagtcttatagcgcatctccgtttgcactggctcaggactcgagagccacacgtggctagtgcctactgttctggcgcgctcaggcttggagccttctctgcggaggccaagtcctgcaagggatctgtttgctgcggtttcctagtagtgtctgccgcatcactggggcccggtgatctgggtaaccatgtgagcttgggtaacctctcctctccctctcctgggactgctgtggacgttaaatacagcggtggatgttagagacgcagttcagtcactggcattgattcgccgttgttgctgctcttctttcctcaaaggcgactgaagggcagcaggcccatgctcgcttctgtctgcccgatgagtcacttcaccctaggcctggccctctagagaacactcctctaagattacagaatgcaaatctggattccagagctggcagaggccccagggtcaggctctaggacaaccggcgaaaaagcgggaacctctactccacgcccttggtttttcgccccttgacagcttgaggctccgccccgctttgccccgcccccccagctccggccgacgcccaccggaactacagcccccatgatgcagtgggagtccgagcctctgcgtcgtccgcttgggacgcgccggcggaggagtggcgcgcggaggagtggcgcgctgagacgccgctcgaagcgccgagtcgcggggcagcagaggcgtaaggagtaggcggggcgagccggctgggctcagggtccaccagctcacccgggtcgaggggcaatctgaggcgactggtgacgcgcttatccacttccctcctcccgcctccccctggggtggcgctcgctggtgacgtagtgagtgtgatggccgccgcgaggccgggaaggtgaaggtgagagggcgagcaagccggggtggcggggactggcccggcccggcccggcgagtcctgagcagctcggcgtgggccgacgggattctggggccacgggggtctgggatgcagtcaagcggggtccccactctccggcctcgccgccgggccctccccggccctgagaggagggggcgggccacgggacctgggactggtcggtggggtcccctgtagcttctcatcgcccccgcctttccacccttcacggccatgttctacccctgccccttctctatttttcatcctgtcttcattttgccagcatttactcagcacctgataggtgtccacgttcaccgcgggagcgccctgccatccccactttgggcagttactgccttctcgttcagccctgtttacttatatgacttctcaccggactgtaaggccctggagggcaggactgtttcttatccatttctaacgtggcgcctgacacacacagagaaggcacacagaaaatgttgaataaatagctgttaagacgcacgaaggcagaactgcccgttaccccctctcgtaatccttcattgccctctttaaattctcaatcatctctctctcttctacccagaaaagggctctggttatctcttttctacccagaaaagggctctggttatccgcctctggtgtcccaaggtttggggcttgggggaggaaggcagctcaatgtagttaaaaaaggaaggaggccggtcgcagtggatcacacctgtaatcccagcactttgggaggctgaggcgggcggatcacctgaggtcaggagttggagaccagcctggccaacatggtgaaaccccgtctgtgctaaaaccaaaaactagccgggcttgctggcacacgcctgtaatcccatctactcaggaggctgaggcaggagaatcgcttgaacccgggaggcggaggttgagccgaga

SEQ ID NO: 1473 - DNA, 6000 bp, Homo sapiens
ttgatctccgtgatagcgggtaagggagtggtgtgtgtggtgtgagttggcggagttgcctctgccctccctgaaggctgggtgttcatggagagagtcttgtgatcttgctggtagagtttgttgttattgttttataacatgtaaagctgcctttagctcttactgtagtgaagcatgttgcttgcgtcatcaactttagtcttctcacagtttagatggtattgtggtattaggatattggttttcatccacggatccaggctcataactcctatccacagcccttgttatggttttttgatataatgttagatgtgttaggcctcaggggcaggcctctgaccttctgctctccttccaccctaatctttccccacctgattgtgggccttaaaaccctcccctgagaggggtggaccctgtatcctgggggaaggaatgctgatgtcatgaagcttccataaaaatccaagaggacagagttcagggagcttgtggatagctgaacacacggaggttcctagagagaggcctgctcagggagggcacagaaactacacgcctcttcccccatacctcgccctaagcgtctccttatctgtatcctttgcgatatccctcataataacctggtaaacgtaagtaagtgtttccctgggctaggtaggctgctccatcaaattaattgaactcaaagagggggtcatgggaaccccagcctgaagccagtcggtgagaaattctggaggcccagacttgcaactggtatgtttgaggggtggtggtggagaggcggggcagtcctggggactgagccctcaacctgtgggatctgacactctctccaggtagacagcatgggaactgaatgagaggatacccagctgctgtccgctggttggtgtgtggggaagaaaccccctcacatttggtcacagaagtctcttgtgttgatgattatggtgtgagagtagagaaaaaagataatttgagacagtttctctctccagtaggtgtcttgtttgttgtacacatgaagaaaccaaggttctgtgatgaaataacttgcttaagtttaagcagcccagaaataatgtagtcacaatttgaacccagctctgcctgattacaaaacctgtcataggtagtgctatatcatgccccatccttgatccctttttttttttttttttttttttttttaaagagagagacttcgctctgtcacccaggctggagtacagtggcgagatcttggctcactgcaaattctacctcccaggttcaagtgattctcctgccttggcctctggagtagctgggactacaggcatgcgccaccacacccagctaattttttgtatttttcatagagacggggtttcaccatgttggctagactggtcttgaactcctgacctcaggtgagctgcctgcctcggcctcccaaagtgctgggattacaggcatgagccaccgtgcctgacccctgatcccttttctattccttttggatggctttcctcttgtgcctgccacatcccctctttctcgaacagtctgatctgccaggccatggcaagcctcatttcagcgcactctcctttgctgctttggaagagtgagagtagcattttctttgcagtttcctttctcagagctgtactgtctttaagccctggacatatggcttccatgctgagaaaacatctctcatagctgtggcgtcatgctgaggaggaatgtagaaacggaagtggggtcacttccttcccttgtctccagaggaatcattaacattgcacaagaacttgttggtttgggcacacatgtgggtccctatcccgctttgggtcggtctgtcttctgcccactctttgggatggttagttactaaaagtccgttttggcatttggtcttcatgtacctcttccgggtgttctttctgcttttcaggaccttgtgcaacatactttggccccatttggaagtttttcacgtgtgcttgctggggagcaacacctcatttccaatctagagagagtgagcttactgctgggtggagaactgagcagtaagattagggtggctggggaggcagtgacagacccaggcacagtcagctgtgcacacaccccctcatccaggagggcctttgccctttgacttcctgggattggtgggctctgctcaagaagtagctttcgccgtggtgggaactctgagggacctggcaggggtccacttttggggtcggaattcccagtcttaccctgggcactccttctggtgtgtacgcctctttttgatctttttttttttttttttgagatggagtcttgctctattgctcaggctggagtgcaatggcgcgatcttagctcactgcaacttccagctcccaggttcaagcaattctcgtgcctcagcctcccgagtagctgggattacaggtgcctgccaccatgcctggctaatttttgtatttttagcagagaaggggtttcaccatgttggccaggctggtctcaagtgatccacccgcctgggcctcccaaagtgcagggattataggtgtgagccaccatgcccagcctcttttgacctttgaccaaagacctctaggactttggagtcaagtctcatgacctctaaaatgttgttatatgaaaagataagctacaaagatatgtaggattgagtgagagcaagagagacagtcacacaaaaatagactgtgataatatggctgggtacggtggctcacgcctgtattcccagcacttcgggaggccgaagcagatggatcacttgaggtcaggagtttgagaccagcctggccaacatggtgaagccctgtctacgaaaaataaaaaaattagctgggtgtggtggtacatgcccgtactccaagctactcaggaggctgagtgaggcaggaggatcgcttgaacctgggaggtggaggttgtagtgagctgagattgcaccactgcacccagcctgggtgacaaaagtgagactctgtctcaaaaaaaaaaaaaaaattataataaacaaaatgttgggccgggcgtggtggctcatgcctgtaatcccagcactttcggaggacaaggtgggtggatcatttgaggtcaggagttcaagacctacctggccaacatggtgaaaccccacctctactgaaaatacaaaaattagccgggcatggtggcgagtgcctgtagtcccagttgcttgggaggctgaggcaggagaatagcttgaactcgggaggtggtggttgcagtgagccgagatcatgccacagcactccagcctgagcgatagagcaagactctgtctcagaaaaaaaaaaaaaaaatgttggctgggcatggtggctcacgcctttaatcccagcactttaatcccaacactttgggaatccaaagtgagaggatcattggagcccaagagtttgggagcagcctgggcaacataagaagaccctgtctctacaaaaaattttaaaaaaattagtggggcgtggtggtgcatgcctgtggtctcatgtactcaggaggctgaggtgggaggattgcttggacccaagaggttgaggctgcagtgagctgtgattgcgccactgcactccagcccaggtaacagcgagatcttgtctcaaaataaaaaataaataagtaaataaaatgttaacattgcttatcacaaaatgatggggttatgggtttttttccccttcagtttccaaattttctgtagcacacctgtgctatactaaaatagaccaatagtttttgtgtgtgtgtgtgtgtgtgtgtgtttttctttgttgagacttggtctggctctgtcacccaggctggagtacagtggtgcgatctcggctcactgcaacctccgcctcccaggttcaagcaattctctgcctcagcctcccaagtagctgggattataggcggccaccaccacacccggctatatttttttgtatttttagtagagacggggtttcatcatgttggccaggctggtcttgaactcctgaccttgtgatccacttgcctcagcctcccagagtgctgggattacaggcataacccaccatgcctggctgtttttttttttttttttaaatagagacggggtcctacattgcctaggcttgtctcgaactccaaagttcaagtgatctgcctgccttggcctctcaaagtgctgggattataggtatgagccactgaacctggcccctaaccaatagtgtttttatgtggtcttgctctgtctcccaggctagagtgcagtggactgatcataggtcactgcagccgaaactcctgggctcaagtgaccctcccacctcagactcccaagtagctaggactgcagatgcatgccactgtgtcatgctaattttgttttattttttgagacaaaatctcgccctgtcacccaggctggagtacaatggcatgatcttggttcattgcagcctccatctcccaggttcaagtgattctcctgtctcagcctcccaagtagctgggattacaggtgtgtgccattgggtctggctaattactgtatttttagtagagacgggggtttcaccatgttggccaggctggtcttgaactcctgacctcaggtgatccacctgcctcaacctcccaaagttctgagattacaggggtgagccaccgcgcccagcctgagacactgttcttatctcaccgtcctttgttctagtcctggaggttgcagtgacctgagatccccatattcttgattctccccaaagcattccgccatctccctagcaggatgtcccgaggtaggtgttgctgggttcgctcacgttagcttctcttgcagcgcaatgtccctgctcttctctcgatgcaactctatcgtcacagtcaagaaaaataagagacacatggctgaggtgaatgcatccccacttaagcactttgtcactgccaagaagaagatcaatggcatttttgagcagctgggggcctacatccaggagagcgccaccttccttgaaggtaagggggcaccggctcagccaggcccgctcttacctgtttagatatttagctagtgggatttgcgggtggggaggtatatctctgctcccagggaagtcataaccagatagccttagaaatgctctgctcttgaaatcatgtggaattggagtctggggagatgaggccaggaagacaagggaactgccatttagtaattactttaagaagtccacatgttttgtttcatttaatcatgaaagataggtgaatcttatccccatctacaaggcaagcaaattgaggtttgagagttgtccgataccttgtaagtaatagatcagggttttacccaggtgtctccaactccggagcccacgtgttttcctttgcctagttctggctgccattaataccaggcactgtttgggtgtcagtgatccctgaccagggcgccctttctttgatatttttagattggtgacagaactataggaaactcacgtcacctatgccttttctactagttactaatttgagcccaacctctagttccttgtctatcagcagagaaggactggttcccagggccccgctcgtctgagtgtcaactccagcactggcttcctcaggctccctctttagaaggacactttggcgccaggtcctgagattgtctgtggagacccagtaactgagtcttatctgcccttggtttcctcacttgtgaaagtggggctcaggtgtgaacagtggtttcagattctagtctgcagaaccctagaagttcagtggtggtgcttcgggggttggcccctggctcaggggggccaccttctttccattctgctttcaaatagagcagcttggcttctcgttgttttacatgccaggctgctacacgaggctccctttgaagaaagagactgtccaacttcatgccctcatctg

SEQ ID NO: 1474 - DNA, 6000 bp, Homo sapiens
tcctgaacaaccgctgggatgcatctgcctcagagcccgagtacatggaggaggttcgtgcttctgtttggcagtttggggaatgcaaccccgagggagcactgcctgccactggggccacttcctgcacccctggatctagtgacttccctgaattaattttattgccaaagaattctccaaatactcttctgtggtatcttctggtggtctttcccctctcccatccactttgctggatgcaccccctcttcaagccactctcccctaggcctaaaaaggatccctgctgcattagtgcatcttcagtgccggtgctcagtttggtttctgaggaattaatacagaacaggctcagctctagggaggcctctgggaaagaggctggaaagaggaatggagaataactggttcttactggtgacttacaactcttagctatttacttatttatttagagactgggttatgaggctggctaatttttgtatttttggtagagacggggttttgtcatgttgcccacgctggttttgaactcctgggctcaggtgatccacctgcctcagcctcccaaagtgctgggattacaggcatgagccaccacgcctggcctcacaactctttaaatatgtgaaatgaaagacaaaagggtaacaaacggcatggtggtgcacacctataggctgagagaggatcccttgagagtaggaatttgaaaccaccttgggcgacgtagcaaaacgccatctccaaaaaaataaagggtaggccgggcgcggtggctcacgcctgtaatcccagcactttgggaggccgatgtgggcggatcacgaggtcaggagatcgagaccatcctggctaacgtggtgaaaccccgtgtctactaaaaatacaaaaaattagccgggtgtgatggtggcaggcgcctgtagtcccagctacgcgggaggctaaggcaggagaacggcgtgaacccgggaggtggagcttgcagtgagctgagattgtgccactgtactccagcctgggcaagagagtgagattccgtctcacaaaaaataattaaacaaataaagggtaataagattgataatatggcaatatgggatgataaaacatgcagttgcagtcagtaggccagagtccaaattatttatttttttcgagatggagttttgctcttgtcacccaggctggagtgcagtggcacaatctcggctcactgcaacctccacctccagggttcaagcaattctgcctcagcctcccgagtagctgggattacaggcacccgccaccacacctggctaatttttgtatttttaatagagatggggtttcaccatgttggccaggctggtcttgaactcctgaccttaagtgatccgcccgcctcggcctcccaaagtgctgggattacgggcgtgagccactgtgcccgcttgtgactgacactaggcagtgtgactttgttagcttccttgacccttctggtaatccaatttcctggccagtgtgatggtgtgataaatagacttgttgagaggatgaaatctgtcaaaaacacctgacacgtggtaggtgtctacaagaagctattgtcacattttatcggtagaaccccaggatgtcagagccaggagggatgttctagtgatgcccactccttttataaacaatgccccaggaggacacagcttgtcagagtataggtcccagatttaggtttcttgacctcagggttcctttcctgccagggcaccaaaatgaggcactatataggcttaacaagaggcagtctagggcacgtttaagcatttctgcttgtatatgcataaaatatctttggcacgctcactgccaagtaacccccacacgttggtctgggaaacttggtggtgagagagcagaatagtgggggacattacactgtgtatgtgtttgtgcctttggctgttgagccatgtgaatatattgcctattcttttttttccctcactctgtcgcccaggctggagtgcagtggtgctatcttggctcactgcaacctccgcctccaggttcaagtgattctcctgcctcagcctcctgagtagctgggattacaggcgcctgccaccatgcctggctaatttttttgtatttttagtagagacagggtttcaccatggtggccaggctggtcttgaactcccgacctcaagtgatccacctgccttggcttcccaaagtgctgggattacaggcgtcagccaccatgcccagcctcttatgacctattcttttaataaaagaggcaggtgggggctgtggggccacctacactcactctggacacatttgtttgggctccaggtgcggcggcagcacatggagcgttgtaccagcttcctggtggatgagctgggcgtggtggatcgatcccaggccggggaccgcatcttctttgtgtctgctaaggaggtgctcaacgccaggattcagaaagcccagggcatgcctgaaggaggtaatgatgagaacagatgtcctccttttctctgatgtttgagacattttgtctcgtgctgaggagtctgtcagtagaaaatccttctgagaaggggatgctgagaagagcagagaggctcttgctctttagccagtggcttggtttctggggatttcatcgttttcctctgctgccaagttgtttctggactaatgcagtacaatcctcctagggggcgctctcgcagaaggctttcaagtgaggatgtttgagtttcagaattttgagaggagatttgaggtgagtcctctgattctggtatctggcgattctgtgcctccccagctcccattggctgtgtccctggcagtgaaaaccagagtctggcccttggttgtaggcccctggtggcccccacctccctccgtgcctctgtgtgttccaggagtgcatctcccagtctgcagtgaagaccaagtttgagcagcacacggtccgggccaagcagattgcagaggcggttcgactcatcatggactccctgcacatggcggctcgggagcagcagtaagagtccaagactgcagataggtggagagagctgccgagacaagggtgctccacccctgccttgggcagttaggacacgccttgatggcagggctgagtctctgggctcccatccagagccctttccctggccaccagaccatgttagaaccacatagacagcctggtgaggagggcggctgggtgcttcatcaccccacctggtctgtgcagcacgattccctgtgttggaggtcttggcccatgccctgctgagctctgcagccattctcagagcctgaacacatttttcaaaacaacattccagccaggagcagtgactcacacctgtgatctcaacactttgggagaccaaggcaggaggactgcttgaggccaggagtccagcccagataacatagtgagatcccatctctacaagaattttaaaaatcagctgggtgtggtggcacacacctgtagttccagctacttgggaggctgaggcaggaggatcactggagcccaggagttcagggttccagtgagctgtgatcgcaccactgcactccagcctgggcaacagagtgagaccctgtcactaaagaataatatgaaaacaccttgcttctatcacacagaattgactttctcagttgtttatgttaagttaaaattttaaaaagttcagttcccttttgattcttttgcacttgtcccagtgtcactctgccctgaggcaccataatcatgaatttacattgttctatcacccaaacagtactttttacataaatgctgaggaatatgtcaggtttttacatgcttcagatgtacagatgtggcatcacactgtctgtcactgtacctggctttgctttctcaacatcgtttttccctctatccttgttagtatgtgtagtttgtttatgaatcggaactgctgtagtatattccattgtgaatatgcctcattttcctatggatggaattttagattttttttttgctattggaaaccctactgcagtggacatttgttcatgtgtccccttgtgcacctttttaagagtcttcctggggtgagttcctaggggtgtggcaattctgttttagggtacacgcgtttccagttttagtcagttttcttgatgctcttcagaacagccgtacccattcattgcatgaccagtactgtccataggccttccatttcatcagccctcaccagaacttcagacctggtcatttttgccaggccttggtagaaaatagtgcctttaaaaatttcatttacaactgggcatggtggctcacgcctgtaatcccaacactttgggaggccaaggcggatggatcacctgaggtcaggagttcaagaccagcctgaccaacacggagaaaccctgtctctgctaaaaatacaaaattagctgggtgtggtggcgcatgcctgtaatcccagctactcgggaggctgaagcaggagaatcgcttgaacccaggaagtggaggttgcagtgagtggagatcgtgccattgcactccagcctgggcaacaagagtgaaactccatctcaaaaaaaaaaaaaaaatcatttctgtgattactagtgaggttgagcttttttccctatattaattggcagaatttgtttaaacccccttaaagcgccctccctgttttgtgcccaccacctgacccacatcgaagactgaagagtgcatggttggctgcagggtcctcttcttacctgggaaggggaaggccatgcccctgggtgcgtgtgtgcagccctgccaggcaagatagcgggcagggcggcgtgggatttctggcatcccctcttgctcctctgcttagtcagacaggaacatggatttctcaccagtactctgctttcagggtttactgcgaggaaatgcgtgaagagcggcaagaccgactgaaatttattgacaaacagctggagctcttggctcaagactataagctgcgaattaagcagattacggaggaagtggagaggcaggtgagaaatgaggaggaggcattctgggaagatttggactccgagtagagtccagaagaaagcagacctcctcctcttagggacttctcagcctttcagaagaaagttgtggccctgtttcaagaatacagagctgccgtttgggttccattgtcgggttgtgtgatgctgggcatgttccctttcctctggacctccacagatcatgtgggcgtttgatcagccagtttcccagaccctctcacttcagaggctttaattccatagaggagctgaggaggctgctggtttgagaggaaggatgtgccatctgctaggatctctcctggtgctgcaggagtgaactttggtcttccttgatacttaacagtgtgcttccttttgctgtaggtgtcgactgcaatggccgaggagatcaggcgcctctctgtactggtggacgattaccagatggacttccacccttctccagtagtcctcaaggtttataagaatgtgagtcatggagcaacaggtcctcttggcaggaggcccccaaaagtgattcaacccctgttggtctgggtcagggccccccagcagtgacagtagaagccacagagacaaggcccaggcttccgtcagccttctggggtcacctggtggatgtggcctgaagggaattttgatggacatgcttctcttaacttccctcttctggtggcaggagctgcaccgccacatagaggaaggactgggtcgaaacatgtctgaccgctgctccacggccatcaccaactccctgcagaccatgcagcaggacatgataggttagtgcccatggggaactgggcagctgtggccctgggctgcccaaagatcagatgcggaggccaagctaaagaaatcaggactttccttatctgtcacttttcatgatgattc

SEQ ID NO: 1475 - DNA, 6000 bp, Homo sapiens
gagtcaactaaacctctttcctttacacattacccagtcttgggtatgcctttattagcagcgtgagaacagactaaaacaacacaccttgatatacttattacttttatctatctatctatctatttatttatttatttatttatttatttatttatttatttattttgagacagcatcttgctctgtcgcccaggctgaagtgcagtgccgcaatcttggctcactgcaacctccacctcccgggttcaagagattctcctgcctcagcctcccgagtagctgggattacagacacacaccaccacgcccagctaatttttgtatttttagtagagacagagtttcaccatgttggccaggctgatctcgaactcctgacctcaagcgatccatccgcctcagcctcccaaagtgctgggattacatgtgtgagccaccatgcccggccctatttgtattttagacataacaactgatgagcattaaagttaaaatagagacaataagactgacagaacagactgtggcaataacatcccaaattatagacaggacctaaggctgtgccacgcaagggttcagccgtgcactcctaccttaaaaaataaactatgttcaattgccacaaggtttttctttttctctagcagctaaacgactacttgcctcgagataaacagtattaagacaattacgactcattcagctcacagaggccaactggaactcctgttccaccagccgtaactacagctttggacaaagaaggtgatttcgataactttctccagctaagaagaccaccaaccagggactggtcctggacagtttacagaggctgtgcacttgaatgcttttgtgccctgaaaagaccttttgacatatagggcctaattgtaatacatttatttaaaattttttttagagacagggtcttggtttgtcacccaggctggaatgcagtggcacaatcatagctcactgcagccccgaactcctgggctgaagtgatcctcctgcctcagcctcccaagtagctgggattacaggtatgcattactatacccagctaagcttttatttttagtagagatgagggggagtctcattatgttgcccaggcttgtctccaattcccagtctcaagcgatcctcctgccttggcctcccaaagtgctgggattacaggcatgagccaccacacctggcctgtaatacatttaaatgttaagtccaaacattagttcaacctaaagtaaacatgggtcatatattaccacctatgtaacaaacctgcacctcctgcacatgtacctttgaacttaaaataaaagttgaagagaaagaacaaattcttaagaggacagctctcatattaagttttcttactatgatttaaaaaaaatttttttaagaaatggggaagtatggaaccaaaaaggggcctgcatatccaaagcaaaactaagcaaaaagaacaaatctgggagcatcacattacccaacttcaaactatactacaaggctatagtccccaaaacagcacggtactggaataaaataggtacatagaccaaacgaacagaatagagaacccagaaataaagccaaatacttatatccaatggatcttcaacaaagcaaacaaaaatataaaggggggaggggcaccctattcagtaaatggtactgggataattggcaagccacacgtagaagaatgaaactgtatcctcatctctcaccttatacaaatatcaactcaagatagatcaaagactgaaatctaagacctgaaaccacaaaaattctagaagacaacattggaaaaactcttctggacattggcttaggcgaagactttatgactaagaacccaaaagcaaatgcaacaaaaatgaatataaataaatgggacctaattaaactaaaaagtttctgcacagcaaaataaataatcagcagagtaaacagacaacccacagagtgggagaaaattttcacaaactatgcatccaacaaagaactaatacccagaatctacaaggaactcaaacaaatcagcaagaaaaaagcaaataatcctattaaaaagtcacatgctaaggacatgaacagacaattcttatttttttttttttgagacagagtctcacactgtcgcccaggctggagtgcagtggcacaatcttagctcactgcagcctcaggatcaagcaattctccctgcctcagcctcttgagtagcttggtactacaggtgcccaccacgatgctggctattttttttatttttatttttttgattttttagtagagacgaggtttcgccatgttgaccaggctggtctcgaactcctgacctcaggctatctgcccacttcggcctcccaaagtgctgggattacaggcgtgagccaccgcgcccggcccgacagttcttaaaagaagatacacaaatggccaacaaacgtgaaaaaatgctcaatatcactaatcatcaggcaaatgcaaatcaaaaccataatgccatacctactcctgcatgaatggccacaatcaaaaatgaaaaaatgatagatgttgacatggttgtggtgaaaagggaacacttttgcactgctggtgggaatgtaaactagcacaaccactatggaaaacaatatggatgttccttaaagaactaaaagtaaatctgccattagatccagcaatcccactagcgggtatctacagagaggaaaataagtcattatatgaaaaatacacttccacacgcatgtttgtagcagcacagttcacaattgcaaacatatagaaccatctcaaatgcccatcaatgcacgagtggataaagaaaatgtggtatatatatataacatggaatactactcagccataaaaaggaatgaaataatggcatttgcagcaacatggatggagctagagaccattattctaaatgaagtaactcaggaatggaaaaccaaatatcatatgctctcacttttaggtgggagctaagctatgaggacgcaaaggcataagaatgacacaatggactttgggaactcagggggaaaggtgggaggggtgagggataaaagactacactttgggttggctgggcgcagtggctcacgcctgcaatcccagcactttgggaggccgaggcgggcggatcacgaggtcaggacatccagaccatcctggctaacacggtgaaaccccgtctctactaaaaatacaaaaaattagccgggcatggtggcgggcgcctgtagtcccagctactcgggaggctgagtcaggagaatggcgtgaacctgggaggcggaacttgcagtgagcccagatggcgccactgcactccagcctgggcaacagagcaagactccatctcaaaaaaaaaaaaaaaaaaaaaaaaagactacaccttgggtagaatgtacactgttcaggtcatgggtcccccaaaatcacagaaatcatcactaaagaacttatccatgtaaccaaacaccatgtgttccccaaaaactactgaaataaaaattaaaaatatagttaaaaagaacgggtgaagttagccagttgtgggtgcacatgcctgtagtctcagctactggggaggttgaaatgggatgcttaagcctaggggtttcagtccagccgggcaacatagcgagaccccatctaaaaaaaaaaaaaagaaagaaaagaaagacggccgggcacggcggctcacgcctgtaatcccagcactttgggaggctgaggcaggtggatcacgaggtcagaagatcgagaccatcctggctaacatggtgaaaccccgtctctactaaaaatacaaaaaattagccaggtgttgtggcgggcgcctgtagtcccagctactctggaggctgagacaggagaatggcgtgaacccgggaggcggagcttgcagtgaaccgagacagcgccactgcactccagcctggaagacagagtgagactctgtctccaaaaaaaaaaaaaaaacctaaagacaagaaggggtgaagtcaactgctgggcttttttgtttctctagccattgtgaagacaggagtgagttgccagattggcatatgttgcatcccactgaaggctagtggacatgaatctctagggaacagtctccccactgcatactttcttcagctgtgcttggctgtttgggagctaacaaagagaaaaggtgcatttggattcacacagcgttggtattcttaccaaatccatgtgacaaaaaggcaagggggcaaaagagcttacagtagtggcaagagtgttgttaaaattatagattatggaaaatatgcaggcctagaagtaaacaaaggagaaagccctcagactgtgagaaagtggagaagtcagtggcctagagctaccaaaaaggtagaagaggggccacggaggggccatgcaagtctgcagacacttttgttttcagacacctttattcacgtccaagacaatcagggaaggggataatgttcggtttagaaggtagaaaaacacaactgggatctgcagctttgaagccacaagtagattcatatctccggtccaccacttacaagatatgtgaccatggacattgatttacactttttgagtctgttttcccttttttaaaattaggagaataatactatcttataattggtgtgaggatttaaagagataatgcatgtaaagcgcttaacacagtgcctggcacacagtaagagctgaacacatgatgttactgttatatttggaagagaaaccaaggcaggggtacaatgaggacaactctgagcgccgaagtactgtaaggtggaacttttggatagctaggcgcatgcgtctgtctatgggcgctctcctagcgaggacgctgcgcatgcgccggaagttgcagccgggaagcctgcgaggtcggttccgcccgactctaacatggcggcgccctttgtctgctctggagtgccgtccccggccttctcgcggccgtgatgcacctccctctgcggtggggtccgggacatggcaggtgagtgtcaacaatcgcccggggccggggaagtcccgggagccggggcggaggcggcggaggatggggcgcggtgggacgccggtgacggttgtgtgggggaggggagggaagtggaatgggacgccaaccggggctgaggggacaccgctgggcgggagattgtggggtggcggggcggggggcgtcgccgggcgtgctggcggggagtgggcggccaggcgaccgcccgggcgagggggcgcgtgtcacctcccgggctggatgacaccccagctggtagcatctccgcccccgccgcacggctgtcaccgccccttgaccccgcgcgctgtcgagggtgggcgttctgcggccgcgagggagcgcagtgccggggcagctcctgtcggccggccggggcgggagggagcggggctgcccgggcctaggaggagctgacagaggaggccgacgctgtccctgtataaaagcatttcattcattcattcgtactgcggacggtggttcagcacctgatagatggtgaagctagagcgagtgatgcgggcggactcgatcctccaggatcctcgatcctggagttaggagtgtgaaccgtggagcccagcagcggggtttgaatccccattccctgctgtgaccttaggcacttttggctttttctctctgcctgggtttattcatcctttaagcagagatgataataaaatcagcctcctaagattgtaataaaggggaaatgaggctcctagaacacttatgggtacaaagtaaatgctgtgtgtttgttgctgttattaattgtatcaccattgtcacccagagctcagagacccatgtgggagacatacaggtaaatcagcaattctgatactgctgcgagggcagaaagccctccttcctctgaagcacggagtagagacaca

SEQ ID NO: 1476 - DNA, 6000 bp, Homo sapiens
aggagaaactagagaacagatgcagaaagagtggggtctggaggaaattactggttttccagctatgctttcgaaggctgtgatgtccaacaggaataacatatgagctacaaaaaacttaatatgtaatattaaattttgtggtagtcacattgaaaagagtaaaaagaagccaggcacagtgacacatgcctataatcctagcactgtgggaggccaaggcaaaaggattgcttgaggtcaggagtttgagaccagcctggggaacatagtgagaccttgtctccacaaaaaaattttaaaaattagctgggcgtggaggtgcacgtctacagtctcagctactagggtggctgaggcaggagaactgtttgaccccaggaggtcgaggctgtagtgagccaagatggcgccactacagtccagcctaggtgacagagtgagacccagtttccaaaaaaaaaaaaagagaaagaatcgtttccattggttagcgcatcactcccaggatcactggtttcatttttatagacactggatcagaaaattaatctttcaagtacaggtgtagctttctgtagccaagttgaatagaattacacttctgaggctgggcacagtggctcacgcctgtaatcctagcactttgggaggcgaaggcgggcaaatcacgaggtcagaagttcaagaccagcctggccaacatggtgaaaccccgtctctactaaaaatacaaaattagctaggcgtggtggtatgcgcctgtaatcccagctacttgggaggctgaggcaggagactgcttgaacctgggaggtggaggttgccaccactgcactccagcccgggtgacagtgcgagaccccacctcaaaagaaaaaaaaaaatgaattatacttctgaggctgtgcacagtggctcacccctataatcccgcaactttgggaggctgaggtgggaggaccactcgagaccagcctgggcaacagagagagaccttgtctctacaaaacattaaaaaagaaaaaaaatttagccaagtgtagctgtccatgcctgtggtctcagctacttgggaggctgaagcgagaggatcgcttgagcaaggaaggtagaggctgcagtaagctgggatcataccatcacccttcagcctgggtgctggaggagcaagattctatctaaaaaaataaaaaaaaaaaaaaaaaaaagaaagaaaaaatcacacctcacccctggaaaagaacttaagcgtagctgaatctaacttgcaatatgattttgctgaagatgaggttaaagagtgacggcaggctggcacttgcagccacatttccaaaattctgggtgtaaaatgctcagcacagtgccagacacctgtgcctcaaagtgtcagagaaatctcagccaccttctttcccttcccctctcccggttttgcaccaaaccatcctgtccctggagaatttgctcaattagaagcgaggtgaaattccaagcacagtttgaaggaggaagtgtcattttcagcttgcctgtaggtgcacctcactatgtaacatttgttacataagtggcagcatgacacgcctaactgatgaatgtctgttgcacacccaattccagccgggagagtcacgcaggctttccctgggagaatagtggtgtggaattgaggcatggagttgcaaaaattacttttgtcttctgacaagtagggccagttccagggtgttatacccaaagtgcttttctactgcagcataacctcaagaaaaaccagtttcaggagcaccacacctaggatcagatgatgcaatatgatattagcgtctcattgcatcagtgtgtctgaggcatgagtcttttaagctggcaaaaagcattataaaggggcaggagaaaaaaggaaaagacttgcagactgaaatctaaaggtactgtcagtggtgttcctaattggccacacagggtgtttagaggataaacacccagccacccgcctcggctgacaagcatcagcatgccatttcctgaaggggacttgatggcatatttaggcgaaattcttttctggttggttctacttatgctttatatcaaagcgtcaaagtttaacctctaaaaaatctttttaaatgcaggtctattaagaataggctttcaaagggtgcttctattccatcttgacttttctgaaaatctctgaaacgtaccagttgatttctcatttccaaagttcttttacataagcactctcagctctcttgacacacagacttttgactttgatcaaataccttagatttgggcctcttggtttctctgtcttcctttacaggacacttgatgcttcccagtcctgtttcttgcactaacaatgaatgaatgaatcacaaaaatcctagaactttatgcgttttcaagaagttgcctgaagaaggaacttccttgtgcggtacgcctcaggaaaaaagaagcaggagaaaagctttgagaggagagcaagtgacggtgagatcgtaatggaagtggggtggagaggtggagggtggagaccggtaggaagcaagcaaggcttttttcacccgtcccaggacacgcgaacgagatcaagcctcactgcggttcactagggtctatgcaggccctcgcacccctgcctacctcctcagaacccagcctcttggctcttctcaccccagccccaccagacagcttccctcccaggaggtgtctctcaagatctcgaaatgtggagcgtcccgttcactccacctggcctggaatacttttcctgccccctttcatcgggtcttattcatcctttaagttgttcagcataactttccacctgaatgccttccctggccctggactaggataaatcccctcgccataatgttcctacacaggcatcactttgtaaagcttaccactgttgtaattacttgtttactgatctgtctttccgttaggctgtgcgttccactggggtggaaaccttgttcactggctctgcagccccgggcactgtgggtcttgcatgtaccgggggctcagtaaatatttggcaaaaaatgaaaaagttcccctcaaagccagcttccagtgcctccacggccctcaaattaattatgaattaattcactaatacagcaaacctttatgtgattcttccgtgtcacagcaccttgttacatactgaggacacatccacaggcaaataaaactcagcttctctctgcacaggaaaaaattattcaaattgtattcatctttcattccaatcactcaattagggcacgtcccttgttggctgctgcgtgagcgaagtaactattttccagcgagtgtcctcatgtgacctgtctagacgtgcccaggaaaaacaatccaacatcctcctaagccgcaaagaagtccctgacgcgcaggccgcactgcgtggaaggcccaaagcgcgctcgcgggcccgcgaaaggcgcaggagcagcggagccgaggcgggcggcgaggcgcgcggcgcgcggcgcaggctcgggtgggcagggcagggccaggccgggcggggcgggggcgccggcaacgggtccgccggccggcagggggcgcgcgcgccccgcgccccgcgcctcccgccccgccgcgcgctcgcttgccgcgcggccgcacatgtgtttctgttttgtgttgtagcatttgttctggaagctcgtatttacattttaagtgtatctggtgagtgggctggagccctcgtctgggccggaaaaaaaaaagccctccgatccgtcttttagttgcttctcttccttttttctctccggtttctcatcactccaaccaggtagggtctgaaaatcgacagtgatcagtttgtggggtctgggaaagtttttttttttttcctttttttaaagagaaaaggttaaaaaaaaacctgggggaggggggctgggtgattgaaggaataaaaagaggaaggaaggcggatccacgtggtttaatcggagacagacagagatcccattgttcaaaatcaattaaaaaaaaaaaaaaaagcagacaggggagagcgcagggacgccggggagctggcggcggccctggacactttgcagtcgaatcggagaccggccgggccgcacggccggcaagggggctgggagagagttgggcaccattaaagtttttatttttcgtgtctgtgcgagcaggtgtttggggctggggtccagctttcttcgggctcttcccccgtcgccgggggcagtccgccgtagggattcggctaactagagcccgaggtcggcacccctgagctggggccgaacgggggtccagggctgatgcggggtgggggagagcgttgcattaaatgccatgagtgggtttggggggagactgcggagacaaaagcagcaggtggggtagccggggagcaggggctcccttaccacccaggtgccaagggggaatcctggaagtgtcccgaagccttctttaatgaaaatctaggggactggaggctggttttactttccctttacttttggggggcgaggttgcaactgtgatgctttgtgggcaaacctaacttacggataggccgggggtctcaattctccctccaggggattgcctctggggctcccggctgccctgcgggattccccgaaggagccgcgccggggccagggaggggcgcgatttcctctcccaactcgccccctctccgcccaccctgcggccgccactttggggagggcagaggaggaagtggaggccgggtggctcgtctccgctcccctccccccgcgcagtttataacccgtccattgtgcgccgctgccccgtgtctccctccagccgcgaccatgcccaggaagaaggcggcggcggcggcctgggaggagccgagctcgggcaacggcactgcccgcgccgggcccaggaaacgcggcggcccggcgggcaggaagcgcgagcggcccgagcgctgcagtagcagcagcggcggcggcagcagcggcgacgaggacggcctggagctcgacggggcccccggcgggggcaagcgcgcggcgcggccggcgacagcaggcaaggcgggcggcgcggccgtggtcatcaccgaacccgagcacaccaaggagcgcgtcgtgagtgagggtcagggtagacgggtgggcgcagggccggggccggcgggctcagcgacgcggcacggcgcgcgttccagccgggggccgcctcgcgtcacgctccctcccggcggccgggccggcgcaggccgcgggctgaatcattgcctccgcctccgcgcaacaaaagggctcggtacggggcgcgcggcccgcggcctacccgaccccgggcaccgcgcgggcggttggcggttggggcgcgcgcccgggcccgcggcgggggaggggcggccgaagcccgcacgagggggtcatggccccgcccccacagctccctctgcgcccctccccccccgccccgggaaaggggacctcggtaagttcgcccggcctggaagagggggcggccagcgggccccacacgtccgtggccgccgctgcgcccgggcgccgcggggagggggcggccggcgctctgcggggagcggccgtttgcgccggggctttgaggttcccgccgcctcggctccggcgcccggggggggcggggcctgacggccgccgcgcatgctccgcagagccctcccccgaggtcggggaagccccccggctgagcggtgctcgggctttgtttgccgccggtggtccgaagctgcaggatgctcgcgagggctctgttgtagcccccccaagtgaagaagcatctcctagggtcctgggcgggcttctgttttctcaaatcttaattaaggtcgtggctgactcaagttaacgttcccgaaaaagcctgcagagccggagatctgaacccggcatctgccgccacagcatctccccacccccacagaac

SEQ ID NO: 1477 - DNA, 6000 bp, Homo sapiens
cccagctatttgtgaggatgaggcaggagaatcgcttgaactgggaggtggaggttgcagtgagcccaaattgcgctactgcactccagcctgggcaacaagagggaaactccaactcaaaaaaaaaaaaaaaaaaaaaaaacacattctgattcagtaggtctgggggctgaacctgagattcagtgtttatttttatttttttgagacagggtctcactctgtcacctaagctggagtgcaatggcatgatcatggctcacagcagcctggacttcccaggctctggcgattttcccacctcagcctccaaagtagctgggactacaggtttgcgtcaccacacctgactaatttttttcttttcttttcttttatttgagagaagtctcactcttatcccccaggtttgagtgcaatggctcgatcttggctcactgcaacctccgcctcccgggttcaaacgattctcctgcctctgcctcccaagtaactgggattaagttgcctgccaccacgcccggctaatttttgtatattttagcagagacgggagtttcaccatgttggccaggctggtttcgaactcctgacctcaagtgatctgcccgcctcggcctcccaaagtgctgggattacaggcgtgagccactgcgcctggccgcggctggctaatttttttctaatttttgtagagatggggtctcaccatgttgtccaggctggtctccaactcctgggctcaagcaatcgtcctgcctcagcctcccaaagtgctgggattacaggcgtgtaccaccacgcctggccagattctgtgtttctgacaatcctcctactgatgcagatgcctgtacacttcctggctatcctatctgccagctgtgtggcctcaggaggcctcagcatctccctgggcttcagttcttccgctggatattatttagatgaacaaacatatattgacagcttactacacgccgggctgctctgggtgcttgctagaaaaacaaagatgaagaagccacaagccaagcccaggcatgcctcacagacagagaacttaaaggtccaactacaatatttaaagactctgcgtttgaaaatttcatgactcattggcagaaataggacgaccggatctgcatctcccagaaaacatctctccaaacactatgacagggattccccgctgactactgtcctcagaatcagggaatacgaaatccagaagtaacctcaagagaaatttagcccaaactctatcttgccattttacagagaggagaaactagagaacagatgcagaaagagtggggtctggaggaaattactggttttccagctatgctttcgaaggctgtgatgtccaacaggaataacatatgagctacaaaaaacttaatatgtaatattaaattttgtggtagtcacattgaaaagagtaaaaagaagccaggcacagtgacacatgcctataatcctagcactgtgggaggccaaggcaaaaggattgcttgaggtcaggagtttgagaccagcctggggaacatagtgagaccttgtctccacaaaaaaattttaaaaattagctgggcgtggaggtgcacgtctacagtctcagctactagggtggctgaggcaggagaactgtttgaccccaggaggtcgaggctgtagtgagccaagatggcgccactacagtccagcctaggtgacagagtgagacccagtttccaaaaaaaaaaaaagagaaagaatcgtttccattggttagcgcatcactcccaggatcactggtttcatttttatagacactggatcagaaaattaatctttcaagtacaggtgtagctttctgtagccaagttgaatagaattacacttctgaggctgggcacagtggctcacgcctgtaatcctagcactttgggaggcgaaggcgggcaaatcacgaggtcagaagttcaagaccagcctggccaacatggtgaaaccccgtctctactaaaaatacaaaattagctaggcgtggtggtatgcgcctgtaatcccagctacttgggaggctgaggcaggagactgcttgaacctgggaggtggaggttgccaccactgcactccagcccgggtgacagtgcgagaccccacctcaaaagaaaaaaaaaaatgaattatacttctgaggctgtgcacagtggctcacccctataatcccgcaactttgggaggctgaggtgggaggaccactcgagaccagcctgggcaacagagagagaccttgtctctacaaaacattaaaaaagaaaaaaaatttagccaagtgtagctgtccatgcctgtggtctcagctacttgggaggctgaagcgagaggatcgcttgagcaaggaaggtagaggctgcagtaagctgggatcataccatcacccttcagcctgggtgctggaggagcaagattctatctaaaaaaataaaaaaaaaaaaaaaaaaaagaaagaaaaaatcacacctcacccctggaaaagaacttaagcgtagctgaatctaacttgcaatatgattttgctgaagatgaggttaaagagtgacggcaggctggcacttgcagccacatttccaaaattctgggtgtaaaatgctcagcacagtgccagacacctgtgcctcaaagtgtcagagaaatctcagccaccttctttcccttcccctctcccggttttgcaccaaaccatcctgtccctggagaatttgctcaattagaagcgaggtgaaattccaagcacagtttgaaggaggaagtgtcattttcagcttgcctgtaggtgcacctcactatgtaacatttgttacataagtggcagcatgacacgcctaactgatgaatgtctgttgcacacccaattccagccgggagagtcacgcaggctttccctgggagaatagtggtgtggaattgaggcatggagttgcaaaaattacttttgtcttctgacaagtagggccagttccagggtgttatacccaaagtgcttttctactgcagcataacctcaagaaaaaccagtttcaggagcaccacacctaggatcagatgatgcaatatgatattagcgtctcattgcatcagtgtgtctgaggcatgagtcttttaagctggcaaaaagcattataaaggggcaggagaaaaaaggaaaagacttgcagactgaaatctaaaggtactgtcagtggtgttcctaattggccacacagggtgtttagaggataaacacccagccacccgcctcggctgacaagcatcagcatgccatttcctgaaggggacttgatggcatatttaggcgaaattcttttctggttggttctacttatgctttatatcaaagcgtcaaagtttaacctctaaaaaatctttttaaatgcaggtctattaagaataggctttcaaagggtgcttctattccatcttgacttttctgaaaatctctgaaacgtaccagttgatttctcatttccaaagttcttttacataagcactctcagctctcttgacacacagacttttgactttgatcaaataccttagatttgggcctcttggtttctctgtcttcctttacaggacacttgatgcttcccagtcctgtttcttgcactaacaatgaatgaatgaatcacaaaaatcctagaactttatgcgttttcaagaagttgcctgaagaaggaacttccttgtgcggtacgcctcaggaaaaaagaagcaggagaaaagctttgagaggagagcaagtgacggtgagatcgtaatggaagtggggtggagaggtggagggtggagaccggtaggaagcaagcaaggcttttttcacccgtcccaggacacgcgaacgagatcaagcctcactgcggttcactagggtctatgcaggccctcgcacccctgcctacctcctcagaacccagcctcttggctcttctcaccccagccccaccagacagcttccctcccaggaggtgtctctcaagatctcgaaatgtggagcgtcccgttcactccacctggcctggaatacttttcctgccccctttcatcgggtcttattcatcctttaagttgttcagcataactttccacctgaatgccttccctggccctggactaggataaatcccctcgccataatgttcctacacaggcatcactttgtaaagcttaccactgttgtaattacttgtttactgatctgtctttccgttaggctgtgcgttccactggggtggaaaccttgttcactggctctgcagccccgggcactgtgggtcttgcatgtaccgggggctcagtaaatatttggcaaaaaatgaaaaagttcccctcaaagccagcttccagtgcctccacggccctcaaattaattatgaattaattcactaatacagcaaacctttatgtgattcttccgtgtcacagcaccttgttacatactgaggacacatccacaggcaaataaaactcagcttctctctgcacaggaaaaaattattcaaattgtattcatctttcattccaatcactcaattagggcacgtcccttgttggctgctgcgtgagcgaagtaactattttccagcgagtgtcctcatgtgacctgtctagacgtgcccaggaaaaacaatccaacatcctcctaagccgcaaagaagtccctgacgcgcaggccgcactgcgtggaaggcccaaagcgcgctcgcgggcccgcgaaaggcgcaggagcagcggagccgaggcgggcggcgaggcgcgcggcgcgcggcgcaggctcgggtgggcagggcagggccaggccgggcggggcgggggcgccggcaacgggtccgccggccggcagggggcgcgcgcgccccgcgccccgcgcctcccgccccgccgcgcgctcgcttgccgcgcggccgcacatgtgtttctgttttgtgttgtagcatttgttctggaagctcgtatttacattttaagtgtatctggtgagtgggctggagccctcgtctgggccggaaaaaaaaaagccctccgatccgtcttttagttgcttctcttccttttttctctccggtttctcatcactccaaccaggtagggtctgaaaatcgacagtgatcagtttgtggggtctgggaaagtttttttttttttcctttttttaaagagaaaaggttaaaaaaaaacctgggggaggggggctgggtgattgaaggaataaaaagaggaaggaaggcggatccacgtggtttaatcggagacagacagagatcccattgttcaaaatcaattaaaaaaaaaaaaaaaagcagacaggggagagcgcagggacgccggggagctggcggcggccctggacactttgcagtcgaatcggagaccggccgggccgcacggccggcaagggggctgggagagagttgggcaccattaaagtttttatttttcgtgtctgtgcgagcaggtgtttggggctggggtccagctttcttcgggctcttcccccgtcgccgggggcagtccgccgtagggattcggctaactagagcccgaggtcggcacccctgagctggggccgaacgggggtccagggctgatgcggggtgggggagagcgttgcattaaatgccatgagtgggtttggggggagactgcggagacaaaagcagcaggtggggtagccggggagcaggggctcccttaccacccaggtgccaagggggaatcctggaagtgtcccgaagccttctttaatgaaaatctaggggactggaggctggttttactttccctttacttttggggggcgaggttgcaactgtgatgctttgtgggcaaacctaacttacggataggccgggggtctcaattctccctccaggggattgcctctggggctcccggctgccctgcgggattccccgaaggagccgcgccggggccagggaggggcgcgatttc

SEQ ID NO: 1478 - DNA, 6000 bp, Homo sapiens
tcctgggttcaagtgatcctcccgcttcagcctcccaaagtgttgggattataggcatgagccaccatgcctggactaaagcagagagcttgaagggagcctctagaaattagatatgaattttgtgggtataggatctgtgatgcagaaaaggttgagaactcctggatatacaaggctgtaggggccaaaagcagacataggtgcttagaccctggagtaggtgggagctggaagatgattttgatggtgctgagtagctggaaatttgaaaatgggggtaggatgccgggcgcggtggctcacgcctgtaatcccagcactttgggaggctgaggcgggtggatcgcctgtagtcaggagtttgagaccagcctggccaacatggtgaaaccccatctctactaaaaaatacaaaaattagctgggcatggtagcagttgcctgcaatcccagctactcgggaggctgaggcaggagaatcacttgaacctgggaggggaggttgcagtgagctgagatcgcaccattgcactccagcctggttgacagagtgagactctgtctcaaaaaaaaaaaaaaaaaaaaaaaaattgggggtgggaataggggttggaagaggtatagatttgggagttattacctagagggtagggacaagtacctcatgggcagacaagcagggcaggggtggcagtgattcatcaagagtttggcagtcataagcaacagaaacctactcaacctcgttcaggcaatagagggaatttattgctaatgtgactgaagattgaagcaagactggatctgatgtctcatgcaatgccactgggacttggtttcatgtctccatctctcagttctgtttccccctctgtcttggtctcattctcaggcagcatctctgcttgcagtgggaagctggctgccagcagtgccacgattacatcctactctcagcaaacagagattcactgaactgaatagttgtgaccaaagttccagaattaaatctcattgggtcacatgcctgttgctgaaatggtgtggcaacagggctctctataatgctgtgattggccaagcctgggtcacgtgtccattcccgcaactagagatagtgtcatctctagagccacatggattgagagttggggcaggggctgctctaggagaaatggaagtgctgttaccagaaggaagaatggacaccggaatggtagccaccgggaagggagccggagtcccacaggctgtccctcctgttaacatgaggcagctatagcagtggggcagtagcggggaggcactaggaggctgggggctgggccagcagtgagggacatggtagattgggtcaagtaatagtaacaccattgccactgctgtttggggctgtgaaaaggtctaggagggttcttctgacaaaaaacctgacaacataaaagacatagtgctaagtaagtccttgtcctcagaataaaggcaggaaaagctgaacagttgggtgacaccccatcaagatattgctgctactggaaagggcagacgttgtctggggacattcatgggattgtgagacaggatgaaggaaagggcactgccagctggacttgtgaagggaagaaacaaccattttcccctcaagtttaaaaaatgaagcttatgcatttttacaatagtaataaattcacaatagcccaaaacaacccaaattccaacagtaggagtctgggtaaatattgcaatgcccggagagtaaaatgcagcctttacaaatgatgctttatttgacatggaaagatgttcacaatgtagtttttttgttttgttttgtttttgtattttttgtagagatgggtgggggcaggtcttgctatgttgcccagactggtcttgaactcctgggctcaagtgatccacccgcctcggcctcccaaagtgttaggattataggtgtgagccacattagaggtaggactacagctgaagcttatcttcctgttttttttttttaggtggggttttgttcttgttgcccaggctagagtgcaatggcgcaatctcggctcactgcaacctctgcctcccaggttccagcgattctcctgtctcagcctcccgagtagctgcgaatacaagtgcatgccacacccagctaatttttgtatttttagtagagaaagggtttcaccatgttggtcaggctagtcttgaactcctgacctcaagtgatccgcccacctcggcctcccggagtgctggaattacaggcgtgagccaccgcacctggcttttttttttttttttttttgagacagagtttcacttttttgtcgcctaggctggagtgcaatggcatgatctcggggtcactgcaacctccgcctcctggattcaaatgattctcctgcctcagcctcccaagtagctgggattacaggcacctgccaccacaccgagcaaatttttgtgtgtgtgttttttagtacagatggggttttaccatgttggtcaggctggtcttcaactcctgacctcaggtgatccaccagcctcagcctcacaaagtgctgggattacagatgtgagccactgtgcctggcctgaagcttatcttctaatttctctataataaacctgcttgatagtgtggtagtgtcatagtcaactagagccagcctcctgagtgcaagtctcagctctgccactgcttggcatggcggctatggacaagtctcttaacacctctgagcttcagttcatgtaaccataaagtgggggtaacagttcttaactcatagggtggctgtgagtattaaattagctactactacctgcaaagctattagccatacctgcagtaaacactaaaaaatgtagttcttatttttgggtaattaaaaaatccaaaagagggctgggtgcggtggcttacacctgtaatcgcagccctttgggaggccaaggcaggtggatcacaaagtcatgagttcaagaccagcttggccaatatggtgaaaccccgtctctactaaaaatacaaaaattagctgggcatggtggtgggcacctgtagtctcagccacttgggaggctgaggcaggagaattgcttgaacccgggaggcggagattgcagtgagccgagatcgaaccactgcattccagcctgggtgacagagcgagactccgtctcaaaaaaaaaaaaaaaatccaaaagaaaatatgactataagtcaatatactggaattaagtgtctttgttggccaaatagctgtggcagtagacaataaatgagctgttattaagataagcaatttttttttattttttttgagacagagtctcgctctgttgcccaggctggagtgcagtggcgcgatcttggctcactgcaagctccgcctcccgggttcacgccattctcctgcctcagcctctcgagtagctatgactacaggagctcgccaccacgcccggctaatttttttgtatttttagtagaggcggggtttcaccgtgttagccaggatggtctcgatctcctgacctcgtgatccgcccgccttggcctcccaaagtgctgcgattacaggcatgagccaccgtgcccggcctaggataagcaatttaagcgatttttctctaacatggggaaacatctaagaataagagagggaagttctctattttcctgaagctttcatactagcagagaagacaaataatagatactgcgaagataggatgattgaagaatgcagtgatataaatttgggggaagaggagggaggcagagcaaagaaattcaaggccttggccagacgtaatgtctcacaccttgtaatcccagcagtttgggaggctgaggcaggctgatagcttgtgtccaggagttcgagaccagcctgggcaatccagcaaaaccctgtgtctacaaaaaaatacaaaaattagccaggcatggtggcatgcgcctgtggtcccagctacttgggaggctgaggtgggagaatcgccgggacgtcgagattgcagtgagctgagatcgtgccactgcactcctgcctgggtgacagagcaagaacgtctcaaagaaaaaacaacaacaacaacaacaacaacaacaacaaaaacacaaggcctgtggttgggggaaggttgtaactctaaaaaagacccatgtggctacagcgagggacactgggtgtaggtagagataagaagagtgatactcagttctcacatcacggcggactgaatacaggcccggggagtgagagaccatccacccctgtgatctggggcaagtcaccagccctttcagagaagcttccgtcttctctgcaaaatgggacaataccttgcttcacaagcttgcaaggatcaaaagaactggtagtgggccgggcgcggtggttcacgcccgtaatcccagcactttgggaggtcgaggcaggtggatcacttacttgaggtcacgggttcgagaccagcctgggcaaaatggtgaaaccccgtgtctgctaaaaatacaaacattagcctggcgtggtggcaggtgccagtgatcccagctactcgggaggcagaggcaggaggatcgcttgaacccaaggggtggaggttgcagtgagctgagatcgcgcgctgcactccagtctgggcaacagatcaagactgtctcagaaaaaacaaacaaaaaagaactggtagaggaagcgctttgcatactatcgttcacagtattattacaaatacaaccattaggaaaacatgcagagcatagccccgaactcacgagctgcgccggcccgcgcgtgcgcgacaggcgggcggagccagggcagtccaggcaccgccttgacccgccccagcctcttccccttccctgttcctcccacttccgcgggcacccaactgtgcgtctcctgcgcgctgacgtcaggtgcgtgcccctgtccggcagccgaggagaccccgcgcagtgctgccaacgccccggtggagaagctgaggtgagtgcggggcccgaggttccccgcgggagctgccaccctaccttcccatccccgccgtctccgtcctctcccagtcctcggggacaccccgtctgcgggatcgtggggggcccgggagcacgggttgtgggggagtgcccggctcgcgctgcgtcctccgggcgggcgcgggtccgcgttctgtgggggagccggggcgggggtcgcggccggggaggcagggggcgcccgtctgaggaggggcgcgcggccggggctcggggcgcgagcgggaccgggctgtcaccggcagcggcggaaggaagggggtcacacccatcctgggcgcccgggctcccctccccccagcccggcccggcgggctcctaagggcggccgggggcctcagagcgactcgcgggcgcttgggccgggccgggcgccggtcttccgtgctggcaggctgcgttccgtgccctgcgctccggcctggacttcctgcttcgccgggcgccgccgcggacattttgcggcgggggtgggggggcgggggaggggagtggcgttgcggccgcggcggggcggtggcaggagggcagctcgctggctgctcgcggcggtgcctgtccgagctcccctccgcgccggccgcgtcctctgggcggggtggccccgagccacggcctccaggctgctcttcctttcggaggtcgagttcctagcatttccatccgctcctccagcccgctccctgccggtttagctgaagcttccctttcggggagttacctaactacctcccgaagccgtcgttctgctgcttggttaattcctcttatcgggggggaattttctttgttcgtttgtttttcctcccctttaagtccaagataaatgtagtgtggaagattacgtcatcgcggtataaggagtgagacttaactcctacaagtcagggacttaaattcaaacagcattttgcagccttagtcggtca

SEQ ID NO: 1479 - DNA, 6000 bp, Homo sapiens
gtgggaataggggttggaagaggtatagatttgggagttattacctagagggtagggacaagtacctcatgggcagacaagcagggcaggggtggcagtgattcatcaagagtttggcagtcataagcaacagaaacctactcaacctcgttcaggcaatagagggaatttattgctaatgtgactgaagattgaagcaagactggatctgatgtctcatgcaatgccactgggacttggtttcatgtctccatctctcagttctgtttccccctctgtcttggtctcattctcaggcagcatctctgcttgcagtgggaagctggctgccagcagtgccacgattacatcctactctcagcaaacagagattcactgaactgaatagttgtgaccaaagttccagaattaaatctcattgggtcacatgcctgttgctgaaatggtgtggcaacagggctctctataatgctgtgattggccaagcctgggtcacgtgtccattcccgcaactagagatagtgtcatctctagagccacatggattgagagttggggcaggggctgctctaggagaaatggaagtgctgttaccagaaggaagaatggacaccggaatggtagccaccgggaagggagccggagtcccacaggctgtccctcctgttaacatgaggcagctatagcagtggggcagtagcggggaggcactaggaggctgggggctgggccagcagtgagggacatggtagattgggtcaagtaatagtaacaccattgccactgctgtttggggctgtgaaaaggtctaggagggttcttctgacaaaaaacctgacaacataaaagacatagtgctaagtaagtccttgtcctcagaataaaggcaggaaaagctgaacagttgggtgacaccccatcaagatattgctgctactggaaagggcagacgttgtctggggacattcatgggattgtgagacaggatgaaggaaagggcactgccagctggacttgtgaagggaagaaacaaccattttcccctcaagtttaaaaaatgaagcttatgcatttttacaatagtaataaattcacaatagcccaaaacaacccaaattccaacagtaggagtctgggtaaatattgcaatgcccggagagtaaaatgcagcctttacaaatgatgctttatttgacatggaaagatgttcacaatgtagtttttttgttttgttttgtttttgtattttttgtagagatgggtgggggcaggtcttgctatgttgcccagactggtcttgaactcctgggctcaagtgatccacccgcctcggcctcccaaagtgttaggattataggtgtgagccacattagaggtaggactacagctgaagcttatcttcctgttttttttttttaggtggggttttgttcttgttgcccaggctagagtgcaatggcgcaatctcggctcactgcaacctctgcctcccaggttccagcgattctcctgtctcagcctcccgagtagctgcgaatacaagtgcatgccacacccagctaatttttgtatttttagtagagaaagggtttcaccatgttggtcaggctagtcttgaactcctgacctcaagtgatccgcccacctcggcctcccggagtgctggaattacaggcgtgagccaccgcacctggcttttttttttttttttttttgagacagagtttcacttttttgtcgcctaggctggagtgcaatggcatgatctcggggtcactgcaacctccgcctcctggattcaaatgattctcctgcctcagcctcccaagtagctgggattacaggcacctgccaccacaccgagcaaatttttgtgtgtgtgttttttagtacagatggggttttaccatgttggtcaggctggtcttcaactcctgacctcaggtgatccaccagcctcagcctcacaaagtgctgggattacagatgtgagccactgtgcctggcctgaagcttatcttctaatttctctataataaacctgcttgatagtgtggtagtgtcatagtcaactagagccagcctcctgagtgcaagtctcagctctgccactgcttggcatggcggctatggacaagtctcttaacacctctgagcttcagttcatgtaaccataaagtgggggtaacagttcttaactcatagggtggctgtgagtattaaattagctactactacctgcaaagctattagccatacctgcagtaaacactaaaaaatgtagttcttatttttgggtaattaaaaaatccaaaagagggctgggtgcggtggcttacacctgtaatcgcagccctttgggaggccaaggcaggtggatcacaaagtcatgagttcaagaccagcttggccaatatggtgaaaccccgtctctactaaaaatacaaaaattagctgggcatggtggtgggcacctgtagtctcagccacttgggaggctgaggcaggagaattgcttgaacccgggaggcggagattgcagtgagccgagatcgaaccactgcattccagcctgggtgacagagcgagactccgtctcaaaaaaaaaaaaaaaatccaaaagaaaatatgactataagtcaatatactggaattaagtgtctttgttggccaaatagctgtggcagtagacaataaatgagctgttattaagataagcaatttttttttattttttttgagacagagtctcgctctgttgcccaggctggagtgcagtggcgcgatcttggctcactgcaagctccgcctcccgggttcacgccattctcctgcctcagcctctcgagtagctatgactacaggagctcgccaccacgcccggctaatttttttgtatttttagtagaggcggggtttcaccgtgttagccaggatggtctcgatctcctgacctcgtgatccgcccgccttggcctcccaaagtgctgcgattacaggcatgagccaccgtgcccggcctaggataagcaatttaagcgatttttctctaacatggggaaacatctaagaataagagagggaagttctctattttcctgaagctttcatactagcagagaagacaaataatagatactgcgaagataggatgattgaagaatgcagtgatataaatttgggggaagaggagggaggcagagcaaagaaattcaaggccttggccagacgtaatgtctcacaccttgtaatcccagcagtttgggaggctgaggcaggctgatagcttgtgtccaggagttcgagaccagcctgggcaatccagcaaaaccctgtgtctacaaaaaaatacaaaaattagccaggcatggtggcatgcgcctgtggtcccagctacttgggaggctgaggtgggagaatcgccgggacgtcgagattgcagtgagctgagatcgtgccactgcactcctgcctgggtgacagagcaagaacgtctcaaagaaaaaacaacaacaacaacaacaacaacaacaacaaaaacacaaggcctgtggttgggggaaggttgtaactctaaaaaagacccatgtggctacagcgagggacactgggtgtaggtagagataagaagagtgatactcagttctcacatcacggcggactgaatacaggcccggggagtgagagaccatccacccctgtgatctggggcaagtcaccagccctttcagagaagcttccgtcttctctgcaaaatgggacaataccttgcttcacaagcttgcaaggatcaaaagaactggtagtgggccgggcgcggtggttcacgcccgtaatcccagcactttgggaggtcgaggcaggtggatcacttacttgaggtcacgggttcgagaccagcctgggcaaaatggtgaaaccccgtgtctgctaaaaatacaaacattagcctggcgtggtggcaggtgccagtgatcccagctactcgggaggcagaggcaggaggatcgcttgaacccaaggggtggaggttgcagtgagctgagatcgcgcgctgcactccagtctgggcaacagatcaagactgtctcagaaaaaacaaacaaaaaagaactggtagaggaagcgctttgcatactatcgttcacagtattattacaaatacaaccattaggaaaacatgcagagcatagccccgaactcacgagctgcgccggcccgcgcgtgcgcgacaggcgggcggagccagggcagtccaggcaccgccttgacccgccccagcctcttccccttccctgttcctcccacttccgcgggcacccaactgtgcgtctcctgcgcgctgacgtcaggtgcgtgcccctgtccggcagccgaggagaccccgcgcagtgctgccaacgccccggtggagaagctgaggtgagtgcggggcccgaggttccccgcgggagctgccaccctaccttcccatccccgccgtctccgtcctctcccagtcctcggggacaccccgtctgcgggatcgtggggggcccgggagcacgggttgtgggggagtgcccggctcgcgctgcgtcctccgggcgggcgcgggtccgcgttctgtgggggagccggggcgggggtcgcggccggggaggcagggggcgcccgtctgaggaggggcgcgcggccggggctcggggcgcgagcgggaccgggctgtcaccggcagcggcggaaggaagggggtcacacccatcctgggcgcccgggctcccctccccccagcccggcccggcgggctcctaagggcggccgggggcctcagagcgactcgcgggcgcttgggccgggccgggcgccggtcttccgtgctggcaggctgcgttccgtgccctgcgctccggcctggacttcctgcttcgccgggcgccgccgcggacattttgcggcgggggtgggggggcgggggaggggagtggcgttgcggccgcggcggggcggtggcaggagggcagctcgctggctgctcgcggcggtgcctgtccgagctcccctccgcgccggccgcgtcctctgggcggggtggccccgagccacggcctccaggctgctcttcctttcggaggtcgagttcctagcatttccatccgctcctccagcccgctccctgccggtttagctgaagcttccctttcggggagttacctaactacctcccgaagccgtcgttctgctgcttggttaattcctcttatcgggggggaattttctttgttcgtttgtttttcctcccctttaagtccaagataaatgtagtgtggaagattacgtcatcgcggtataaggagtgagacttaactcctacaagtcagggacttaaattcaaacagcattttgcagccttagtcggtcacccagtggcttatcctgcctgcttcccaacacgtcgtattcacagatgatgttttgaaagcttgttacttgtgttcatgaccgccttcagtgcacctaaaagctaggaaggtttaaaatcccaggattagtttgtgtcagggaataaagtgtaagacaacaccgtccacggccccttgcgtggcattaactttaaatagaggtccctttgactatactagaatgaggtgggtttatttgtgggaacacttttcggtccaaaatgactttcccagactgtttattctcctttatgacttactgcatgctgggaatctccctaggttgattcaagtgcactttttgtggtgaagttgtgttgaaaagaggatcagtttatgcctgatctatgctagacattttagttttgttattaaaaacgagacttcgatctttaagcaaaaaacttaatattttcataattttgagatcacaatttttattttttttgagacagggtctcaaagacgttactaaatataatggatattgcactcccaggctgcagtgcagtggcgcgatcttggcccaccgcagcctccgcctcccggggtcaagtga

SEQ ID NO: 1480 - DNA, 6000 bp, Homo sapiens
agtgagccgagatcacgccattgcactccagcctgggtgacagagcaaaactctgtctcaaaaaaaaaaaaagaaaaataaaaaacctagaagatatgggtattggaggggtagatgccaggaaggacagaaggaagatataccttatttcacaattttatttccttatgattggcagaatcattttaaaaaaaatatttgagacagggtcttgctctgtcatccagcctggagggcagtggcacaatcatagccaactgcagccttggactcaagcaatcctcccacctcagcctccctggtaactgggactacaggtgtgtgccacttcacccagctaatttttttttttgtagagatggggtctcactctgtttcccaggctggtcccaaactcctgggttcaagcaatctccccaccttgtccccccaaagtgctgggattacaggtgtgagccaccatgcctgaccctgcagaatcattttttatgctgtaagttgcccaaccccaattctaagttgtggtacaaatgaacttcactgttaaaaagaggtaggattcagttattggtgcaaaataacttagcttttctttttctttcttcttttttgagacggagtctcactgtgttgcccaggctggagtgcagtggcgccatcttggctcactgcagtgcgcctctgccccccgagttcaagcgattctcctgcctcaggctcctgagtagctgggactacaggtgcgtgccaccatgcccagctaattttttgtatttttagtagagatggggtttcaccgtgttagccagaatggtctccatctcctgaccttgtgatctgcctgcctcggcctcccagagtgctgggattacaggcatgaggcaccgtgcccagcgcagaataacttttctggttagcagaatggtaattgtttctatgtggcctctttgctgccgtagtgatttgacattatttaataggagattaacatagggtatatgaacatgtctgacttatatatattgtaaaacccaaagtctctcccctgattgctccctttacccaccccaatctgtggagtatctggtgacattaagaaaaaaaattaagaaaaaaagaaatagaggtcaggtcttaactatgttgcccaggctggtcttgaactcctcagctctagtgatcttcccactttggcctcccaaagtgcaaggattacaggtgagccactgtgctctttaatacatgtgttaaagggcaaaactacaacaaatttaaatctcacttggctttattgtgattttagagttgggcagtgtgcttcattccacaaaacagagttgagcagaagaggttggcttaatagaagagctgaggaaaggggaagcaaagaacaaagggcctattagttgtttcagagctacctttcttgtaaggcagggacagggagaagacagaacaatagaaaaataactgattagttaatatcaggttacttcaggctgcttttttttgtgtaagggttaaagcagagggaacttcattatcattccaattgaagattgaaagtggcctgtttggtaaactggctgtcatctctcctgtttctcagaaggtcagataacaactaaatttaagtttagtgatgtgaaactttagcatgagtaactccgttttgatttttagtctggtcacttggggcctagtgcaggagattagtccacaacggtagcctcctatagtttttatttaacacatgaaacaattattaatacatgccaaatgctttgcagaatagtcttaattagaacttgactctgaaatgaccatctttgtaatggtaactctacatttgactacatttgtgctgagaacaattagtataatcttcccttgatattgcaggggattgattccagaactctccaaggatacaacaatcctggaatgctcaagtttcttatataaaattacatagtacagttatccatctgtatctgtgggttctgcctctgtgtacatggagggctgactgtactgtaattatcttggagataaaaagtgttatgagttcctttctaagaagtttggaattgctgttttaaaattccttatattgactttaaagttaccattacttgttaaagactaataattaacatgtactaagcatgtactgtatgccaagcactgttgcaagttctttacatgtattatcttagtttaccttatgagaaaggtagtactgttttcatttttagagaaggggaaaccaagctacacagaggttgaataacacagaggttgaatagctagagtgtggtagagccactctgactccagaacccaggcttaacaggggactcacaaccaaccagtttgtaacaaattgcagagcagtcaggtcgggaagtctaagaagtggaagatttgtgggtaaatagaaaggggaagaacaaactcttatcttactcccttctcccaataaaattcagtagttatatgcagggtgaaaaacaggaaataagcttagcccctattttttgcttcctcttctttatatttgctttcctctttgcattgctggtaactcacggatatatacttgtcattccactagcactgattatatttgtttttattaatgtcacttctcagacagtatagtgtaatgtaatgtttatcaagagcagggacttgaggttgggcacggtggctcacacctgtaatcctagcactttgaggggcccaggcagttggattacttgaggtcaggagttcaagaccagcctggccaacatggtgaaaccctgtctctattaaatacaaacattatccaggcgtggtggcatgcacctgtaatcccagttgctctggaggctgaggcaggataatcgcttgaacccgggaggcagaggttgcagtgagcagagatcacgccactgcactgacacatacacacacacacacacacaacaagcagggacttgagagtcagactgcttgggtttaaattacagttctcccagttactggctgaatagccttggcttagttacttgctgagcctcactcttcttatctgtaaaatagggataatacagcacatacttcataggctttttgggaggatgaaatgtgtgaatatgtgtaatatgttttgaacagtacatagcacttagtaaatgctgtatgagtgtttgctgcttactattattatttgagtgcttttagatttaaccagtaattgattgatcttagggatcagggttgttaatctttaatgctgtattagttagtatgggtgcttcttagtgcataaaagggaaaggagaaggaaaaaggagatataaaaggaagttgaataaagaaggataaatatggctggctgcggtggctcatgcatgtaatcccagcactctgggactttgggaggccgaggtgagtggattgcttgagtccaggaattcaagaccagcctgggtaacagtgagacccgtctcttaaaaaaacaaaaaccaaacaaaaacccagccgggcatggtggcatgcgtctgtggttccagctacttgggaggccaaggtgggaggattgcttgagtctgggaggtggaggttgcagtgagctgaggttgtgccactgcactccagcctgggtgacgggagtaaaaccctgtctaaaaaaaagaaaaatatactgcagataattttgatgaggagcgggagagtgtatatttcatgtgagttactcacactaatgtagtttcatgttcttttgtttcgtgatttttgcatccaatcaacaactcacagtgtgtcagtctagaagtgctcagtgctagaagtatagtggtgcatgaggtagtataggttcatttacagggatgttaataggcatttataaattgttatgattaattgttgtgaatggtgctataggagcatggtggcatctgaccaagagttaggtggttctgtatttttatgtttaattataacccctttaggattataatttaaattaatttaaatataaatcttaaaatttaggtacatattgggtggtgtttctttttattctttcagaaaactgttaaagtatttcattgaatctaagattccaatttcatagaagtcaaaatgtgggggaaaaatggctgataatgattctaagagactcaaagatacattctgactttagagatgttaacatgaaaaaaagcatctcaaattaatgactctttggtacttgtaattgatagcttcttaaaatggaggaggactctagtaagagaagctatagtatctgtttataagtcagtatgctttagagcaatctgactttttcattataaaaatgtaggttttggactaggcattctggtgctaaaacagctgctgaggccagcgatcaccctgttctttgttcagttcctcacgttactcatataattaccgtgtgatcgtgtggtgctctgctgcttgttggtcagagcctgagtaaggctgaataaggctggatcatgaaccattctttaaagcagtggcctttgtattgcagtctagttgacatacatgcatacatacaggtgtgtgtgcacgtgtaactgaagaacagctttcacaaaataatatttagcacactgtggaattttctctgatacagcctcttctctttcatgataaaaataaattcgctgattatcacaccactttggaccttttaaaaataacacttaagaagttggaatagccagggatcagaaacttagaaatggaccttatttgttattgtaacttatagcaagtcattgtgtctcttattgggttcttttagccataataattgtgctagttcttttcttgctctgagtgcctgaacctgttgctaagtgaggaagaaaaatccatatgtaagtataaataaacaaatgtctttaatctttttgcaggtcatcatcagatttgaaatatttaaagtggatacaaaactatttcagcaatgcagacaattaagtgtgttgttgtgggcgatggtgctgttggtaaaacatgtctcctgatatcctacacaacaaacaaatttccatcggaatatgtaccgactgtaagtataaaggcttccttctgttagtaaaatgttgtaaaatttgatatccttttgaaaacgctttctctatgtgtactgaatttttttctgttgtctgcctttgtttcctgtttttaaagatcttgacttctcatgggtaaattatatacactttaaacagctgaaaaatcagtggaaagtcagaaggggtgacacagggtttgcaagaagtgctgggaggcaaaactccagtagacaagattctaacgagtggtggtctcaatttggtgaagtatgccctacatcttggaatgaggtgacttttttttttttttttttgatattttggccaattattgatcagtacttggaggtctcctgggataccatttgaggtcctgtaacttgagagaaagtagtatgtgtctccacttttcttgtggagctgttcgcttagcagtaatggagctccaaactggttcttaggggcagagaagagaagacctgttatgtttcgagaacaccaacagagtcctttgggggtcactcccacaactgttcttttctttttttctttttttttttttttttgagatggagtctctatcgtccattctatctggagtgcagtagcgcgatctcggcttgctgcaccctccgcctcccgggttcaagcagttctcctgcctcagcctcctgagtagctgggattacaggcgcccgccaccacgcctttctaatttttgtatttttagtagaaacggggttttaccatgttggccaggctggtcttgaactcctgacctcaaatgatccacctgcctcagcctcccaaagtgctgggattacaggcgtgagccaccatgcctggccccataactgttttttaaatcaactctttggaatggtagaag

SEQ ID NO: 1481 - DNA, 6000 bp, Homo sapiens
aaaaaggttaccactagcagaacttccttaaagcaataccttgtttctctttttaaaaaacaacttttttttctccaatcaccaaagtaatacatgtttattgtagaataggaaaagcacaaagaagatggagcagggatttttctcccttgtttcccatagctctgatctggtttctctgtgatttgggattcgtgtgaacaggtgatgtgctgaggagcccgggacagggaatatgtaccttcaggaagtgtctgtcaagcagtttgtattctgattaacaggactttgagcacagggaatctgtggaatttttcaggagaagatacaccagctggaatggaagtttgctttagtttggggatttttccaggactatctggggttgcctggaacaggaacttcctcacttacctgctctgtggcctcaggcaagtcatggcttcctcatctggaaaatagtactaagcatccccaactcatccagttgtgggacacagtctttccacttccagcaatgtgtgcagcactggaacccctggttcattagcagaatgtaccctccttcacatggggttttggggctgagttcactgttcacaacagcgcagtgccttgggagagatctgagttcagatcctgatttcatcttcaaacagttgtcaagttcctttacatatttcagcttcaatttcttcatctgtccaaaatgtacctgtgttacagggtagttgggaggtttcgacaaaataatgtatgtaaaatacctagctgggtgtttacgcctaggaagttctcaggaaatgtgaactattatcatttatttcaggcctactttgtgcctggcatctcaggggaggaaggcgcaaaagtgaaaacaaagcctgggtcctgcccccaaggagtctgaagatttgttgataggtagattaaagtaaaagggtcttatgcactggagataggatcagagacgtaagaaaactgccaattcttgaggctccttataaaccaggttccatgctgaaagctttatatgcattatctatgagatttcttcacaatcctatgaggtaagtgctattaggattagaaaatcaaggatcaaagatcagagaatttaggaaattttgcctgggtcacacagctaataaagtgtcagggcctgggtttgaaccctgggatgtctgacttcagattctttgctccttccactccatttgagttggaccttgaaggatgagtcagatttgggcacatggggatggaggggaggaggggcctggaggggaggcggggcctgaagaataggaggatatggagccaggtaagcaaagcctgggagatgggaaagtgtagggcgtgtacggcagaaactctgagggttttgtgtgtgtgtgtgtgtgtgtgtgtgtgtgtgtatgtgtgtgtgtgtgtttgagacagggtctcgctctgtgacccaggctggagtgcagtggcacgatcttggctcattgcaacctccacctcctgggttcaagcgattctcctgcctcagcctcccgagtagctgggattacaagcacacaccaccacgcctggctaattttttttttttttgtatttttagtagagacaggtttttgccatgttgaccatgctgatctcaagctcctggtctcaagtgatccacccacctcggcctcccaaagtgctgggattacaggcatgagccaccgtgcccggcctgtttgtttattttgagacagtcttactgtgtcacccaggctggagtgcagtgacatgatcatggctcactgcagccttgacctccctgggctcaggtgatcctcccacctcagcctcccgagcagctgggattacaggcgtgtgccaccacgcccagctaatttttctgtattttggagagacagagttttgccatgttgcccaggctggtctcaaactcctgggctcaacagatctgtccaccttggcctcccaaagtgctgggttcacaggcatgaaccaatgtgcccggcctgaaactgcaagtatttagtctggttccatgtgagggcctcttcgggtccatttcacataaaccttagccaaaatatattaagtacctaccatgcacctgacatttctctaaggactttataaccaacaccttactaaggcctcacagtaaatggagaggtcacttgtgccgcctccatttcaaagatgaggaaattgagactcagaatggtccagcaacctgaccatgatcacaatgctaggaatgaatggggcaggaattcaagctcagggaggcagatttcagatctgtgccccacacctattgcaagaattagtcagttcccaggcagtgaaactctaaagccagccccagctgcccgaaactcaaccacagagagctggctctcagcccctcactggctcccttcttttctcccagctccaccctgccacccccatttccctccctggccctggggccctgctgcttccccaaacctgctctgccacaattccttccaggttccctcatctgtaaaatggggataataatagtgtccgtctcagagcagtgttgtgaggatcagaggaggggctcaaggtgcttagagcccagtgtatagtaggttctcaataaaaatcagtgatcatcgccaccactgtcatttaagtagtgtctctgaagtaatgtgaaattgactgagtgatagcattatccacatttgatggttgaggaaattgtggttaagagaagtgaagcagcggctgtccagtgtcacttaactaggaagtagagagcgggacttacttaatctgggcctcctgactttctgacttcagatctcattaacttctcctattctttgcagccaggcagatgagtgaatcataatcagtatttattacctgccttctgcactccaagccaggccctagatgctaaggggcattctagagagatctgacctagattcttgaaggagcatagaacctaactgataaacaaggtatgaaaacgaagccttgttttgttgaggtagaacacactaagggtcccaagagggtaagagccattctggctgagaggaagcaggcaggggaggcttcttggaggaggtgagatttaagctggccctcaaaggaccaaaaaggaccaatgagatacgtagactagagtaaaagggtcttatgcactggagataaggtcagagatgtgaccgggagcggtgactcacacctgtaatcccagcactttgggaggccaagtagggcggattgcctgaggtcaggagtccgagaccagcgtggccaacatggtgaaaccctgcctctactgaaaatacaaaaattagccaggcatggtggctggcgcctgtaatcccagctactcgggaggctgaggcaggagactcacttgaacctgaggcaggagaattgcaccgctgcactccaacctggtgacagagtgagactctgtctaaaaaaaaaaagtcagagatataacaacagctgccaattcttgaggctccttatgatccaggttctgtgatgaaagctttatatgcattatctcatgagatttcctcatgatcatatgaggtaagtgctattaggaggagaaaatcaaggatcaaggatcagagaatttacaaaatttgccttggtcacacaatgaataataaagtgtctgggcctgggtttgaattcggggctgttggctacaaagcctgggctcttaatcatcatgggttattgccaccttggcctcaaccatctaatgaggaattaagctgtggactgtctctggagggctttgaatgccaaggctcagacttgcataaaaatcacacagcaccaggcaagaaatcagacctgaaatctagcagcagcttctagcaactttttaccactcactacccaagtttgcttctctgagcctctctaaaccggagtgatgaggaatgtattatcagcaatgaaggtttttgaatgaggcagagaggctcttgtgacaaaaggattgtttaaaagaaacctagagatgttcaaacatttactgagtattgggtcctaataatacaactgtgaacaagacaaagctctgcagtgggactctgaccctgctgtgcccccaggcagcttgggagagtagaagaaccccttaactggaaaaacaagggctccagagctgggacctgtcccagattctgttgccagctctcaaatcagggaatctctctgtatgaccttgggcaagttacccagcctttcagactgtcagtctttatcatggggatcatcattcctcttcccaggattgttggaataaattaactaaaacaacgcttgtaaggatctagcatggtgcctggcatcctgtaggcgctgaatagatgttagttttccctacaaagaagtagactagtttgcctccgtccctcacccctctgccattaaagggaacaggttcctggccttcattttagcaggaaaggggatatgaatgcacatgtgctagctaagcaacaatgcaaactaacaaaagggcctgtggcctggggaatacactgctgggtctgggctcaggctgggaccccgcgccaaaatgtttcccttcaatcccagggaatccgggcccatttctcggggcgctgtgcactgctctggccgcctctgcactgtgaatcccggaaccaccctctgtctccgtctcgccggctgctaactagcgcggccggcggctggcggcaccaacagcaggtgtggctgcccctttaagcagcgaagctagtgttgcaatcgccgcctcgaggacgcgttctttccgggggggggggggggggtggagcctgtactgtcgcagcagccaaccggagcgcggcattttccgcgggagatccgaatttcgcggcacgacgtttggcgctaaaaaaaaaaaaaaaagaagaaaaaaaagaggcagagaaagactcaaggactagagagcgagccgcaaggaagtcggtgcagtcgagacccccctccccatcccagcgcatcgcgtctccgccgagcttgagggcacgccggggacccctccccagagccggccggaccccaggtgccgaggccttggggagcgcggggcgtcccgggtcgcggtgccctcgggacgagacagcccctggcagtgccaccaccgcagccgccgggcgatctccaagcggcgatctctaagcgctgctctctgctcggccgcgggccaggaggggagggtccggccttgccccgcaggcgtccattggcggcttcccccggcctccgcgccatgccgcgggccgtgtgaaaggcggcagcaccggaacccgcaggtgtccgcgggcgcgccaagcccttttgggtagggggcgccttactcgctatgctgcaagggccccgggccttggcttcggccgctgggcagaccccgaaggtggtgcccgcgatgagccccacagagctgtggccatccggcctcagcagcccccagctctgcccagctactgctacctactacacaccgctgtacccgcagacggcgcctcccgcagcggcgccaggcacctgcctcgacgccactccccacggacccgagggccaagttgtgcgatgcctgccggcaggccggctgccggtaatgctgggggcccccaccgcttccccctatgcttttccaggtgtgggaaaggagggaggggtgcctgagatccagtttgagtggagcaggtagagttttgggaagagggaagatgagctttcagtttccaggacccagtgcccccaatatctgagtagaagaccccttcattttcagactttggatgaaataatctcatccattctagtggagtggaatgagcactggattgcgagtctggagggagacccaactcactactcccagtgcactgtgtgaccttggggaagtccatgcagccagcgttgccgccattcattcattacttcattgtttggcca

SEQ ID NO: 1482 - DNA, 6000 bp, Homo sapiens
aaagcagcaaatcccagatcggaacctgatctctgccccgagctctgagccatctgcactacccaaggaatgaatacagcggtgggaggatgagatcttggagaaaccctaaaattagagaatgtcatagccagtagagggcttagagttgatctgggccagcctccttgttttactgatggagaaattgaagcccagaggcaggaagggacctgcccaaggccttataacagagctgggatgcagtcccacactctgacctcattccattctctctccataaattctgcactgtctctagactggactggtttagatgtgggatactctaaacagcagtgccttcaagagaaaaagaatcagaactacgaatcacttaaaagtaatgtaagctactctgggcacactgcctatggggtcgccctgctccacaaggagccacaaaaataattaaaataatttaatatcccttcccaaaggtaaccagtaaagtaagctcttggctaggtaactggactcttgttcacaactagccagtgggaaaaggtgctagagcttcctctggccacctgtttaatttgatcattccaagacagaaacatttcttaggaagttctttctagaatctacctggtgtccctcccactgctatcagagccctgtcctctgtcctcagtggaggtagagagcaaatggttgctgctttcttcatcacaacccttcaaagcctattattaccagctaagaaggattggttgactatggggccagagcccctgagcctgctggtagaatggatgctgtacaggagggtggggaggtagcaggcagaatgaggaaagcccctttgagctgcaaccccagctcctgtcctgctgactcagacagctgactgtggagctccatgccctgccagggcctgctgcctcctgcccgtctgagctcctgaacttgggaaatggaggcccagaggcaaagggaggtacctgagacaggaactgagtcaggatcaacaggccagagcgggcaggaggtatcaggcagcctggctcccagatgcacccctgagctccagcaggggaggagtaggaatgaaggggcttccttgcccttgctcatggctatgcggagggcgtgaaccaccaccaggtcctctggcttaagtggcgggaagcaaatggtccctccctggactcaggctccaaagttcctgggcctgccttccaggttcccagtgtcctgggatctccagctttccccaggacttggggaagccccggctggatgactagtacaaatgaaggcccctgaggttccaggacctgctgaggtcacaggaatatcctagatcaagcttgtccaacccacggcccacaggctgcatgtggcccagaatggctttgaatgcagcccaacacaaattagtaaactttcttaaaacattatgagatttttttgcaaatttttttttttttttagctcatcagttattggtagtgttggtatattttatgtgtggcccaagacaattcttccaatgtggcccagggaagccaaaagattggacacgcctgtcctagatggagaggaaggaggcagtgctgagcacatctggccattcatccatctggagagagaaggctatgggcaaactgcttcctctcccctgtagacacccagctgggaaggtctggcctttggctaagtcctggcttggggtccttcctcatttcacagaacctaactctatgttagtgctttgtgagtatatgttgatcataataaagttgacgggattttttcacatgataataatagttgtcatctggccgggcatggtggcttatgcctataatttcagcactttggaaggctgaggcaggtggatcacttgaggtcagctgttcgagaccagcctggccaacatggtgaaaccacatctctacttaaaaaaaaaaaaaatacaaaaattagctgggtgtggtggtgcacccttgtaatcccagctactcgggaggctgaggcaggagaatcacttgaacccaggaggtggaggttgcagtgagctgagattgtgccactacactccagcctgggtgacaagagcgaaactccgtctcaaaaaaaagaaaataataataataatagttgccatccattctactgtgctttccattaactcgtgtaatcctcacaagtcccattttatagttacaggaactgaggctcacagagcttaaatcacttggccaaggccacaaacagctataagaattacatttaggcagtctgattccaaagatactagtctattctgtatctcatagacaaacaatacatattcacttttttgttgttgttttgttttgagacggagtcttgctctgtcacccaggctggagtgcagtggcgccatctcggctcactgcaagctccgcctcccgggttcaagcgattctcctgcctcagcctcccgagtagctgggactacaggcatgtgccaccatgcccggctaattttttgtatttttagtagagacagggttttcctgggttagccagaatggtctcgatctcctgaccttgtgatccacccacctcagcctcccaaagtgctgagatgacaggcgtgagccaccgcgtccgacctatattcactatttataaattggagagaataagaaaatcaaaagggccaggtgtagtgactcacacctgtaatcccagcactttgggaagccaaggcaggaggattgcttgaacccagaagttcgagaccagcctgggcaacatggtgagaccctgtctctacaaaaaaatacaaaaattagctgggcgttgtggtgagcaccttattcttaggaagctgaggcaggaggatcacctgaggccaaggaggttgagactgcagtgagctgtgatcataccactgtacttcagcctggacatcagagtaagaccctatctctaaaaaggaaattgagaagaaagaaaatcaaagggaagcaaaatcactcactctcactacctcaagataccctctagaagttggtattttagtgtggttcctattgttttctgtgtcagttctctgatttgagcaaaatctttgggacgtcaaacttaaaatcccctttacttccttggaaaccctgtagcattagcccagacatgtccctactcctccttgtggcaaagagaaggatctcgtctttggtccccagagttctggcctaagcctccctccaggagggaagatgagtgttcagacactcagagtagctgggggagacacaggcctgtgaaattatcctggctcaactattaggtcggcagaatcccagtgaagggagccctacctctgagccccatctaagctttggctatgggtggggcagataagcaggaatccatccctataggctcaatgccaacacccttaggtgaaactcttgatgaaacttgaggccagggctccggcaagcagggaaagaacgttggcaacagaggtctccatctctgaggactctgccaggggtcagagatggggcaatggtcaaaaggaaggaacaggccaggcacagtggctcatgcccataatcccagcactttgggaggctgaggcaggaggatcgcttgagcccaggagtttgagacctgcctgggcaatgtagtgagatctgctctctatttaaaaaaaaaaaaaaggaaagaacaagtaaacttctgagaaacaggctgggggaggcatcacgtagctggaattgctgccccataaaacagaatggtatgtgtcactgccacctccctttctcagtcctctctctccccaggttgctagcgtcccccctgggggatcaaactggactgcttcccagcctcagacagagagcagtctgagtcaggcaggaaagtgggacagccggggagctggaccccaccctctgtgagccccgctggtacctgatggcatgtggcttggagagggcaggtgacctggcgtggagggccagagggtaaatcctcaaacaagtggcaacaggccaccaacttgaaagggaaaattgtgtagtgatgggaaatgtgtccaacaaacctactgggtgactaattacaaaggctgggctggagcttcagaggctgcttgttaaacacttcattaagcggcactctgaaagctgccacctgcgcattctgggagctcagaggggaccctgagggggaatgaggcctggaggatggaaccatcttcaggtagactgagaaggagcctggatctcacttccaaacacagtctggagctcataggtcagaggcctcaatgggagaaaagctaaaggaagagggtgcagaaaggagtttcagggaattggtggctatgtgactttgagcaaatctcacccctctctgagacttagtgttcccatctctatggtcctgtgtgtgtcacagagacatggtggggattaaattcgatcgtgaatatgaaagtgcttgggaaactccatggccctacctaaacatgagttatcctcacctgaaccaaggggggaagttacctggcaggattaggaaccccatcctcctgaacctttatgggctctgtcgaggctgaagcagccaggggctaaagccgtccttagcccctggaagggcactgtgaaagtggatctgatttgagaagccgtttcctgatgtgggcagccatgtgatgccagccccgaacaagagggggcagcctggagcctggaaaggtgccagtgcaggtggggcccacgcccagatttctcctgctgactgttctgatgattcacccccacatcccagcctttttacctttactgcagagccggaaagggtgtggggaagagaggagagggaggcaggtcttgggccctggtcccgccccctgctcctccccacccttctctgggcctggccacccagccaaaaggcaggccaagagcaggagagacacagagtccggcattggtcccaggcagcagttagcccgccgcccgcctgtgtgtccccagagccatggagagagccagtctgatccagaaggccaagctggcagagcaggccgaacgctatgaggacatggcagccttcatgaaaggcgccgtggagaagggcgaggagctctcctgcgaagagcgaaacctgctctcagtagcctataagaacgtggtgggcggccagagggctgcctggagggtgctgtccagtattgagcagaaaagcaacgaggagggctcggaggagaaggggcccgaggtgcgtgagtaccgggagaaggtggagactgagctccagggcgtgtgcgacaccgtgctgggcctgctggacagccacctcatcaaggaggccggggacgccgagagccgggtcttctacctgaagatgaagggtgactactaccgctacctggccgaggtggccaccggtgacgacaagaagcgcatcattgactcagcccggtcagcctaccaggaggccatggacatcagcaagaaggagatgccgcccaccaaccccatccgcctgggcctggccctgaacttttccgtcttccactacgagatcgccaacagccccgaggaggccatctctctggccaagaccactttcgacgaggccatggctgatctgcacaccctcagcgaggactcctacaaagacagcaccctcatcatgcagctgctgcgagacaacctgacactgtggacggccgacaacgccggggaagaggggggcgaggctccccaggagccccagagctgagtgttgcccgccaccgccccgccctgccccctccagtcccccaccctgccgagaggactagtatggggtgggaggccccacccttctcccctaggcgctgttcttgctccaaagggctccgtggagagggactggcagagctgaggccacctggggctggggatcccactcttcttgcagctgttgagcgcacctaaccactggtcatgcccc

SEQ ID NO: 1483 - DNA, 6000 bp, Homo sapiens
tgaaaccccatctctacaaaaaaatacaaaaattagctaggtaggtagtgcacacctatagttccagctactcgaaagactaaggtgggaggattgcttgaatccaggagggcaaggctgcagtgagctgtgatcatgccactgcactctagcctgggcaacagagtgagaccctgactaaaaatagataaataaataaaaatcaggcgtggtggctcacgcctgtaatccccagcactttgggagaccaagacaggcagatcacctgaggtcaggagttcgagaccagcctggccaacatggtgaaatcttgtttcttctaaaaatacaaaaatgagtcagacatggtggcatgcccctgtagtcccagctactagagaggctgaagcgggaggatagcttgaacctgggaggcagaggttgcagggagccaagatagtgccactgcactccagactgggcaacggagtgagaccttgtctcaaaataataataataataatagggctggatgtgggggttcacacctgtaatcccagcactttgggaggccgaggcggatggatcacctgaggtcaggagttcgagaccagcctggccaacatggcaaaactccatctctactaaacatacaaaaatcagctgggtatggtggtgcacgcctgtagtcccagcttttcgggaggctgaggtaggagaatcgcttgaacccaggaggcagaggtttcagtgagctgagatcatgccactgcagcctagactgggtgagacacagtgagactctttctaaaaatactaataataaataaaaataaataaataaaagaaaccacctgggcatggtggctcacgcctgtaatctcagcactttgggaagctgaggtggccggatcacttgaggccaggaatttgagaccggcctggccaacatggtaaaactgtctctactaaaaatacaaaaattagccagacatggtggtgcatacctgtaatcccagctacttgggaggctgaggcaggagaatcgcttgaacctgggaagcggaagttgcagtgagccaagatcccaccactgcactccagcctaggcgacaagagtgagactgcgtctcaaaaaaaaaaaaaagaagaagaaaccagaactgttcattgttatgagggtcactactcccagtccttcctagagctaatgaatgtgtacacacacacacacacacacacacacatttacaattatatttatttctataattatacatactaaacaacatgaattcagactatcatctccaattccaagctcatatcatggggttcattctagtttttgccccttgtgtatttatacttcctgtctttcacaccgaggaatctggtgtccattattcttgatttatcttttttttttttttttgagacagggtcatgctgtatcccccagctgctggagcgcagtggagtgatcttgactcactgcaacctctgcctcagggttcaagtgattcttttttttttttttttttttgagacggagtctcactgtcacccaggcccagaggcccaatctcggctcactgcaacctccgcctcccaggttcaaacaattctcctgcctcagcctcctgagtagctgggactacaggcgcctgccaccaagcccagctgatttttcgtattttttagtagagatggggttttaccattttggccaggctggtctcgaactcctgacctcatgatctgcccgccttggcctcccaaagtgctgagattacaggcatgagccaccgcacccagctttttttttttttttttttgagatggagttttgctcttcttgcccaggctggcgtgcaatggcacaatctcggctcgctacaacttccacctcccagattcaagagattctcctgcctcggcctcccaagtagctgggattacaggttcccaccactatgcctggctaagtttttgtatttttagtagagatggggtttcaccatgttaggcaggctggtctcgaactcccgacctcaggtgatccacctgcctcagcctcccaaagtgataagattacaggcgtgagccactgcacccagcctaagtgattcttctacctcagcctcccgtgtagctgggattacaggcgcacaccaccacacccaactaatctttgtatttttagtagagatggtgtttcaccatgttggccgggctgctcttgaactctgggcctcaagtgatccacttgcctcggcctcctaaagtgctgggattacaggcatgaaataccacatccagctactttttttttttttcctttgtttgagacagggtctggctttgtcacccacgctgaagtgcagtggcgtgatcacagctcactgcagccttgacctcccaggctcaagtgattctcccatctcagccttctgagtagctgggattacaggctcccactgccatgccccgctaatttttttttttatactttgagttctagggtacatgtgcacaacgtgcaggtttgttacatatgtatacatgtgccatgttggtgtgctgcacccatcaactcgttatttaactccgctaatttttaaattgttttgtagagacagggttttgctgtgttgctatgttttgcaagtgttgggattacaggcatgagcctccgcagtcggcctggatctgcttcttgttccacacataaacttgtttctttcactgctcacatacttccagttgtcctgggaatcatttatattgggataagacttctgatcctgtacagcaagggtcatgaggtacagcaaatggtaggaatattcctggaagccctttccacacaccaggacagctcacaatgacttaactatacacaaaagtgactgccagccacccagctatatcccaccaaatcaatccaaactgagtgtatttccaactcaacttcaccttagctggatcaccaaatcctcatggcatctctgatatcacctgattcaagggaaagtgagatagagtgggaagaaatagtagtcttaaccaattgcaattttagaattttgcttttgcatgttaaaagaaaaaaaaatatgtatttgacgctatgaagacattgctggggttgctcccagtgcctaggatgggcccgtgcaagtgcaaggccctgccctcaagagccctcagtctgagggagaagacacagatcaactccaggaatctctaatctaaagggagaagtctctagtctgaagtggggaacacgcaattccaaccaaaagagaaacctaaaggaaaaaaggaaagaagaaggcgtcaactgtgtcaaatgcacctgagaagttgagtaagataatagtggttcattggctttggcaatatgtagcactgtaaccatatcagagcctttaaaaaatagactagaacaggccgggcgcagtggctcatgcctgtaatcctagcgcgttgcgaggccgaggcaggtggatcacttgaggtcaggagtttgaaacgagcctggccaacatggtgaaaacccctctactaaaaatacaaaaaaaaattagttaggcgtagtggtgcctgtaatcccagctacttgggaggctgagaatcacttaaacctgggaggcagaggttgcagtgagctgagatcgtgtcactgcactccagcctgggcaacagagtgagacttggtctaaaaaaaaaaagaagaatagatagactagaatatactgtagagagatgggaggtgagggagtagaaaaacaagcaaacaagtttgctgcaaatgagagctgaaaattggagaggtagcagcagaagaaagtggggccatggaataataatataaaaacagggctgggcatggtggctcacacctgtaatcccagcactttgagaggctgaggcaggaggagtgcttgagaccagggtttgagacttagcctgggcaacacagactccatctctaccaaaaaacaaaaaacaaaaaacaaaaaaaaaaaaacagcagggcgtggtgatgtgagcctgtagtcccagctactctggaggctgaagtggggaagatggcttgagtccaggagttcaaggctgccgtaagccaagatggtgccactgcactccagcttgggtgacaatgcaagaaccccatctctaaaaacaaacaaaaagatattaaagcgtgtttgtaaattgaagggaagaagaaagatatttgtgatgcataagctaaaaaaagggataattaacagggatagagttcctgaaaagactaagatgatgagattcattgcacaagtggagggattagcttggatggctgggtcctgtccccgcattaacagaagtgaaggtcaatttcagcacctgtcataatttcctgggcccagtgcaaaatgaaaatgtgggtctccttattccaaaattattaagaatttcaagactataacagaaggccatgaaatcaagcgtggagcctttctaagcctgggtgctgtgcgactgcaatttgtactcccatgaagctggccctagtcaagtacgcagtgaggtcgatgaggaggaggctgtcctgtggtaagtcccttctaggattggaagagatgagtaaggctactttcagcttcactgctctacaagctgggggggtcgctagcaagggagaggggcaaaacttgtccctttttaacttccaaccctgccagatttgagtccagggctttctagaagtctccacggcatcgggtgaccatagcaactcatgccaaactctcgggcccacggctccgcctaccgcttcgtggacgcgcttgttgattggctccgaatgtcgaccaatggtcggcgaagcgggttgcttgccgcacggtcaatggccgcaaaccgggaggaaggcgggaagagaggaggtggaggcgggcctgggcagccgcgcgcgtgcgtgtttccggctccgctgcggaaggcggacgactagagtcgttgggcccggcgcgacccgcaggagcgtagagagcgcgggactagagtgcagagctccgggacgtggatcggagccggcgcgatgggcggagagcaggaggaggagcggttcgacggcatgttgctggccatggctcagcagcacgagggcggcgtgcaggaggtaacggcccgcgcggcgtcggcccacccggcggccttggccacgctccttccgcccttctctgccttcgagggctgagacccaccccagcggctcgcgggcttctgggatgcccctacattctcactgcgcccagcttccggcctggccacccgccagcaggtctcacccggttcgcatcagtcccgggcccccggcgcccctcagtagtagcaaattatcgcatccctgagcttaggatccccctttagtttcacatatgcccccacccccgtttccactttgatggcggcttccaaggagcatcccttagtaagaaccgtcgcaaatatcgtgatttggatccaccaaggcttggggcgagccgtcgaatgtgtgtggtaggggagcgggctgatgttagcacgtggtcttgttaggccttgaatgggggaataggaggcctgtgttcacgattagtttccaccacctaccaacttggaacctttacatctctccaagcctgagtttccttatctgtgagacagctgcgaataccggtttccagagagtagttaagaaccgtaagttctcagtaataaggctttttcattcaacaagtatttgtcgtgtgattgatgtgtgtcccacactcgacaataagggccaactgttacagattctggagttggtttttttggaacaaacacaaagttaacggtagaaaagtctgtcaggatcagaactctcattctcagagccagagaagtggcaaggatttgcctagatcatgcaacatggttctcacctagacaggtcagtgtgcttcccagagtccatggctgattgtgtcttactggaggtag

SEQ ID NO: 1484 - DNA, 6000 bp, Homo sapiens
tagcgaaaccccatctctactaaaaatataaaaattagccaggcatggtggcacatccctgtaatcccagctacttgggaggctaaggcaggagaatcacttgtacccgggaggcaggggttgcagtgagccgagatctcaccactgcactccagcctgggcgtcagagcaagactctgtcttcaaaaagaaaaaaagaaataacaagagaagtagaattagaaataaagcctgaatatgtgactgaattgttgcaatctcaggataaaactcgaatggatgaggagttgcttcttctttttattctttttttctttattcttttgttttgttttgttttgtttgagatggagtttcgctcttgtttcccaggctggagtgcagtagcgcaatctcagctcactgcaacgtccacctcttgggttcaagcgattctcctgcctcaacctcccaagtagctgggattacaggcacccaccaccatgcctggctaattttttgcattttaggtagagatggggtttcaccatcttggccaggctggtcttgaacttctgtcctcgtgatccatccacctcagcctcccaaagagctgggattacaggcgtgagccactgcgcctggccaatttttgtatttttagtagagacggggtttccccatgttggcccaggctgacttttctttttttgtttctttaaggagttgcttcttatggctgagcaaagaaagtggtttcttgagatggaatctactcctgtgaagatgctatgatcattgttgaaatgacaacaaaggatttagaatattacataagcttagttgacaaagcagcagcagggtttgagaagattgactccaattttgaaagaagttctgctgtaggtaacatgttaccaaacagtatcacatgctacagagaaatctttcatggaaggaagagtggatccttgtggccaactttattattgtcttattttaagaaattggcacagccggctgggcaccgtggctcacacctataatcccagcactttgggaggctgaggctggtggatcacctgaggtcgggagtccaagaccagcctaacaaacatggagaaaccccatctctactaaaaataaaaaattagccgggcgtggtggtgctactcgggaggcagaggcaggagaattgcttgcacctaggagacggaggttgccgtgagccgaaatcacaccattgcactccaacctgggcaacaagaaggacacttcgtctcacaaaaaacaaacaaacaaaaaaaaagtgctctaacacagccttgtgcagtcaaaagaagatactgtgtgaccctgataagcaatttttgtttttatttttatttttatttttgattcagtggcacaatctgcaacctccatctcccaggttcaagctattcccttgcctcagcctgccgagtagctgggattacaggctctcgcaccacacccggctaatttttatgtttttggtagagatgggattttaccatgttggccagcctcccaagtacatgagattataggtacatgccaccacaccctgctgatttttgtagtttttgtgaatacagggtttctccatgttgaccaggctggtctcgaactcttgggctcaagggatcctcccttttggcctccccagatgctgggattacagatgttagccaccaagcctggccaattttacctttctgagctcaagttttctcactttgtacacgtggtcaatgagagatttttatcatcagttggagggaagtggtgagatatatacacatgatatcaagcatacaccaagtttggagatcagtggtagaaagagataaaaagaatgtgttgaagatgttgaggactgggtgagattactttcagctgagctttttggaggaggtgtcatttaaagtcttgcttcaggccacaaacaggaatgaaggcattgaatgatggatactatttcaatgggtagagatttgcaagaagagtactgaaagaaagatttgaaggccaaacaagaaacatggatgttgcaggtggtaagaatgggagggtaaattaggtgcatcttggcaaaccttgaatgttaagataggagtttgattttttttttttttttttttgagacagggtttcgctctgacacccagatcgtgcagtggcacgatctcagctcactgcaacctctgcctcccgggttcaagcgattctcctgcctcagcttttcgagtagttgggactacaggcgtgcaccaccacgcttggctaatttttgtatatttagtagagatggggtttcacgatgttggccaggatgatcttgaactcctgacctcaggtgatctgcctgcctttgcctcccaaagtgctgggatcacaggcgtgagccaccatgcccacccaaggagtttgatcttaattctgtagctgatgaaataccagtgaagccttttgatctggactttgacattacatagtaaatttttttttttttttgagacagaatctcactctgtcacccaggctagagtgcagtggcacgatctcggctcactgcaagctctgcctcctgggttcacgccattctcctgcctcagcctcccaagtagctgggactacaggcacccgccaccacgcctggctaattttttgtatttttagtagagacggggtttcaccatgttagccaggatggtcttgatctgacctcgtgatccgcccacctcggcctcccaaagtgctgggattacaggcgtgagccaccacgcctggccacatagtaaattttttaaatgaaagctgaagctgacacagggtagtttagagaggaagttgatgcaaaggaagattccgtgaccaagggcatatgattgtcaggacattttgctaggtgacatagagcaggagatggatgtcaagatgtagaccctgccagccaggcgcggtggctcatgcctataatgccagcactttgggaggctgaggcgggcagagcacaaggtcaggagttcgagaccagcctgatcaacatggtgaaaccctgtctccactaaaaatacaaaaattagccgggtgtggtggcacttgcctgtaatcccagctactcaggaggctgaggcaggagaattgcttgaacctgggaggcagaggttgcagtgagccaagatcgggccactgcactccagcctgggagacagagtgcgactctgtttaaaaaaaaaaaaaaaaaaaaaaaaaagatgttgaccctgccctcaaggagtttacaattaaaaagatcagataagccagactcagtggtgcacacctgtaaccccagtgattgatttggggggctgaggagggaatatcgcttgagcccaggaatttgaagctgcagcgtgctatgatcatgccactgtactccagtctgggtgacagagctagaccccatctctaaaaaacaatactaataaaaagaaaaaagggtcagataaaacatgtacatagaaaattacaatacaaggcagaatgtggctggacatggtggctcatgcctataatcctagcactttgggaggctgaggtgagagaatcgcttgagctcaggagtttgagaccagcctgggcaacatattgagaccctgtctctatttactaaaaaacaaaaaacaaaaacaaaaaaacagaaaacaaaaaaacaaaaaacaaaaaaaactaggtagaatgtgatacatgtgaaaagagatccagctcaagtgccttgggagctcaggggagggtgagattaatctctttttcccaagaatctggaggcaggaaaccaagtcggtttcatctttggaattgtaagcttagacttagaagtctcagagggggacttgggggtcttatccaccctcacccctggcaggattccctgtctagaataaacaataactttaaaatggaaacaaaaaaaggagctctgaaggaaaactgtgaaggaagaggctccgtttgaaatgaatagaaaatgaatttagcttggaggtgctgaggtgttggtagaggcaactttctggcaagaggcgagttgaaggccaggaagtgaatgagatcagggagagtgtctggagggaagaggggcaaaaacaaactggggaagcacccacgttttaggaagtgggtggtgaaagaggagtcagagaaggccagagggagaggtgagcaaagatccagcagaacaccttgttacaaagtttcgaggagggtgggaggggtggaagccaggacgggtagcagaaggaagaaaacttccagcaatagggattgaggttccacacgaagttaccaatgacatttcaaggaatgaaggcttttcctgaggctccacaaataaggtgaattccctgtgtctcgcatctttggagcttccccgaggccagggggagcagggttgtgccctctgacctctaaatatctggggttcagttctataattagcagcaccggataggacgcgagccaaacctctcttaaccctagccagtccctccaggaactgaaaagatgaagaattcatttaggagatttcacactcggctgtttggcctagcccagtgaagtcccttttcatcacgcaaccctaatgactcttagggctgtcactgccgtctggtgttgccagggatctgactaaaccgtcttgcaaaagtttgcagcattcacccgaggcggactacaactcccagaattccgggcgctccccggtgctgattggcggagcccgtgactccagggggcggagtttcccccgcctccccggggaaacagacctctgattggctggaccgccgggcttttgtgtccccgccctcccccggggaccgcagcgggctgaactgctggtgtcagagcccggcgagcgctggcagttccgcggcggggatgctgaggagcgctgggtccgggagcagccctggcccctgcggacttccgaggccgtgaaaacccctgcgctgcggcccttcccaggcccccgaggccgttcgccgttcccgaagcccgactgggggaagagtccagcaccaaagcggccgttctcggattccggagcgttctggagccccgagagacgccccggggttctagaagctccccggcggcgcccagtcccggcttcattcgggcgtccctccgaaacccactcgggtgcacgggtcgtcggcgagccgcgaccgggtcctggcgcgcaccatgatcgtggcggactccgagtgccgcgcagagctcaaggactacctgcggttcgccccgggcggcgtcggcgactcgggccccggagaggtaagcggcggccgcgcgacgcccctcttccctggaaccccgaaccgcgtctgagcctcaggctgtccggagctgagtcggtgtgtcctgggctcggggagggaaagccgagcgcgtaacccgggacccgggttgcatcaactggcagccgcggccctcggcacccctcccccactctgtctcccctctccctccttctccccctccctctccccctcctccctccctctccccctctccctcaccgccccaccccagggccgcggatccttcctcggctccctcggactcctggccaatgagggagaagccttctggaggctctccgagctttgggctcctgagcgtcttcaagtccaggcaaatcccggccggagcggccagaccactcctcctccccgcccccttccgcggagtcccttcctcttcgcgggggccggcgggcagaggacccttcctggggtgcctcccggctcctgtcccccagcgcggggcgtaggcacctgggactggccagtgaaagtcgacctcatcctatgtccaccgcactcctgctttggagggagagcgcaggggctctgggggcttggcgggccgcccggtacgcggcggcggcagccaaagctggggggagaggggacaaccctggtcgcggcttccgaagccaagcgc

SEQ ID NO: 1485 - DNA, 6000 bp, Homo sapiens
caatgactcacttctatttgtcacttaagagactggccttgtttagtgcaccaccctttaccaagagttaaaagaaaccatgagtcagaactccttgtgtccacctgcttccagattgtccttctactagccctccaaagaagcctcaaattgctattgcccttttgaggttaaattgtctccagaaagctgttttgaagatgaagattgcccagtgtttgccaaaacaatgaatgaattttgggtctctgtggatttatataactgtaccccaggaaaaggcaggtccagcccggtgcagtgatgcacacctgtagtcccagcagcttgggaagctgaggtggaaggatcagttgagcccaggagttcaataccagcctgggcaacatagaccttgtctcttgaaaaaagaggagcaggtccaatggacactgaataggcaaaggatgaaataataagcataaaaagatgacaatgtgcaacaaagaaaatcctatccttgaagccaaaatacagccagcaccactgtttcaacgttctattccatttcagccctaggaggcatgaagggaaaaccaggaatgaccagcaacccagacctcttgctccatctgtcattttgtgtggatattgttaatttcttccccaaagaattttgcctcctatgtagagcatagaggtcatctgacaggaacaaacagctttaatgttccttcatttggcactgaggacacacagtcctcagtgaggattgtgggagggggagcattaaataaattatttaatgcttacctccttcctaccctcacccgcaacaaagacacaatcttcccgtgaccccaatttctcttcaatctattaccctctctcctgcttttcctatactcccttcacacaatctattccaatgttaaacaacccaagttctcaggccaggcagctgggctaaatgattgacagaggaagaactagtgatggagatgtaaactgaacaggcttcttggccttgcttcataacctctggtctgtgcacattgttttccctacctaaggccatattcactcagctcattaaaatctaaacgaaatccaaaccaatatggctttcctgtggtcaccagggatttctcagccttcggttattgcacttggctgctttgcaacatttggtgctttggacaatgttctagtcctcaaaactcttcttccttggcttctgaggcaccgctgtcttctggttctccttccctgactgacctttctctgtgctgctggcttcttcctcgaacaccatttaaatgctgggttttcggccaggtgcgatggttcacgcctgtaatcccagtactttgggaggccgaggcaggtggttcacctgaggtcaggagttcgagaccaacctggccaacatggtgaaaccccatctctactaaaactacaaaaaaattagctgggtgtggtggcatgtgcctgtagtcccaggtacttgggaggctgaggcacgagaattgcttgaacccgggaggcagaggttgcagtgagccaagatcacaacactgcactccagcctgggtgacaagagtgagactccatccaaaaataaatgaataaaataaaataaatgaatgctgtgttttaccgggtgtggtggctcatgcctgtgatcccagcactttcggaggccaagattggcagatcgcttcaggccaggagttcaagaccagcccgggcagtatagtgagaggccatctctaccaaaaatttaaaaaattagctgagcatggtggtgcatgcctctagttcccgttactcagaagaggctgaggtgagagaatcgtttcagccctggtggtccaggctgcagtagtcctgatcacaccactgcattccaacctcaacaacagagcgagatcttgtctcaaaataaaataaatgctggggtttcatgtcttcccatcactctcctcattcttccaagacgactttagccaccatgctaattcttacaacttctaaatattttatcaccaactcagatttcttacaggaagcccaaccccatatatctaattgctctttggacttatatacaaccagatgttactcaggtaactcgtatatactccaatgtggacattactcctcccccactgcctgcatttccacttatcaaggttagagaccatagtatgttcagcctcctaagcctgaaactctggtatcctcaagttcttctcttaccttgcaattccagtgggacgacaaaccctacatcagaaatgtcttttttttttttttttttttttttttttgagataggttcttgctctgttgcccaggctggagtgcagtggcatgatcacgactcactgcagcctccatctcctgggctcaggtgatcctcacacctcataagtagctaggattacaggaatgtgccactacactcagctaacattttttttaaaattttgtaggccggggtcgggcgcagtggctcaagcctgtaatcccagcactttgggaggccgaggcaggtggatcatgaggtcaggggttcaagaccagcctgaccaacatgctgaaaacccgtctctactaaaaatacaaaaattagctgggcatggtggcgggcgcctgtaatcccagctactcaggaggctgaggcaggagaattgcttgaacctgagaggcggaggttgcagtgagccgagatcgcaccactacactccagcctgggggacagagtgagacttcatctaaaaaaaaaaaaaaatttgtaggccgggcacggtggctcatgcctgtaatcccagcactttgggaggtcaaggcgggcagatcacgtggtcaggagttcaagaccaccctggccaatatggtgaaaccccgtctctactgaaaatacaaaaattggtggggcatggtgacacttgcttgcagtcccagctactcgggaggctgaggcaggagaattgcttgaacccaggaggcagagaatgcagtgagccaagatcgagccactgcactccagcctgggcaacagagcaagactccatctcaaaaaaaaaaaaaaaaagaattgctgcgatagtaaataatgtacgtaataaagcattcagaacaaaatctaatatgtaggaggaacaccataaacgttactactcaagatagcccagctgtgatagctctgtctctctagccaacgtttttccaccttacaccacactaaaaattccatcatatttgcaacatttcttatgtatatatatcgtaagcattctttacttgcctacttcatattcagagggttttgtgtgtggtaaaatatacataaaacttgccatttttaactagtttaaaatgtatagggggccaggtgtggtggctcaggcctgtaatcccagtactttgggaggccaaggcgggcatcacttgaggtgaggagttcgagagcagcctggccaacatggtgaaacccggtctctactaaaaatacaaaaattagccgggcatggtggcatgcctatagtcccagctactcgggaggctgaggcaggagaactggttgaacctgggaggtggaggttgcagtgagccgagatcacaccacttccttccagcctgggcgacagagcgagactccgtctcaaaaaaaaaaaaaaaaaaaaagtccaggtgcgctggctcatgcctgtaatctcagcactttggaggccgaggcgggtggattgcttgaggtcaggagttcgagaccagcctggccaagatggtgaaaccccgtcttgctaaaaatacaaaaattagccaggcacggtggcgggcgcctgtaatcccagctactggggaggccgaggcaggagaatcgcttgaacccgggaggccggggttgcagtgagccgagaccgcgccattccactctagcctgggtgacagagcaaaactccatctcgaaaaaaaaagaaagagtatagggcagtgcttttaattacattcattcacactgttgtgcaatggagttttttattttttatttttatttatttttatccgggccaggcctggagtttttaaacttttatctgattcgtctaggggcactttcatcttatttaccttcacatttatcaaattatttctttcacaggtgacagagcagattcaattccttttgatactccgtatttctctatatgtatttttttcattctgcattcttattattccaacgttttacttatttatttggagagagagtttcgctctgtcgaccaggatggagtgcatcggcgcgatctcggctcactgcaaccaccgcctcccaggttcaaacgattctcatgcttcagcctcccgagtagctgggactggaggtgcgcggcaccatgcctggcttatgttctgtattttttgtagagacggggtttcgccatgatgcccaggccggtctcgaactcctggcctcaagcgatccgcccctcacggccttcagagctgctgtaatcacaggcgtgagccaccgcgttcgactcttccaaaaactttttggccagtttatctaagggcatatcctacagactgagtccagtgattgcacagaagtaaacgtcctctgcagctacatacctacaaacctatttctgtaacgtacattccccagcaaggtcccgcgggaaggatccactaccgcgagaggcctcccagccaggaaggggtggggctcaatctgcagtagattcccagaagcctcagtgagtttctgattctctaactgcgcatgcttctgcgcacgcgcaatagacattccaggacttccgggcacttcgtaaggtttaaaaaggatgcttcgcgttttctctctcctttttggagacagattcgcagtggtcgcttcttctccttggtaagtgtgatccttggtaagtgtgatcagatgcttgccaccggagttgtgggtctaatgctatagatcagtagccgagcttccctaggaagatcatatagtattttatttatttactttttttttttttttgagacggagtcggtttgtcactcaggctggactgcagtgctcgttgcaacctccgcctgccgggttcaagcgattctcgtgcctcagcctctccagcagctgggattacaggcacgtgccaccacgcccggccaatttttgtattcttagtggagacggggtttcgctatgttggtcaggctggttttgaactcctgatttccggtgatccaccaccctcggccttccaaagtgctgggattacaggcgtgagccaccgcgcctggccggaaatcatgtaatttaaaactatatatgggtgtcttaggcggcatcggtcccaactctaaagtacgcgttagacgggcctgggccagaagtgggccatggagacctcgggacccgcagggctgccgcccgacccagcgagcctctgaaggtgcaccgccacccccactgtttatcttactgcctcatagtaggcacattgtcgttctcaatataattgcacacagttttattctggatcctcatttgcctttaagaattttctcaatttttctttttatttgatcgcaccactgcaacctccgcctgctgggctcaagcaattctcctgccgcagcctcccgagtagctgggactacaggcgtgtaccaccgcgcctggcttatttttgtatttttagtagagacgggatttcaccatgttggccaggctggtctccaacgcctgaccttgtggtccgccacgccaggccgaagattttcataatttggaagcattgcgtttcgtaattatgctttctcgtatttttgtgatttgggtcatttttatttttatatttttaggattacaggcgtgagccatcgtgcctggccgatttgggggtaattaacaagtccacgtgtttcatttgaatttaggatagctgggcctaattgttgtctttgcttctgcggtaccttccacatagtactaaccgc

SEQ ID NO: 1486 - DNA, 6000 bp, Homo sapiens
ttcaagcaattttcatgcctcagcctctggagcagctggtactacagcatgcaccaccatgcctggctaatttttttgtattttagtagagatggggtttcaccatgttgcccaggctggtctcaaactcctgagctcaggcagtccgcctgccctgacctcccaaagtgctagaattacaggcatgagccaccgtgcctggccttattttaaaattttatttcttgtaggtaacatgttgggtttttcagtatgacagtctatgtcttttaattggagtgtttaggctatttactttttttttttaagacagggtctcactctgtcacccaggccagagttcagtggcaagattatgactcactgcagccttaaactggaactcctgggctcaagccatcctcccagctcggtctcctgagtagtgaagaccacaggcatgtgccactatggctggctaaattttgtattttttgtagagacaaggtctcatgatgttgtcccagctggtcttgacctccagggctcaagcaatcctcccaccttggcctcccaaagtgctaggaatacaggcatgagtcaccatgcccagccatattatacatttttaacttacaatagtccacattcaattgatattaaaccagttcacttgtagtataagaatcttccccagcctggccaatatggtgaaaccccgcctctactaaaaatacaaaaaaaaaaaaattagccaggtgtggtggtgctcgcctgtagtctcagctacttgggaggctgaggcagaagattgcttgaacctggaagcagaggttgcagtgagctgagatcgtgccagcctaggcaacagagcaagactccgtctcaaaaaaaaaaaaggcggggcccggtggctcacgcctgttatcccagcattttgggaggccgaggcgggcggatcacgagatcaggagatcaagaccgtcttggctaacacggtgaaaccccatctctactaaaaatacaaaaaattagccgggcgtggtggcgggtgcctgtagtcccagctactagggaggctgaggcaggagaatggcatgaacccaggaggtggagcttgcagtgagccaagatcgcgccactgcactccagcctgggcgacagagcgagactccgtctcaaaaaaaaaacaaaaaaaaaaccttctggcggcctggtgtggtggctcacacttgtaatcccagcactttgggaggctgagactggcggatcacctgaggtcgggagtacaagaccagcctgaccaacatggagaaaccccgtctctactaaaaatacaaaattagccgggcatggtggcacatgcctataatcccagcaactcgggatgctgaggcaggagaattgcttgaacctgggaggcagaggttgcagtgagccgagatcatgccattgcactccagcctgggcaacaagagcaaaactccatctcaaaaaaaaaaaacaatcttccggctgggcacagtggctcacgcctgtaatccatcccagcactttgggaagccaaggcaggcagatcacgaggtcagagcgagactccgtctcgaaaaaataaataaatatttcttccatttctcactatatagtctttgatattgtcatgtgtcttacttttatatatgttataaaacccacagtacattattacagccagaacctccatatcagccagttgcgatggctcactcctgtaattccaacactttgggatgccaaggcaggctgactgctgaggctcagaagttcaagaccagcctggccaacatagtgaaaccctgtctctaccaaaaatacaaaaattagatgggcaattagctggacgtggtggtgcacgcctgtaatcccagctactcgggaggctgaaacaggagaattgcttgaacccaggaggcagagattgcagtgaactgagatcacgccattacactccagcctaggcaacagagtgagactccgtctcaaaaaaaaaaattagctgggcatggtggtgcacatctgtggtcccagctactcgggaggctgaggcagaggttgcagtgagccgagatcctgccactgcactccagcctggatgacagagtgagactcttgagacaaacaactggggctgggcgcagtagttcacacgtgtaatcccagcactttgggaggccgagatgggtggatcacttgaggtcaagagctcaagaccggcctggccaacatggtgaaaccctgtctctattaaaaatacaaaaatgagccgggcatggtggtgcgtgtctgtaatcccagctactctggagactgaggcaggaaaattgcttgaacccagggggcagaggttgcagtgagccgagattgcaccactgcactccagcctgggcaacagaatgagactccatctcaaaataaaataaaaaatacaaatacaaaactaaaaaaataaaaataaaggccaggtgcagttgctcatgcctgtaatcccagcactttgggaggccaagatgggcaggtcacctgaggtcgggagttccagaccagcctggcaaaaatggtgaaacccggtctctactaaaaatacacaaaatggccaggcgcggtggctcacgcctgtaatcccagcactttggtaggctgaggcgggtggatcacctgacgtttaggagttcaagtccaggctggccaacatggtaaaaccccgtctctactaaaaatacaaaaattagctgggcatggtggcaggcgcctgtaatcccagctactcaggaggctgaagcaggagaattgcttgaacccaggaggaagaggttgcagtgagctgaaatcgtgccattgcactctagcctgggcgggtcaggagttcgagatcagcctggccaacatggagaaaccccatctctactaaaagtacaaaaattaaggctgggcgcggaggctcacgcctgtaagcccagcactttgggaggatgaggtgggtggctcatgagatcaggaattcaagaccagcctggccaagatggtgaaaccctgtctctactaaaaatacaaaaattagctgggtgtggtggcaggcacctgtaatcccagctacctgggaggctgaggcaggagaattgcttgaacctggctgcagtgagccgagatcgcaccactgcactccagcctgggcaacagagtgagaccccatctcaaaaaaaaaaaaaaaaagagttgaggtctccttccaccacttgtgtgaagaccccagaaaacttgctttacctctttaaacttcagttttcttatcttccaactgccatgaggtttttgtgaggaacaaatgagctgacatggatgtttctgtagttaacaaaataaagggtcttacaaaataggcaataataataataatcacttattattattacatgaagctacatgaatgtgtaagatcttggaggaagacagcagagagagagagagagatcagagatcccagggttaaaagttggagaaatttcacagtacatcatccaaaagaggagtccatgatggaggcagaggtaaacttggagaggtaagaaaccctgaagacaggggagtgctttgtggcaggctctgcatataagaattcagcctggccaacatggcgaaacccagtctctactaaaaatacgaaaattagccaggctttgtggcaggcacctgtaatcccagctatttgggaggctgaggcaggagaatcgcttgaacctgggaggcagaggttgcagtgagccgagatctcaccattgcactccagcccgggtgacaagagcaagactcgatctcaaaaaaaaaaaaagttcagttcagttggtaagaactcatcaaaagtgtccatctagactttgggtgccgtagaatgactcagagtctgaatcaacatgaaatcgagaaaacgtcctttgcaagggtttcagggaacacctgaaatcctgaagaactgtttgtatccatcctgaagaatgggtgttaataagagacagccttttcttggtacctgttttccatctctaacccaaccccaactcacacccttctattttatctggtctctctcattcctcttgctcctccccacttggctcccgttttccccaagtccattctctattttgttctataagatctgatcatattaggatgctcttgtagctcataagaagatgactgggtgttcacacgcatatgagatgtgcctccctcaaaccttgttaagacatgggcacatacccatctgatgttaactcacggggaaaaaaatctgatcatgccattcccgtgcccaaattcccatatatccctactgcctcaggatagaggctggaccccttagacacacaagaccctgtatccatgatctgtcactcccacaggcaccctctactcccatctacttggcagtttcccacaacctccctgggttctcgtggttccctgtcattgcaaacgtcgcttctcctaggatgtcctgcccccctagacttaacttggaaagctgttcttaagccccggactgagtcagatgcccctctgggtatccctgtcatagcgttgtgtggttgttgatagtctgatttttcaaccttctccatgccctcttgagggtagggaagatgagtatcttttttctccgtacagaccctaccgcacaagattttcctaaacagaccgaactcaaggagtctttctggttgttagtccacgtgtcccgatttggggtttccaaaatacacgcccactggaaccgggccaggggagccagcctggccaagggctcccccagcccggccaagggctcccccagcccgggagcgcgccacatgcagatcctgggatggccgccaggggccgccgggctctttgttttcctttctcacccgggtcggggccagaggcctgcagagcgcatgctctggggcagttcgcggcccggcggggagcgccggagttccttgtggccgacgtgcaccaaggtaggtctcgcctgggacgcgcggagggtccgggcagagggcggtaagcggagcggccacagccggagcacgggccggtccacgcgggcctaagtcgctgcccgctctcgcccgtgtcgcgcggcgccggccccacgtgaagcccggaggcaggaaggcgcggtgcgggctcgcgattccccggccccgcggggcgctccagcagcggctgggcgctgcctcgctggagctagggccgcgcggcccctccgccgccgcgcctctcacgcccgcaccgcggcgcccgcgcaggcgggagattcaaactgcgcgagcgcggcgggccgggtgcgcgcggccgcccgggcgggggatgggtctctgccgcgaggaggatggttttgtccggcatgcgcttggagaaggcggtttgcagatcggggagggagccctgcccgggagagggtgggtcgtaggagctcgagggtctcccgctgtggacctttgggagccgtgtgtcttgaactccgcagcagctcagtctgtcagcagattatttgctggccatttattgcgtccctctcttgcggggctgggggacagtagtgagaagagcaggcccgtgtcattagcgaactatgcccttgaacccaggcgacggacgctactggcaagtcattcatacgtcacatattgacctaacttcgaccacgtgtgacttgtgtgccctagcagaagttgagtgtgtggggtgttacggggagccctcagggggatcccccaccctgcccaggaggctcagggatggctttccaggtgaagtgactcttgaatggggttttgaaggaacagagtttttcaggcagtctgagggtagtgggattagggtgatacaggcagagggattgcacgtgcaacggcatgaaggtataggtattgtggtcagggataccacaggtcttgaggtgactggaggaggagagtaacaagatgatacagcagg

SEQ ID NO: 1487 - DNA, 6000 bp, Homo sapiens
atctccttagttgtgtttggctaatattctggagcgtttcactacaagctggccacaatgatcccactctacagagaagaaaactgaggctcagaaaggtgaagtatctcactcaagattggaagagaaggccaagatctgaaccaagttagtcagactccagagctggcgtccttgagtgttattagaaatttcttctggccgggcgcggtggctcacgcctgtaatcccagcactttgggaggccgaggcgggcggatcatgaggtcaggagatcgagaccacggtgaaaccccgtctctactaaaaatacaaaaaattagacaggcgtggtggcgggcgcttgtagtcctagctactcgggaggctgaggcaggaaaatggcgtgaacccgggaggcagagcttgcagtgagtcgagatcacgccactgcactccagcctgggtgacagagcaagactccgtctcaaaaaaaaaaaaaaaaaaaaaagaaatttcttctgcctccttcctccccatgctccctagtagtctctcagcttgcctggaactgtgtctcctcctcctttccctaggaaagacagcaacttttcactggtcttccggtccccaccctcatcccctcctctcattctccaagtcattcgtgatcaataaatatgtgtgtgtgtatatatatacatatatatatttatttttttttgagacagggtttcactctgttgcccaggctgtagtgcagcagcacgtacacggctcactgcaacctccacctcctaggctcaagcgaccctcctgcctcagcctccagagtagctgggactacaggcatgtaccaccacgcttggctaatttgtaatttttttttttcttgtagagacaaggtctcactatgttgcccaggctggtctcaaactcccgggctcaagtgatcctcccacctcgacctcccaaagtactgggattataggcgtgaggtaccatgcccggcctcattcatgatctttccaaacctcaaacctgaagcaagctgctggcctgcttggactccttagtggtccccttttcctggaagataaagcccacatttcttagctgggtattagaggtctccaacatcgggtactgacagaacctttagcttcatttcctatctatcacatcctcccttctcttcccacacaatctccttgccagacccaccaggccagaatgctaactgtcctctccatactatttgcatctctttacctggaacgccttcccatcccttatcccactggaagaacatctactggtgtctcaaagtcacctcctctgatccctcctccatcctgaactagtcattctctctgagaaactgggacagacttttggatcacaatcactttaatttacatgcctgtccaccataccaatcaacttcctaaaatatgagcccctgggggcaccggctaactcactgtatcttccatatgcaaaacccttttattcctcacaggaagctgaagaaggcagcactgtcactcctatttcacagttaaggaactgaggctcagaaagataactttatcggcctaagttcacagagcaagtaaagggcagcctagaaaagcaacccaggcctatctgactgattctgaaggcagaccttggtccaggcaggggctaaggcagtctgggcaggcctccccagtatcccctatgcacttggccaagtccaagaagcagagagcagaagccagctgaggagaggatggtgagaccagagaggagacaatgaggcagctagagcctgagggaaggtggggtgggtggtgacagatccacccacagatgtggggaaggacagtggcgacaactccctgctgcggtggagacggcacctgagtgctctttgagtcccagaggcttcctctccaaaatggaagacttgaggccctgcactgggctggcaatcgccagggaagggcaggggatggagggccaccttcttttttttttttttttttttttctgaggtggagtctcgctctgtcgcccagtctggaggcaatggcgcgatatcggctcactgcaagctccgcctcccaggttcacgccattctcctgcctcagcctcccgagtagctgggactacaggcgcctgccaccacacccagctaattttttgtatttttagtagagacggggtttcaccgtgttagccaggatggtctcgatctcctgacctcatgatccacccacctcggcctcccaaagtgctgggattacaggcgtgagccactgctcccggccagaggaccaccttctaaaaggtggagccctgttcccggtacctgcctgcacagcctctactgcacaaatgggtcttgtatacagacttctctcactgctctgggtgtgttttcctttatttgcttttcttttcttctttttgagatggagcctcactctgttgcccaagctggagttcagactcacgatctcagctcactgcaacctccgcctcccaggttcaagcgattctcccgcctcagcctccctagtgctgggactacaggcgcaagccaccacgcctggctaactgcttggtatttttagtaaagacggggtttcaccatgtcggccaggctggtcttgaactcctgacctcaggtgatctgcccaccttggcctcccaaattgctggggttacagtcgtgagccaccgagcccggcctctctggctgttttcttaaccaggcagtgagtgtctgggctgggaataaggagttggcttttggcatcatgcttccccaccccgccccacacaacacagcttccatcttcaaggagcatacagtctctgggagaagagtgagacagtcacagataagtcggctacagagtcagcttccaccatcaggcactcctgaatgcccacagctgccctttgaggtgagcagactcatcccagttttacagctaaggggaagatgaggctcagggaaaggtgacccaggtcacagagaggtggaatgaaatcccagtctcatgaccatgctccaccagagctggagctgccctacccccacctcaccttccttatttattgaagaaagtgggtaggcacgccagtctagacagtctgcccggagcctggtgctcctgccctgacctccagtgacctcaccacagcctcgatttctgtaaaaggagacagagccctcccaggccactgcagctgtgccctccgtcccccacaccaggaggaagaacttgcctgccagactaaggctgaaaaatctctgtgtgtaaggtccccaggagggaagggaggagagggctcatgtgtcaacaatatacatttggtgagctgctgttatgccaggcacacaggtggtatatttcacactaggagtttctcacctgggatccccgttctatacaacctgtgcctgggcctatgtgttcatttttcctgggggaagggacacacaacttcactgctttatgaaaattataggatattactattcgggaggctgagacaggagaatcgcttgaacccgggaggtggaggctgcagcgactgagagcacgacactatactacagcctgggcgatagaccaagattctgtatcagaaaaaaaaaaaaaattggccgggtgcggtggctcacacctgtaattccagcactttgggaggctgaggcaggtggatcacctgaggtcaggagttcaagaccagcctggccaacatggtgaaaccccgtctctactaaaaaaaaaaaaatacaaaaattagctgggcctggtggtgtgttcctgtagtctcagctgctcagcaggctgaggcagaattgcttgaacctaggaggtggaggttgcagtgagctgagatcgcgccactgcactccagcctgggtaataagagtggaaactccgtctcaaaaaaaaaaaaattatatcctcaccacatgccccctaccattgctttacagataaggaaaccaatgctctgggggactgggtgggttgcccaagggcatctgatgagaaagttgtaacgatgaacagaacaggattcctgctcttgggatgtctttgaaacaggagcctcgtgaactcctaattcatctgtccaggtttcactctgatacccttcttgggggaaatcttccctgcctcctccaccccgcagagttccttagtcttgcacacaagacgcttcgtgacccagcccctgctgtatcatcttgttactctcctcctccagtcacctcaagacctgtggtatccctgaccacaatacctataccttcatgccgttgcacgtgcaatccctctgcctgtatcaccctaatcccactaccctcagactgcctgaaaaactctgttccttcaaaaccccattcaagagtcacttcacctggaaagccatccctgagcctcctgggcagggtgggggatccccctgagggctccccgtaacaccccacacactcaacttctgctagggcacacaagtcacacgtggtcgaagttaggtcaatatgtgacgtatgaatgacttgccagtagcgtccgtcgcctgggttcaagggcatagttcgctaatgacacgggcctgctcttctcactactgtcccccagccccgcaagagagggacgcaataaatggccagcaaataatctgctgacagactgagctgctgcggagttcaagacacacggctcccaaaggtccacagcgggagaccctcgagctcctacgacccaccctctcccgggcagggctccctccccgatctgcaaaccgccttctccaagcgcatgccggacaaaaccatcctcctcgcggcagagacccatcccccgcccgggcggccgcgcgcacccggcccgccgcgctcgcgcagtttgaatctcccgcctgcgcgggcgccgcggtgcgggcgtgagaggcgcggcggcggaggggccgcgcggccctagctccagcgaggcagcgcccagccgctgctggagcgccccgcggggccggggaatcgcgagcccgcaccgcgccttcctgcctccgggcttcacgtggggccggcgccgcgcgacacgggcgagagcgggcagcgacttaggcccgcgtggaccggcccgtgctccggctgtggccgctccgcttaccgccctctgcccggaccctccgcgcgtcccaggcgagacctaccttggtgcacgtcggccacaaggaactccggcgctccccgccgggccgcgaactgccccagagcatgcgctctgcaggcctctggccccgacccgggtgagaaaggaaaacaaagagcccggcggcccctggcggccatcccaggatctgcatgtggcgcgctcccgggctgggggagcccttggccgggctgggggagcccttggccaggctggctcccctggcccggttccagtgggcgtgtattttggaaaccccaaatcgggacacgtggactaacaaccagaaagactccttgagttcggtctgtttaggaaaatcttgtgcggtagggtctgtacggagaaaaaagatactcatcttccctaccctcaagagggcatggagaaggttgaaaaatcagactatcaacaaccacacaacgctatgacagggatacccagaggggcatctgactcagtccggggcttaagaacagctttccaagttaagtctaggggggcaggacatcctaggagaagcgacgtttgcaatgacagggaaccacgagaacccagggaggttgtgggaaactgccaagtagatgggagtagagggtgcctgtgggagtgacagatcatggatacagggtcttgtgtgtctaaggggtccagcctctatcctgaggcagtagggatatatgggaatttgggcacgggaatggcatgatcagatttttttccccgtgagttaacatcagatgggtatgtgcccatgtcttaacaaggtttgagggaggcacatctcatatg

SEQ ID NO: 1488 - DNA, 6000 bp, Homo sapiens
acacctcctcacccaaagccaagcagtagtgtagcaggataagccgcagacaaaaccccccagacacccagttaaagaaggaagggctttattcagctgggagctttggcaagattcacgtctccaaaaactgagctccccgagtgagcagttcctgtcccttttaagggcttacaactctaagggggtctgcatgaagaggtcgtgattgattgagcaagcaggggatatgtgactgggggctgcatgcactggttatcagaacggaacagaacaggacagggattttcacagtgcttttccatacgatgtctggaatctatagataacataaccggttaggtcaggggtcgatctttaaccagacacaggtcgcggcgccaggctgtctgcctgtggatttcatttctgccttttagtttttacttctttggaggcagaaattgggcataagacaatatgaggggtggtctcctcccttagtagtaaagcactataaatatttgtggatttacaaccatttcattcagtcttgatgacagccctgagaagtagtcattgcatccccttttatagatgaggatacagttcagagaggttaaggcaactggccagccacaagctctggaaggtgaacccagttccctctaatcccaaagaatgtgcactttttagtgtgggacaaggggtctcaaaagacaggtgggaggattctcagccctgggagaataaaagttgggtgaagttcagaactgccacctcatcagtcagaactgggccagtgacaacctgcagaagctcagcctgcaaaggcttatcaggattctagacctttggttactttcccatctttagtatttagttctccttccccaggataatcagcagaaaagtgcctggccttgtgtccatataccatggaggggagagctagagaggcgaggttctcgggaaccactagaaggaaggaatgagggggctgctggttaggcccagagctgagaccgagaagggctcttggagttctccttcccttcgtaacattaggtagaggcttagacaacttgattgtttttcatgaccttaaagactgtggctccggccgggcatggtggctcacagctgttgtaatcccagcactttgggaggctgaggcgggtagatcgcttgagcccaggagttctagaccagcctgggcaacttggcaaaaccctgtctctacaaaatatataaaaattagctggacactgtgatgcgcacttgtagtcccagctattctagaggctgaggtgggaggatcacctgagctcaagaggtcaaacctgcaatgagccgtgattgtgccactgcacttgagcctgggcaacagagagtgagatgctgtctcaaaaaaacaaacaaacaaacaaacaaaaacaagtacttgatgactccattggggtcaattatgaagagacctcttagtgcaagaccaggaccttctaacagcacaccgaagtctcgagaaattcgcttagttaaatctgacaagggtgcgatgtttatgtggcccaaagcaccattctttcttggtgtatttatccaggcaagacggctaaagtgggaatccactgagactgcaacaacttcaaagttcacatcgtgaaattccttagctttgtcactagaagcaacaatttctgtaggacacacaaaggtgaaatccaaaggatagggctgggcgcggtggctcacacctgtaatcccagcactttgggaggctgaggtgggtggatcacctgagttcaggagttcaagaccagcctcaccaacatggtgaaatcccatctctactaaaaatacaaaaattagccaggcgtcgtggcaggcgcctgtaattccaggtactcaggaggctgaggcaggagaattggcttgaacccaggagggggaggttgcagtgagccgagatcgtgccactgcactccagcctgggtgacacagcaagactccgtctcggaaaaaaaaaaaaaaagaaagaaatccaaaggatagaagaaaagcaccaaatatttcccctcaaagtcatcaaggcttaggtctttgaactctccattgaccacggctgtacccttaaaatagggcgcatgctgggtgacatcaggtgcatggtatgaggaactggtaccagaattttgcttgaccggaaccagaccacaatatgtttgtcaaacttgttcttccagaagcagcaggcctgagggctgcagtggcagaaatgcccccaaggaatggcactcacatgccgggcaactgatgctcagagtaaccttcccacagcagccgcgatcttcagtgcatgtgtgtttttgtttttttgagacagtgtctgtctctttcgcccaggctaaagtacagtggcacaatctcagctcaatttagcctcagcctcccaggctcacgccatcctcccacctcagcctcctgagtagccaggacttcaggcgtgcaccaccatgcccggctaatttttgtaattttttggatagaaatggggtttcgccatgttgcccacgctggtcttgaactcctgggctcaagcgatcctcctgcctcgacttcccaaagtgctaggattacaggtgtggtggcaccttgtctctaaaaaaaatcaatcaattaaataagaaaagaaaatagctcttctccccctctgattataacaacacattaccaaagttactggtgcttacatggggttgaatggagttatgatggatatttcatttaatgttgttcttcaatgttttaattttttacaacagacttaaaaattttttaaatacatgtggccaggcacgatggctcacgcctgtaatcccgcactttgggaggccaaggtgggtggatcatctgaggtcaggagttcaagaccagcgggaccaacatggagaaaccccatctctactaaaaatacaaaataagccgggcgtggtggcacatgcctgtaatcctagctactccagaggctgaggcaggagaatcacttgaacctgggaggtagaggttgtggtgagccgagattgcgccatggcactccagcctgggcaataagaacaaaactctgcttcaaaaaaaaaaaaaaaaaaacatgtaatcggctgtacgcagtggctcacgcctgtaatcccaggacttcgggaggctgaggcaggtggattacttgagattaggagtttgggaccagcctggccaacatggtgaaaccccgtctctactaaaaatacaaaatttgggctgggcacagtggctcacgcctataattccagcactttgggaggccaaggcggggtggatcactgagatcaggagttcgagaccagcctggccaaactggtgaaacctcgtctctactaaaaatacaaaaattagctgggtgtggtggtgggtgcctgtaatcccagctactcgagaggctgaggcaggagaatcacttgaacccaggaggcagaggttgcatgagccgagatcgcaccattgcactctagcctgggtgacagaacgagactccatttcaaaaaaacaaaaacaaaacaaaacttagcagggcatggtgatgcacacctgtaatctcagctactcggaaggctgaggcacaagaattgcttcaacccgggaggtggaggttgcagtgagctgagatcatgcctgtgcgctccagcctggcgacagagtgagactccgtctcaaaaaacagaaaaatacatgtaatgctccttgttaaacatcttagataatataggaagataaaacgaaacaagtaatgattatctataataccattttccgaggttaccattgttaatatgggatatattttcttccccacatttttctcacatattttttgtgtatgcattttttttccaaaaaaaaaaaaaatggatgataggctgtttttcttccttttttttttttttttttttggttggggggtggagtttcactactctttctcccaggctggagtgctgagtgcaatggcatgatcttggctcaccgcaacctccacctcctaggttcaagcaattctcctgcctcagcctcccaagtagctgggattacagtcgcacaccaccatgcctggctaatttttgtatttttttttttttttttggtggcgacggggtttcaccatgttggccaggctggtctcgaactcctgacctcaagtgatccacccaccttggcctccgaaagtgccaaagtactgggattacaggcgtgagccaccgcgcccaggctttttttttttttttttttttgagacagtctggctctgttgcccaggctggagtgcagtggctcgatcttggctcaccacaacctccacctcgcgggttcaagcgattctcctgcctcagcctcctgagtagctgggattacaggtgcccatcactgtgcctggctaatttttgtatttttagtagagacggggttttgccatgttggccaggctggtttggaactcctgatctcaggtaatccgcccgccccggcctcccacagtgttgggattacagatgtgagccaccacacctggccgtctgtttttcattctgcttgttttacttggcaatggggaacatctttctattcaatagattgatctctgaaaacatcacttttgatggcttcatactgttctatcatgaatataccacatatttagttcactactattgaacattcgggttctgtttttgttgtttttaaaatgttatgaaggatacagtagagaatatttgtgtaattaatctgtgggtgcatccattattctgttcttgggatacattttgagaagtggaattgttgggcaattcctcttaacgtatttctagagtgtttgataaatattgtctgattggcccaggaaaatgtttgccatttctcatatgtagtatttgactgactttcaggacaggaagatgtcacccaagcgcatagctaaaagaaggtcccccccagcagatgccatccccaaaagcaagaaggtgaagggtaagttggccttggcctctttgtgggtacaggtggccccttgaaaccctaagaacccgggactgggctcctttcttcctgaggcttgaagctgaagggtgtggatgtgcagagaccccacccagctggaaggtttcctgtagctcattgaatcctaccctctgggaatcacaaagtgggcagaaactcctctcaaagcactcaggcagcactggcacaaaaaaaaaaaaaaaaaaactagaccctagggcttcaccccaggcagtgatgcattatggttaggaccactgactttccgacatgggttcaagtccttgctctgccactttctagctgctgggcaagtcacttaatcccgcagtttggattatcaacttcttaaaatggcggcagccagagcagcgtcaccctctctgggctgtgtgaggatgagatgagataatggcctggcagcatttgagggaggtggctgtggtttcctctgtcctgggaccccggagggggacagggaggagagaaaagccagcaccaaactgggaggggaagtgtggacccacgctcagacagtgtctgtcttttgcagacacgagggccgctgcctcccgccgcgttcctggcgcccgctcctgccaaggtgcctgcgggccgagccctcctgaccagaaaacccgaccaggtggctccgcgcccggggcgccctctgtgctgccagcgcgggctcctcagcggtggccacatcctcgggggaggggctgggcgccattggctgcccggggctgcgggttggggggccgcctttggcccacagagagccccgggcgcgcacctcccgcaaatgccgctgtccgctcttcctcccgcccctcctgcctctccactggatggtggagggaagagtccgtttctgcagtggatttgcccgggagctgaacttattcactggcggacggcttgggcatg

SEQ ID NO: 1489 - DNA, 6000 bp, Homo sapiens
cccaaagtgctgggattacaggcgtgagccaccgcgcccggccatctctgttttatcaaggagagggaagaggagtctgagctagtgtgatggttaattttcggtgtcaacttcaccggattaaggaatacccagaggactgataaagcattatttctgggtgtgtctgtgagtgtgttcccagaagagagtggcctgtgagtggactgaatggtacagatccgccctcaatgtgggcgggcgccagctaatgggctagggcccagaatgaacacaaaaggcaaagaagggatttcctgtctctcttcctggagctaggacactcttcttctcctgtccttagacattagatccccatgctcttcagcccttggactccaggacttacaccagcagcccctgggttctcaggccttcatcctctaagcatcacaccactggcttccttggttctgaggatctcagatttggactgagccacacgaccggcttgccagggtctccagcttgcagaaggcctccaatgggacttctcagcctccataatcatgtgaaccaattgccctcacaagtcccctcttgaatgtgtacatctatctatatactgtatttattctgtctctctaaagaatcctgactaatgcagcaaagcaaaacactgtgctcaatcacccagcaggtaagaggcagagctaccaacctccatctgaaccattatgcactgctgctgtatcctataccatagtaactggattaagggtagaagaaacttgctctttttggaacctcctcctccccccaaaacaagcctagctatactcagtgaaaattatacagattagagagtaggacttggccaggcgcggtggctcatgcctgtaaccccagcactttgggaggctgaggcgggcggatcatgaggtcaggagatcgagaccatcctggctaacacggtgaaacactgtctctactaaaaatacaaaaaaattagctgggcatggtggtgagctgtagtcccagctacccgggaggctgaggcaggagaatggcgtgaacccaggaggtggagcttgtagtgagctgagatcctgccactgcactccagcctgggtgacagagcaagactccatctcaaaaaaaaaaaaaaaaaaaaaaaaaaggagagagagagtaggactttcagatccatagccaacataaagcacccacaaatcttcatcaggtactaaagggtataatagtgattacttctgtttataagccctactatcaggaggtttacactgatatttgttaatgttcacaataagccttcaaggtagatggcattaccccactttatagaagagaaaactaagtttcagaggtcttccaaatgatacacagtgaggacaaggcattgccgggttgtttgaatttgccccactccaacgttagtcttttcacatggttgttaaccttcaggtggacctggggcagcatactgtggtgaacacaaaataaactccagacttctaggctttcagagcagaaattactcttccctaccctgagaagggcccccaaaatagaaggctgctgcatcacttagtggatacatacaccgcaacctcaaccactcttggcctgagattacctttagggttctcgcctggaagaagagcacatctctcccgctcagcctactctcagggaaagcaagtaaagatctggcaagcacccagaaagactgagggttattttttgttttgtttccagtgtttttaaaattgtatataggtatggctacaacatgttttgatatacatatgcagtaactgttgattctagtctagaaaggccatagataccactacccagctccttctcagacaaacctttatcaaagttttattagcctcagctcaagggatctctatttgggcatctcattacagggcaaggacgcttcagccatttgtaacaccaccactcaagaaggatcttcaagggtggcagtggaaatgagttgcaaaggaactgtaaattctccttgccccttcccccctcttcatgcagttgctctctcaacccacctattccttcaagtctgacactggattactcccattccctgaacacatttcccacgttctcatctctgctcatttattccacttccctttgcctggaacttattcttccttggccaaaatctatcttctgcattgaactccaacagcacttaattttttcgtttcttttttctttttgacacggagtctgactctgttgcccaggctggagtgcagtgtggcgcgatctcggctcactgtaacctccacctcccgggttcaagcaattcttctgcctcagcctcccaagtagctgggattacaggtgcatgccaccacgttcagctaacttttttatgtttttagtagagatggggtttcactgtattagccaggctggtcttgaactcctgacctcaggtgatctacccactttggcctcccaaagtgctgggattacaggagtgggccaccgcactggccttttttttttttttttttttttttttttttttttttttgagacaaggtctcactctgtcgtccaggctgagtgcagtggggcagtcgttgctcactgtagtctcaatttcccaggctcaagcagcaatcttcccacctcagtctctcaagtagctggggacaacaggtgcacgccaccacactcagctaatttctttctttctttcttttttttcccaagacagagtctcgcactgtcccccaggctggagtgcagtgctgcaatctcagctcactgcaacctccgcctcctgggttcaagcgattcttctgcctcagcctcctgagtagctgggactacaggcacaccaccacacccagctaatttttgtatttttagtagagacggggtttcacaatgttggccaggatggtctcgatctcttgaccttgtgatctgcccgcctcggtttcccaaagtgctgggattacaagcatgagccatcgcatctggcctatattttatattatatatatataatttatgtagatacgtgttttgttttcatttctgtgggtaatttggaaatcctctcccttaaccccttaaagaaggcctttaggttctctagttaaagggttctaagcttcacatccaaaaatcaagtttccaggcactcagaagacaatttccaaataaacctttttttcctttttttttttttttgagacgtagtctcgctctgttgcccaggctggagtgcagtggcgtgatctcggctcacggcagcctccgcgtccctggttcaagcaattctcctgcctcagcctcccaagtagctgggattacaggtatgcaccaccacacccggctaatttttatatttttagtaaagatggggtttcatcatgttggccaagttggtctcgaactcctggcctcaggtgatttgcccacctcggcctcccaaagtgttgggatcacaggcatgagccaccaagccgggcggaaactttttttattgtagagatgaggtctcattatattgtccaggctgctctcgaactcctagcctcaagtaatcctcccacctaggcctcccaaagtgctgggattacaggcataagccaccgcaccggtccccaaagacttttgaaaagtgtgggctcattaggagaactaatccagaaggaaaagagatgggagtgagtgctttaaatggaagaagaaaataatctgcggagggaagggaaagttagagagggcaccaggcttttgatggcttatgggacaagtagggacctaaggctccacttgcatatagcacaccaggatgtggagaacgtcgtaggcgactgtccactatgtaccttgcctttgagagtagtggcaagggtctctttgagcaagtctggagtggtagaagaagccatcctaatgatgcaaccaacgtggattaaggatctggtctctacctcactttttgaaggaagaaacacttaattggcaataatgacggcgaaacaaaacaaacacaattcagaaaaagcagtaaaatatgtaaaaagagctaaaatgctgcttaagatttcccgtaccaacaatgtcaaccgttttagaaccgactggaatatatgtaatactggaaatatatatactggaaacaacttcttgtgttccctgatgtctgggacccttttctttgctagacttcagatctctgatctgaaccatccctcttagttcaagtactccaatcgccttcagtgtttccaccaagccgtccttcctcaatttctccctccaggtttcccttccccaactttccccctgcatcagactctccctcagccttcctttctccctgtgcagtctgtctcactcctgtcttcctccccaggcggtctcaattctctctccctcccctttccgtgaccctctcggcagtcttttacttccttacttcggtgaccgccccccaccccactccccacagcctccctccactgctcagccgttggagagggcgtggccccgcgagtaacaggtctcccgccccacactccgcgggcccgcgcgcagacaaagacattccacagctcccgccccctccacgccagaaaggggaggagacacgtgttccgctagcgccgagtcacgtggaaaacgaaacgaacggagcccactgcctcccgcgcatgcgcatcaagctctggcctggcgggagcggagggaaagccagagtcgggaggcgacttctcggacgccgcggcggtgcgcaggcgccgtggccggactggggactttgttctccgcggagaaacccaagggcggtgccggtggctggctgcgcacgcgcgccgcctcatttccggtgctctctctcgctgggtcgctcgggtcggcttcggtcgctaccgctcccgctctgccacccccgccaaccgccgctcgggcctccgtcgctgccgcgtcgctttctcgctccttggatcgcacatcctcccagatgcagcgccgggacgaccccgccgcgcgcatgagccggtcttcgggccgtagcggctccatggacccctccggtgcccacccctcggtgcgtcagacgccgtctcggcagccgccgctgcctcaccggtcccggggaggcggagggggatcccgcgggggcgcccgggcctcgcccgccacgcagccgccaccgctgctgccgccctcggccacgggtcccgacgcgacagtgggcgggccagcgccgaccccgctgctgcccccctcggccacagcctcggtcaagatggagccagagaacaagtacctgcccgaactcatggccgagaaggactcgctcgacccgtccttcactcacgccatgcagctgctgacggcaggtaagggggcctcccgtgtccctctgggtcgcccggccatcccgggcatgagtggccctggctttgttcctctcgcttcccgccccctcgggaccgaggcagtcgggagttccggtctcatcctcatttttgggagcctggattccacattcccacctcagcccggagtgcgtgggagaatttctaggctgcagtggaggcccgaaggcgactttgcgatcccctagcgctaatgtcttgatggatagtgctgagctccccgcccctttcccgactcttccctcctccctcctcttgcggctgccgggcgcgcagattcttccagaaatgaaccttcatttccccctttccctgaagggaaaccctttttgatcgcgggtggcgatgagcgcctcgaccgaggtgtaggaggtgaagacagccagagcggggagggaccgtgggaggaagggccgaggtgaggtggggtgaggctggaatgccctgtccagtgccttgctgtcgctggggccgagccggacttagcggtaaccgcagcttaagttgctgggaggaaggagcgatttatgtggatcggagcttgaggtttccg

SEQ ID NO: 1490 - DNA, 6000 bp, Homo sapiens
ctcccaaagtcctgggattataggcgtgagccaccgcgcctggctgcttgttttactttcttaaactttactgtttttcttttttcttttttctttttttgtttaattcttctcagctcataccaattaactttactgtttttcatggacattaggggtatttcttgctgttcctttggcttagaggtaaaggtggtgttttctccctagtccatggtgtgacatttctctgcatttttccataggaggaagagctgcgcaaaggtggagaccccaaatatgcccacttgaatatggatctgcatgtcttcattgaagtctttggacccccatgtgaggcttatgctcttatggcccatgccatggaggaagtcaagaaatttctagtaccggtaaggaaatccatatcctgtgtcttctgagcaaaagagaactgggatcttatactgttgtgaaggtaggggttcttaactaaggtctctgcataacctgtatgtataccaaattctgcacttatgttcattttccttaggtagttcgttacttgcacctagttctcaaagcattatgctccaaggccactctatccctccttgtctaatgtggttttcattgtgtaccggtatcttgtcagtatctcgggtccacagtgtgcctgcattctgatatttggttaactaaggtttaacagggtcttcacctagctgagtattttggtagtagtgtggaacaaggagattgtgttaggaaagtgactaaggtgggtctctgcactcaagaagttcatgctgtagagagtagagactagcagcaagaagcttatagcatctagtgttattgggttaaattctgacctgagcacactcagggatttctttcctggaggagtttgctgaggacgagtttagtttggaagaggttgactattgatgtttaacagataggtgagcagcttttttcagactattactgaggactagatagagatgggacaggccagtttatctatcttgcttgttaccacctttgaatacttggttggaatattactttgaataaataggaaatggtactatttttgccttttagcaaggcctggtggttgtcagagttaacatactactgttgaatatttaataacaaggatgaatctggagacttatgaaggatttggaatattattaagtagaattgagtaagcgtcatgtgttcatcagaaaactaggaggaggtaagatacagtccttggttttcttgaatgttaaatgagggaattagaactaaatgtggtgtcagatgatgtgaaaattgatagggcaaaaatttataggcagtgtgggccaggcacggtggctcacgcctgtaatcccagcaatttgggaggccgaggagggcagatcacctgaggtcgggagttcgagaccagcctgaccaacatggagaaaccctgtctattaaaaatacaaaattagccgggcgtggtggcacatgcctgtaatcccagctactagggaggctgaggcgggagaatcacttgaacccaggaggcagaggttgcggtaagctgagattgcaccattggactccagcctgggcaacaagagtgaaactccatctccaaaaaaaataaataaataagtttttaggcattgtgtacccataatgctgaactccaaggattccaacagtctcaaatgtcttagcagctgctttgctttcaagtacctcatcttcattagaatgttcaacatgaggcagggcgcggtggctcacacctgtaatcccagcattttggaaggccgaggcgggtggatcacgaggtcaggagatcaaggccatcctggctaacatggtgaaaccccgtctctactaaaaattcaaaaaaaaaattagctgggcgtggtggcaggcgcctgtagtcccagctaatcgggaggctggggcaggagaatggtatgaacccgggaggcggagcttgcagtgagccgagattgcgccactgcactctggcctgggtgacagagtgaggctctgtctcaaaaaaaaaaaaaaaagaatgttcaacatgaaacagaccatttaacatatcctagagaaaaacacagctggttaataatcttaaggaaattctttttactctttttggggtgttctattgatcacccaagccattcaatttccaaaggactgcagagggaatgcccatctcctctcttcattgttagtctccctcatattcctcagaagggttaggtttatgaggcttgcttgtaagtgaatcttttgaaaaagatgcttgccggggagatgtgggtttcctcagtgttgatgtggcagttggaggagtctgagcaatggtctggcattggttacttgattctccaaggtgtgagtctcaagcagcggtaatgtgtaaggtaggaggagctagagagttgaggggggcatcaaagactagcatcatctattgaagctgtatacgcctgggatatataaaaatgcatgaagtattaagactgaatggctctcaataggaagtgtgaaaagatttgccagtggcatttgatttttccctcttgtggaggaaagaaaagtgaggctatttttgcatctgtgaccagagccctccattttccacttagaacaattaactataccagcaatgcttcacagtgccgtaggaagagcactggactatgtatgtctgtctatctgtgtcttcctgaacaggttatcatttcacttttctgagcttcaggtttcttgttcgtcccaaacatttcttaagtatctgtcagatgtctgatactatgcttgggtgtaaagttacaaaaatggctcctaaagagcttacagtttagtgacagacaattctaaaattatgtggtaagtgcttgggtatagggaattatgtggtactttgagaaaagaggagttgtaggggtggcatcaagagaaagtttttcaagagacacttatttaggcaagtcttgtaaggatgaattaagaatccctcaggtggacaaaaaagacagtataaggacaaaaaagcctgttgatccaacacctagattttgagacaggtaattctgaattcacatctagagtctgccatttattagctctgtgttcttaagctggttgatgtatactccttgagtctgttttcttaactgtaaaatgtggagatctgcctacttatttcagggtcattttgaagattttttttttttttttttttttttttgagatggagtctctctctttcgcccaggccggactgcagtggcgctatcttggctcactgcaagctccgcctcccgggttctcgccattctcctgcctcagccttccgagtagctgggactacaggtgcctgccgcgcccggctaatttttttgtatttttagtagagatagcgtttcaccgtgttagccagggtggtctcgatctcctgacctcgtgatctgcccgcctcggcctcccaaagtgctgggattacaggcgtgagccactgcacccggccctcattttgaagattaaactgaaaaatctatataaagcttattatatagagccaagtgcatacagctccattaatggtagtggcttttattattccaggaaaaggaaactatttgcaaagaatggatatgtaagagtatgccaggctctgaactacaagttgttcagtctggcttgtgagtaggttatatatagagagagaatggaagtgatccggagagctaggcagagaccacattatgaataatgaggggtctaccatcaagacttttctcaaagaggtgacagatagggtgccatttgacttcagagaaggaatgacctgagacctcatctgggctctcaagagctcttcttagaattcaagtctcccgtggaccagatgatttctcagtagaaagtgtagataccacacaatactccttgtatctttcgttcccaggatatgatggatgatatctgtcaggagcaatttctagagctgtcctacttgaatggagtacctgaaccctctcgtggacgtggggtgccagtgagaggccggggagctgcacctcctccaccacctgttcccaggtaaaaataatggagacacccagaaataggatgtgaatttgactactagtgtcatctcttttagtggtgctcttatgtctagcttaggaagggtctcaggatttgtatgttgcataaagaacagaattctacaaccatactctcacacctgtaatcccagcactttaggaggctaaggcaggcggatcaactgacatttggagtttgagaccagcctggccaacatggtgaaaccctgtctctactaaaaatacaaaaattatccaggtgtggtggcatacaccacactactcaggaggctggggcaagagaattgcttgaacccaggagacggaagttgcagtgagccgagatcatgccactgcacttcagcctgggagatagagcaagactccatttcaaaaaaaaaaaaaaatagagttctagatcttgggcactttgaccatagccaagtgctgcagtctagctgaaacttttggtcttctaattttggacagtcttagcatttgttaatggtctgactttaaaattctaccttttgtgactgacctttatagagtattcagactctccagacctacccaaggcagtgcagtgatgaattggtcctctataggacctgggggatcttgcagtgtgggtcctttaccctgtacattcctctgtgctttaataatagcctagttaaggcttcataaaatctgcctaattccagaatttgtaaacaaatcagaacataaaagtggcctgtttataaaaagctccatttaagataaactttcattttgtaggggccgtggtgttggaccacctcggggggctttggtacgtggtacaccagtaaggggagccatcaccagaggtgccactgtgactcgaggcgtgccacccccacctactgtgaggggtgctccagcaccaagagcacggacagcgggcatccagaggatacctttgcctccacctcctgcaccagaaacatatgaagaatatgtaagaaatttgaacaatgtgccatttcccagtacctagaaggctgctaaaggaagttgaatgacagggcctcggtcctttatgtaggtgtcatggactgcctgtaagatttgcaatctgccctcttctcttgcagtgaatgttgaactattagaagatttttccattttaggcagggttttactatacgcctgtagattaaacaagaaataaaatgtactttaatgtagtattttataatgaatttcttactactagtactgataatactaaagctcgattttgtactttacttcctgcccacacttcttctgtggcatatcatatttgtttgggttttctttgtttagtaaccctttctcttttgactattctacagtaggcattaacattttggagggaaatgtcatgtccttttaattcagaagcctacttactcccatgggatgtaattacctttcctactctctatgattttgatcttttatttcatttttttgttgttgttgttctagggatatgatgatacatacgcagaacaaagttacgaaggctacgaaggctattacagccagagtcaagggtgagtcaggcagtataagcactgttttttgtcctgaggatggatggagggagttggaggaacagagagatttagacagtacaaccctaaggagcagaatggttcgccttttgagggtatctcctctgcaacccccacagtcctgactggtcttgaactcttgagctcaagcagtcctcccactttagctctctctagtagctggggttacaggtgcgtgccaccatgcaatgctttcctctgcgtttgacatctgtgaagcacacacttggatttgtaaatctggataactgtgaaccttaaattataatttagaacctgag

SEQ ID NO: 1491 - DNA, 6000 bp, Homo sapiens
cttccttccttcctccctccctcccttctctctctctctctctctctttccttctttctttcttttgacagagtcttgctttgtcacccaggctggaatgcaatggctcgatctcggctcactgcaacctctgcctcccgggttcaagcgattctcttgcctcagcctcccaagtagctgggactacagatgcatgctaccacactcggctaattttttgtatttttagtagagacggggtttcaccgtgttagccaggatggtcttaaactcctgacttcgtgatccgcccacctcggcttcccaaagtgcagggattacaggcgtgagccactgcacctgtccttctgtgtgtatgttatgtttgaaaacaaagtttaaaaaagggaactgctctggttgaagccctgggaggggcagggagatggaaggcaaggagcccatccacagctctgtccttctcctgcaggcagcccttgagggctccttagagtattagcttgaaatccttcatctgtcccaacagagctctgagaaggtcagtgacttgcccaaggttctgcagagccagcactagaactcaggtctcctgactcccaggccagggccctggaggctagtcctttcctgaagggctggtgtcacgagtaaggacaaggggtggctaggcagcctccttcctgatctcagctcccttaacatgagtcttgggaggagggccaagactctggtatgaatgatgcttttctcatcctggagcaacttcctttctgggaattgggtgtctccttctgggcaaagacaataaaattcatccaaagggccagaggagcagggttcctccggcccccacccagatgggcatcacgtggctcccaagttagcagtccaggaaaattccagcccttgcatacttggcctcacacacccatctgctcactcaccctggcacattcagcccccctaacccaccttgaacattgaccaccacacactccctggcacgctcttctcaccctcaacttctgccacctctccctgggcaatactgccagcctttccctaatctcagagctgcagccctgccctgtcactcacctcaaacctgccatgtccctggggctactgaaattccaggcagtgggtgaagaggacgaggaggatgaggagggggagagcctggactctgtgaaggcactgacagccaagctgcagctgcagactcggcggccctcatatctggagtggacagcccaggtccagagccaggcctggcgcagggcccaagccaaacctggaccagggggacctggggacatctgtggtttcgactcaatggactccgcccttgagtggctccgacgggagctggtgagtctggtggggtgggcagctttgcccagggccttcaggctggtcctccttagggtccaagaccacaggcatggggaagggatgagaatggaccctgcctccagcaaccgcccgctccggtgtcctgggctgaggagccgggaatggacttgtccagtgttgtattcagggaggcttgctgaagaaggattccatccaatctactgaccttgtgctcctgttgcttaggggacagagcactggtgttggggggtgtggggcaccattataaatagggaaatacacagcctcccctactctgggactttctatggcctaaagatacagcgaagtgcaaaaggaggcactggccatgctgcaggcagattctgaagaggtgaagtttcagtaggtggctcccaactcaacatgtgcaaatataaagatacccaggctccaacacagagattctgcttagttgatttgggatggggcccaggcagttggatttgcttaataatgactccttagctgggtttgagaaccaccaggtgaagccagattgggagatagggagagatcaagctgaggtgagagggggctggggaggacacagtcagtgcaaaggcccagcgttgccaggaagggagaaacggcgcgcggccgagggcctgtccagtaggctcacgccccctctcggccgcagcgggagatgcaggcgcaggacaggcagctggcagggcagctgctgcggctgcgggcccagctgcaccgactgaagatggaccaagcctgtcacctgcaccaggagctgctggatgaggccgagctggagctggagctggagcccggggccggcctagccctggccccgctgctgcggcacctgggcctcacgcgcatgaacatcagcgcccggcgcttcaccctctgctgaggaacacctgtgccccccgactccccgccccctctcccaatgccgcttcccctgcctgcctgggaagaggaaagggaggggtgccccagaggcaccagctcctggcgggggaggaggaacattcaggtttctgagagctgaattccaagagtgcaaaaccccagcatcctgtttcctctgctgacccagctgggagggggaggaggaggagctcacaccctcaaactcctcaataaacgctttctctggttcccatcaaggtctcttgcagtcgtttattcaggcccaaggccgctatctgaatgtcgcctgtcactgggaccaccctagttcactgcaggcccatgggaggtgacttaggtaaattgggctcctgaagaatgcagaatctgagagacatgggttcaaagccagctaccccgtttatttctttttgttgttgttatttcttctgcttctttttttttttttttttttgaggcagagtctcactctgtcacccaggctggaatgcagtagcacaatctcagctcactgcaacctccgcctccggggatcaagcgattctcctgcctcagcctcccaagtagctgggattacaggcggccaccacctcgcctggctaatttcctttcttttcttttctttttttttcttttttttgagatggaatttcactctttcgcccaggctggagtagtggcgcgatcttggctcactgcaacctccaccttctgatttcaagcgattctcctgcctcagcctcccaagtagctgggattacaggtggccaccacctcgcctagctaatttcctttcttttcttttcttttttttttcttttttttgagatggaatttcactctttcgcccaggctggagtagtggcgcgatcttggctcactgcaacctccaccttccgatttcaagcgattctcctgcctcagcctcccgagtagctgggattataggcacccgccaccatgcccggctaatttttgtatttttaatagagacagggtttcagcatgttggccaggctggtctcaaactcctgacctcaagtgatccacctgcctggggtttccaaagtgctaggattacaggcctgagccaccgtttatttctattcgaccctgaggagctcccttaacccctgagtctgtttcctcacctccacaatggagatgctgattctcactccacaggcagcagatgtgccttacgggagatagtgcacagtgagcgctcagtgaatatgaactattactcactcccagcgcggcagtctttctactctgtgctgagacagggagatggaccgtgaagtgttcaggcttacattgcaagggagtctgggccctgcaccaggcttggagctccaactctaggctctgtgtcactgtgaaggtttttcactttgtctctctcagcctttgtttctgtgttaccctctttgtctgactttccaactcaggcttcctcttccccccacctatttcctgcccccacttctctctgcagctgaggtgcacacagcatcgcttccacctcacaagccccaacaatgctctgtgggttcccctccccctaccagctcactcaggcagtgacgcatgtgcactttcctcctggtggggtcaaggccgagttcttggacctgatgaggccacctggagttcctcatatcactggtgacctggccctcagctaatgatgggtgccccctcagcctggccccaggggaaatggaaattctttgcctgcctgctgctcgtgacaatcttcttgcctcctgcttataacagaaagtcctgacagtctgtggcctgcacctgggggcctgagcggccctgtttgctctgtcttccacctgttgcaggagatagtgccaagccctccacctctgccaggggctgtggccttgcctctacctgaattcgaactgttgccctactctccaaccatgattaatgggtgttgtcctggcctctgactacagcaggggccgttactatgccctcttgaagacatgaggttgtcctgtctgcctcctgaaacaggctgttttccagcattctgtctgtaagagggatggtagcctgccattcacctacccttgactataataaagctactgttccatgccctgagatgacatgggaattgttctctcggcctgacctgactgtaacatgcatggtctgctcaccagctatttaacagggatattgtcctctcctctgactctgaacgatgctacctttgctgccagacagaaacaaaagggtctctcagctgcaacggtggtgctgaggtgctgtttgcctctcaccataagctgagtgtgtgtccgcttgccccctgctcactgggcccaaaggctgcccttgaatctcttgcccagatgcaccctggagggcagaagggagggtctatcagacatcctcccctcaactttaaacctcccagtgtcaccctgggacagtaggggaagatggacctggtctggagatgtaggggacccccaggggctgagaggcaggggtctatggtggcaggaagcttggcgtgctagagggttgtggttgggctgctggggcccggttggctgcggagccctccggaggaggcaggaagtcagggtgggacgtgggcgcggggagacaggtggtggctacgacggcgaagggagctgagactgtccaggcagccaggttaggccaggaggaccatgtgaatggggccagagggctcccgggctgggcaggtaaggagcgctggtattgggggcgcaggcgccggggtgagaggcctgatagcagacggctgcagctgtgcgggcccaggctccctagggatgcagcagccctttgtggctggggagagaagatcctcgctcaaggtcaggtgggaggcaggcagtgtagctgggtcgcctctttcctgcgaagctggtgtcgcttgcctctgtcgtgctgtccaccagtggccccacctgactgggagcgtgtttcctggacaccaggcacatggacagtcaggtgttaaaaaggcttccagaaaccaccaagcccagtccctcaggccatgaggatgaggctcctgaggcccagagagaacaaggcactcactgcccacggtttctcagcaaggcagtggcagggctgagagtgatggctgaggctgtggccaccccgcctggagcagggtgatggacaggctggactcagaggacccaggaatccttctggtttctggggcagaccccagtgacaagaatctcctgagaaagagagagagagagagagagagagagagagagagagagagagacagagatcacccaaggcatccagatggacatgcgaggagtgattttagcctcagcgatcgagggaagaatctcctgatgggcgtgaactgatatgtgtgggggtgtccatcatctgggatggagctccagggtggatggacatatctgatctgagtatgggaagttggaagtgaaagagaatgatgggagaaaggaagaggaagtactatttttatcccagacaggggtgcagttggtcctgggtgaggaagcgctgaacttccatctggaaagtcaccattcctgcccctgccaagcgtcacagcaggatgtcctcccctcgcccctggctccctcccgcttcagccctgcctgtgtagggccagttggtttt

SEQ ID NO: 1492 - DNA, 6000 bp, Homo sapiens
taatcccagcactttgggaggctgaggtgggtggatcacttgaggtcaggagttcaagaccaccctggccaacatggtgaaacccccatctctactaaaattacaaaaattagctgggcgtggtgacacatgcctgtagtcctagctagtcagggggctgaggcaggagaatcacttgaacctgggaggtggaggttccagtgagccaagttcacaccactgaactccagcctaggtgacagagtgagattctgtctgtttttttttcttttgagatggtatcttgctctgtcacctaggctagagtgcaatggcgtggtctcagctcactgcaacctccacctccatggttcaagcaattctcctgcctcagcctcccaagaagctgggattacaggcgcgcaccaccacgcccagctaatttttgtatttttagtagagacagggtttcaccatgttggccaggcttgtctcgaactcctgaccatgtgatttgccctcctcagcctcccaaagtgctgggattacaggcatgagccaccgcgcccagccgagactctattaaaaaaagaaaaaagaaagaaacaggagtctaaagcaaaggagattaattacccagtcccattcttccaccttccaaagcaggagttggtaggacagaattgtgcactggtgaaagtgtttctaagcactaaactaagctaacattcatgtgagcttatgagaaatggatgaagagccccatttgacagaagaggaaaagtgaggcttaggaggaatgatttcagcaaagtcacacagtaagtgtcaaaattgctatttgaacttaggtctctaactatggggacagtcttctgagttttgctaatgagaaacttccactgctccctgcttccacttagacccagcatgaattctctctctctgtctctcttttgttttttctttttagacagagtctctgtcacccaagttggagtgaacagtgcggtggcagtggcaggatctaggctcactgcaacctccacctcttgagttcaagcaattctccagccaccatgcccagctaactttttttttttttttttttttgtatttttagtagagacagggtttcaccattgttggccaggctggttgtcttgaacttctgaccccaggtgatccacccaccttggcctcccaaagtgctgggattacaagcatgagccaccgtgcccagcctgctcttttgagatggagtctcgctctgtcatccaggctggagtgcagtggcttgatctcggctcactgcaacctctgcctcccgggttcaagtgattctcctgcctcagcctcctgagtagctgggattacaggcgtgtgccaccatgcctggctaatttttgtatttttagtagacacggggtttcaccatgttggtcaggctggtcttgaacacctgacctcgtgatccacccgcctcagcctcccaaagtgctgggattacaggaatgagccatcgtgcccggacttttttttttttttttttttttttttgagacggacggaatctcactctgttgccaggctggagtgcaatggcgcaattccggctcactgcaacctctacctcctgggtttaagcgattctcctgcctcagcctcctgagtagctgagattacaggcacctgccaccaagcccgattaatttttggatttttagtagaggcagggttgcaccatgttggccaggatggtctcgatcccttaatcttgtgacccacccgccttggcctcccaaagtgctgggattacaggtgtgagccaccgcgcctggcctttttttttttttttttgagacaggctctcgctctgttatccaggctggagtgcagtggcacaatcgtagctcattgcagccttgagctcctgggctcaagtgatctttttgcctcagcctcccaagtagctggaactacaggcatgccccatcacacctggctaattttttgattttttttctagagatgaggtctcactatgttgcccaggctagtctggaacttctgagtttgaatggtcttactgcctcagtctcccaaagtgccgcgattacagatgtgagccaccacgcccggccagcaactccagctttgctctactccaaataggttgtgtgactttaagcatacctctgtgggcctcagtttgctcatctaaaatcagaggtttagccaggtatggcagctcatgcctgtaatcccagcactttgggaggccaagaaggaaggatcacttgaagccaagaatttgagaccagtccgggcaacatagcaatacccccatctctagaacaaataaaaaatcacctgggctcagtggtgccagctacccaggaggctgaagttagaggatcacttgagcccaggagtttgaggttccagtgagttaggattgggtcattgcactgcagtctgggcaagagagtgacactttatctcaaaaataaatcaacaaataataaaattggagattaggcttgctggtttctaagacctttgcagatgggagactctatgcattaacactgcatgttccagttgacatttattaactaattttgggtgctggtggctttcagacaaataaactacagcttctgctcttgatgaacccccactctcatcaaaggtatgggagaggcagtgggaccctggggctgacatgtaaatcagtaatcatggaactctgtgtctaagttgattattgaggtctgaatagaatgttgcaggagactggggtgagagggaagcaaagagcattgggaagtcttcagactaggtgatatttaggccaggtgcctgtaatccgagcactttgggaggctgaggcaggagaattgcttgaggccaggagttcgagaccagcctggccaacatggtgaaaccctgtctctactaaaaatacaaaagttagccaagcgtgatggtgcatgcctgtaatcccaactactcaggaggccgaggcaggagaattgcttgaacctgggaggtagaggttgcaggaaaaaaaaaaaaggtaatatttcagctgagccttgaaggttgagttagaattcagcagttggacaaaagagagcatgccgactgggttcggtggtgcatgcctataatcctagcatttggggaggccaaggcaggaggattgcttgagcccaggagttcgagatcagactgggcaacatagtgagacctcatctctacaaaaaaataatcagctgggcatgatggtgtgcacctttagtctcagctactggggaggttgaggtgggaagattgcttgagcccaggaggtctaaggggattgcgccactgcacttcagcctgggagaggaagggagaccctgtctcaagagagagagagaaagagagagagagagagaaagagagagagagagagaaagagagagagagagagagagagagagcgagagagcgcacgcatttcaaagcagggagaaccacaagtacaaaggcattaagtaagaaaatagcatggggtgtttgggaaaggcaagaatagttcagaacacaggctgtgtgtgtgggggtgtgtgggggtgcctgtgtgtgggtgtttgtgtgtgtgtgagtgtgggtgtgtgggggtatctatggaggggatgcctgtgtgtgtgtgtaaggtgagtgtgtggatgtgtgcatgggtgtgggtgagtgtgtggaggtgcctgtgtgtgtgtatgaatgtgtgttggggaggggagaatgtgtgtgtgtggggtgagtgcgtgtgtgtgggggtgaatgcgtgtgtgtgtgtatgtgggtgtgactgtgtgggtgtgtggacgagtgtgtgtgttcctgggtgtgggagcctgtgtgtgtagggggagtatgtatagggtgtgtgcatgaatgtgtgtgtgggtacgtgtgtgagagtgggtgcctgtgtgtggggggtgagtgtgtgtgtgggggggcacttgtggagggtgagtgtatgtgtttactgagtgtgagtgtgggtgcctgtgtgtgggagggtgagtctgtgtgtgagtgtgtgggggagtacctgtgaggggtgagtgtgtgtgtttatgtgaaagtgtgtgtgtgtggatgcctctgtggaggtgggatagggggtgcctctgtgtgtgtgtgtgagagtgtgtgtgtgtagggtgtgtatatgtatagggtgtgtgtgagtgtgtgtgtgtgagagagtgtgtgtgtggcagaatagactgcggaggtggatttcatcttgatatgaaaggtctggaatgcatggtacattaaactttgaggacagcgctttccaagcactctgaggagcagccctagagaaggaggagctgcagggactccgggggcttcaaagtgagggccccactctgcttcaggcaaaacaggcacacatttatcactttatctatggagttctgcttgatttcatcagacaaaaaatttccactgctaaaacaggcaaataaacaaaaaaaaagttatggccaacagagtcactggagggttttctgctggggagaagcaagcccgtgtttgaaggaaccctgtgagatgactgtgggctgtgtgaggggaacagcgggggcttgatggtggacttcgggagcagaagcctctttctcagcctcctcagctagacaggggaattataataggaggtgtggcgtgcacacctctccagtaggggagggtctgataagtcaggtctctcccaggcttgggaaagtgtgtgtcatctctaggaggtggtcctcccaacacagggtactggcagagggagagggagggggcagaggcaggaagtgggtaactagactaacaaaggtgcctgtggcggtttgcccatcccaggtgggagggtggggctagggctcaggggccgtgtgtgaatttacttgtagcctgagggctcagagggagcaccggtttggagctgggaccccctattttagcttttctgtggctggtgaatggggatcccaggatctcacaatctcaggtacttttggaactttccagggcaaggccccattatatctgatgttgggggagcagatcttgggggagccccttcagccccctcttccattccctcagggaccatgggctgtggctgcagctcacacccggaagatgactggatggaaaacatcgatgtgtgtgagaactgccattatcccatagtcccactggatggcaagggcacggtaagaggcgagacaggggccttggtgagggagttgggtagagaatgcaacccaggagaaagaaatgaccagcactacaggcccttgaaagaatagagtggccctctcccctgaaatacagaaaggaaaagaggcccagagaggggaagggaatctcctaagatcacacagaaagtagttggtaaactcagggataacatctaaccaggctggagaggctgagagcagagcaggggggaagggggccagggtctgacccaatcttctgctttctgaccccaccctcatcccccactccacagctgctcatccgaaatggctctgaggtgcgggacccactggttacctacgaaggctccaatccgccggcttccccactgcaaggtgaccccaggcagcagggcctgaaagacaaggcctgcggatccctggctgttggcttccacctctcccccacctactttctccccggtcttgccttccttgtcccccaccctgtaactccaggcttcctgccgatcccagctcggttctccctgatgccccttgtctttacagacaacctggttatcgctctgcacagctatgagccctctcacgacggagatctgggctttgagaagggggaacagctccgcatcctggagcagtgagtccctctccaccttgctctggcggagtccgtgagggagcggcgatctccgcgacccgcagccctcctgcggcccttgaccagctcggggtg

SEQ ID NO: 1493 - DNA, 6000 bp, Homo sapiens
aagaaatgaagagagatatgaacagaaaattggaattacctgtatgtagaaggttagacaagaaccagaaaaagaatgaaggagaggacagtgttacagaactacaaccgtggtttttctttctttttaaaggggggaaacggatctgggtaaacaccagaaaaagaacacacacaaaagtaaacactgcatcagggctgcttgcttgtaagtaatcctcatcttaaaaaacaaaaacagggccaggcacggtggctcatgtctgtaatcccagcactttgggaggtcaaagtgggaggatcactggagcccagaagttaaagaacagtctggacaacatagcaaaaaaatttttcaaaaattagccaggtatggtagcgtgtgcctgtagccccaactattccagaggctgaggcaggaggattccttggcccaggaggtcaaggctgcagggaactctgatcgtgccactgcaacacagtctgggcaacaaagcaagatcctgtctcaaaaacaattttcagccaggtgcactagctcacgcctgtaatcccagcactttgggaggccgaagcgggtggattacctgaggtcaggagttcaagaccagcctggacaacatggtgaaaccccatctctactaaaaatacaaaaaattagctgggcgtggtggcgggtgcctgtaatcccagctacttgggaggctggggcaggagaatcgattgaacccaggaggcggaggttgcagtgagctcagatcatgccactgcactccagtatgagtaacaagagtgaaactccgtcctccgtctcaaaacaacaacaacaacaaaaaacaattctcacattatttatctagatttgctaatgcagaaaactactaagatgacagtacagatttcagccttggggaattaagtctttaattcttgctttcgaaacctagctagtcattctattatattacttgggaagtttctgaaaagtaggggttctagaatgtttagtaggtatgggatggccaatatttgtgatccactagtccaataagcacaatttagcatatgactatagtaaatgtggaatcaccattccagtacacttctcattaagtactctgccacaagttctttttctttgagacagggtggcaatccctagctcaggctggagtgcagtagcaggatcacagctcaatgcagccttgacctcccaaggctcaggtgatcctcctgcctcagcccccactgaggagctgggactaacaggtacgcaccaccatgcccggataatatttgtaattttagtagagacgggcttttcaccatgttgcccaggctggtctggaactcctggcctcaagcaatctgcctgcctcagcctcccaaagtgctgggattacacgtgtgagccaccatgaccagcccataagttcctaaatggtttgaattaccactgaaaactcttgacagaaatgattccaattatcctgaattccccaagcaattctgatgatcaattgcatgtgggaactcctggtcatgataaagaagcttctaggccgggcgcggtggctcacgcctgtaatcccagcactttggaaggccgaggcgggtggatcatgaggtcaggagattgagaccatcctggctaacacggtgaaaccccggctctactaaaaatacaaaaaattagccaggggtagtggccggcacctgtagtcccagctacttgggaagctgaggcaggaaaatggcgtgaacccgggaggcggagcttgcagtcagcggagatcacgtgactgcactccagcctgggcaagagaggagactccgtctcaaaaaaaaaaacaaaaacaaaaaaaaaaaaaaaaaaaaaaccagaaaacaaaaaacacacaaagcagcttctaactcccaatttctaggtttttactatggttttgtgtaacatccctaggacacatttccctatttttccttatgccactgtaaaggtagcagcctcattcttaagttactagtataatttctgccaaatttctatcatttgttgagctacatcatagtctaataacattttgcaattatcttaacttttaaagatccaagttttgaaggaatttacttagcatacaatcgcttttgaatgtaattcagaaaacttacttttgtaccagaaaatccattattccaaatggcacaatggtcttgttaaaactatgttaatatcatctaaatttaccctcctctttgttttttgcattgtcatttcttcctaagaaatgaggcaaattgaggcaaattttccttcctctgataattttatctgtaccacttttatgctaattataactaatttggatccccgatatgtagcaccaaatacagccccaataaatgcaagctattttatcccctctactagagataagctacctacacgtaagaaacataggattaatcttttagccctcactatgcccaaaccccttataagaaagccattccaccttcaggtgttttctaggtaccctaattatctctctacaactgctgtcaccatatataactataattattagtttatatctgccacttcaactagacaatgtgctccttgaaggcaggtaccatgacatactacgagaattcaaattaagttttgttgaggccaggtgcagtggctcacgcctgtaatcccggcactttgggaggcagaggcgggcggatcaccagaggtcagggggttggagaccagcctgtcccacatggtaaaaccccgtctctactaaaaatacaaaaaaatttagccaggcgtggtggcaggtgcctgtaatcccagctacttgggagggcttaggcaggagaatcgctcgaatctgggaggcagaggttgcagtgagtcgagctcgcgccactgcactccagcctggacaacagagtgagacaccgtctcaaaaagaaaaacaaaaaatttttgttgtaaggactagactcattgtaatacttttttctttttttgtgtggggggcagtagagacgagggtattcccagggctggtctccaactcctggcctcaagtaagtctcctgcctgggcctcccaaagtgctcggattccaagtgtgagccactgctcctggccataatactttttgaaagttgacaagttttgtactattatttggtacagccactattattacaggtattatcatcagctacagctatttaattcagtattgagaaaaaaacgccaatatgttttctcttgtcaggtaagttacaaaatcattttgttattttgccttactttgtggcctagaaaaaatgtcaccaagaggttttgatcacatgccttctccgggtgactgaagagcggaaaaaagaaaatcaatatgagaaatctacactgaaaatacatcaaaataacgttcgggagagtcatgtcacctggttacatctggaagccactgggcagttaggctgggccactccagagcatgggtcatcaccaaatcataaagaaaaggggtgttctttttccatattttgtattcctcgttgatcactcgttcttccactgcgtcgtcgaaggctgctaaaatttttaaaaacaaatttaagttagcaaacaaacggaaaccgagtaatcctctgcaaagccacctgcatgactcctacagcctaaccatgaaatggaggtgatttgtctaaatccccacggcagaggcatccacactctccactttcgcggcgccgaaactcctcgggccatccccgccaaacactccgttacccgttccaggccaaggggccagccaggccttcggagcacgctcgtgcgcgccgaaactcacaagcccgacgaggaggcccgagctccgagccttgtgggtaggaagcggtgtccccacgctcgggacagaggccgagaaaccgatatcggaggcaggaagagaaacaaacactggccgggggccccaccgctggcttcgccagctgcgaccgaaatcggtcccagggaactggcgagccgttagcacgccccgcggggagttccctcttcacgccttcagtaccggggactgcactcggcaaactcgggcctgccctcactgttaggccatgtcgaggccgcggctcagcccaggcacccactgccctcctgggtcggccccggcaccctcaccttccttgtcggccatggcgggcaggcgagccgggggaatcctggggtcgagcgttgcgggaggggcggggaggctgcaagagctcgctctgtgcgcgcggcctctattgtttcctgcgcccccagcgcgagggctgactcgcgcaccttcgcgccaacatcagccaatgggagcgctcctaatggcgggatgggcggggaagccgcgttcgcgaccaatccagacgcgcggagtagctttccgcggggaccgaggcgcgcgctccgcccctccccccacgcctccccgagccgacttccagcgattgcgcgcgccggcgttgacgggactgcgcccggtcagggtcacgtgagagaggtttggtccgcacactcccgcggcaagagggcagccattttcttgaaggctattaagcttacgaccctttcagagtactgagatgaaaaatctagaatgccttcgggtctagttatcaattttgggggtgaagcgggggaaagaacctcgccagtcagacccagacgggtttcattcaaggtgcccttcaacgtttttccttagtctttggaaagaactagtaatgaaggaatcgcagaagatggggttttggctttttaaatatgcgatccaagcggcagggtagggactaaagtaggtcaacagccaactccgagaaaggagtgtggtcctttaagggtgtgcgccaaggggcggagtctagagcggaagtagtaactccgggccgaagtccggtggatgaagggcggaagtagagtgtctaatcctgcagtcatggcgcaggaagaggaagatgttagagattacaatttgactgaagaacagaaggcgatcaaggccaagtatccgccagtcaataggaagtacgagtgtgagtaggtggcttacttctctctttacatgtaagcacacaggcatcccctctccttacccgcggcttcctgctgctctttctactgtgccccatgggtacttcaggcatgatcccatttgtgccggctgttgtagtcgcgttcgtacttctcctggggatgctgaaggaaaaagccacctggtttaatagtcgcgaaacctggcctccctcatttacagtctcttgaacttcttccacatgtgcctaatcacatttatcttcgtaaattctaaagataaccatattttcaggcgtttgcagggttgttacccccatgtatttcccaacggtgagattagagtgtgcgaggttagaggactcggaaagctaattaggggatttctaacttgatgtttcacctcgatcatattagcaaaaaacctggttttgccatttatgattgtgatttttaaaaatgattattttaggccgggctcggtggctgaggcctgtgatcccagcactttgggaggccgaggcgggcggatcacctgaggtcggaagttcgagatcagcctgaccaacatggaaaaaccccgtctctactaaaaatacaaaattagctgggcgtggtggagcatgtctgtaatcccagctactcgggagactgaggcaggagaatcgcttgaacccgggaggcggaggttgcggtgagccgagatcgccccattgcactccagcctgggcaacgagcgaaactctgtctcaaaaaaaaaaaaaaatgtgtgtgtgtgtgtgtgtgtgtgtgtgtgtgtgtttttagagatggggtctcgctctgtcgtccaggctggagtgcaatggagcgatcatagcccgcgctgcagtgcccagctggttttgccatttattcgcttagtgactttaggcaaat

SEQ ID NO: 1494 - DNA, 6000 bp, Homo sapiens
gcaccactgcactactccagcttgggtgacagaatgagactgtctcagggaaaaaaaaaaagatttttttttcttggtatctaattccaggttattcaattaaagttttttattttattattatttttttttgagaaagagtctcactctgttgcccaggctggagtgcagtggtgcaatctcggctcactgcaagctccgcctcccgggttcacgccattctcctgcctcagcctcccgagtagctgggactacaggcgcccgccacctcgcccggctaatttttttgtatttttagtagagacagggtttcaccatgttagccaggatggcctcaatctcctgacctcgtgatccgccggccaaaagttctattttcaaatgtataaaaaaaaaattaggaaaattattttaaaatctcagtggacaaggcattccctgagtatgacttcttatcttagaagccataaaaaaaagggttggccgggagtggtggctcatgcctgtaaccccagcactttgggaggctcaggtgggcggatcacttgaggtcaggagttcaagaccatcctggccagcatggtgaaaccctgtctctactaaaaaaaaaacacaaaaattagccgggtgtggtggtgggcacctgtaatcccagccatacggaaggctgaggcaagagaatcacttgaacccaggaggcggaggttgctgtgagctgagatggtgccactgcactccagcctgggagacagagcaagatactgtctcaaaaaaaaaaaaaaaaaaaaaaaaaaaaaaaatgccaggcgtggtggcttacgcctgtaatcccagcacttcggaggccgaggcgggcggatcacctgagattggaagttcgagattggaagttcgagaccaccctgaccaacatggagaaaccccatctctactaaaaatacaaaattagccaggcacggtggtgcatacctgtaatcccagctactctgtctcaaaaaaaaaaaaaaaaaaaaattagccaggtgtggtggtgcatgtctgtagtcccagctactcaggaggctgaggcagaagaattacttgaacctggggggcagaggttgcagtgactggagatcatgccactgtactccaacctggatgacaaagcgagactctgtctcaaaaaaaaaaaaaaaagaaaagaaagaaagggtcaatgcagggggtccccaaccccctggccagtaccagttggtggcctgttaggaaccaggcagcacagcaggacatgagctcacaaagcttcttctatatttacaacagctccccattgctaacattactgcctgagctccacttcctttcagatcaggcacagcattagattctcataggagcttgaacactattgtgaactgcacattgagggatctaggctgtgtgctccttatgagaatctaaagcctgatgatctgtcatccccagatgggaccatctagttacaagaaaacaagttcagggctcccactgattctatattacagtgagttgtataattatttcattatatattacaacgtaataataatagaaataaaatgcacaataaatgtaatgcgcttgaatcatcctgaaaccatcctcccctacaacccccgttggtggaaaaactgacttccgtgaaaccagtccctagtgccaaaaaggttggggaccgctggttaatgaactgcattgcataaaaacactttctgcctagtaagaaaaaccaacaacccaagacaaaaaaaaaataacccaagagaaaaaagggctaagaatattaacatacacaccccagaatgggaaatacaaatagcttccaaaacagtataatatgttcaacttcacttacaataagaaaaatacagtaagtatactttacaaattagaaaagataaaaaagtatggtaacaattagtagaagtgggaggaaagaggcacattcacacaatactagtgaaagtataaattggtacaactcctatagagagcaatttggcaataactgtccaagttaaaatatccttttaaaaaatgtaggagtcttagcaatggaaacaaaaaaaacttggagaacttgattctacagattcacttgcacatgtacaaaacagtggatgtacaagtgtattcactgctgcactgtttctaataccacaagagtagaaatagcctaaacgtccatcaactgaaaattggttaaagcaaatgctagaacatctaggtatgtacatgtaagaaaaaggtaacgatgactgctctacagagggggactaggtagttgaggatgggggctgccagagttacttttcactgcctatgttacactttctgaatttcaaatcaatatatatgacctattaaaaataatttttttttgagatggagtctggctctgtcgcccaggctggagtgcagtggtgcaatctcggctcactgcaacctccgcctcccaggttcaagcgattctcctgcctcagccgcccaagcagctgggattacaggcacccaccaccatgcctagctaatttttgtatttttagtagagatggggtttcaccatgttggccaggccaggctgatctcaagctcctgacctcaggtgatccacccgcctcaacctcccaaagtgctgggattacaggcgtgagccacagcaccaggcctttttttttttttttttttttttgagacagtctcactctgttgcccaggctggagtgcagtggtgtgatctcggctcactgcagcctccaccctcctgggttcaagcaattctcctgcctcagcctcccgagtagctgggattacaggcgcccaccatcatgcgcagctaatttttgtatttttagtagagacggggtttcaccatgttggccaggctggtctggaactcctgacctcaggtgatccacccacgtcagtctcgcaaagtgctgggattataagtgtgagccaccgcaaacggcctataatattttaaaattgtttttaagtgagagaaggggatatgctaggaggtatgccagctccagaaagcacattgcctagaatactatggtaaataagtagattttacagagaggacaatgagaaattaatgaaagattttaagcagataaataaaagtcagatttgtgctccccaaaccacagctacctttagggatgacagcttaacgtttaatatagaatttaagagacaaagataggttatgtgatttgcctaaagtcactaagcgaataaatggcaaaaccagctgggcactgcagcgcgggctatgatcgctccattgcactccagcctggacgacagagcgagaccccatctctaaaaacacacacacacacacacacacacacacacacacatttttttttttttttgagacagagtttcgctcgttgcccaggctggagtgcaatggggcgatctcggctcaccgcaacctccgcctcccgggttcaagcgattctcctgcctcagtctcccgagtagctgggattacagacatgctccaccacgcccagctaattttgtatttttagtagagacggggtttttccatgttggtcaggctgatctcgaacttccgacctcaggtgatccgcccgcctcggcctcccaaagtgctgggatcacaggcctcagccaccgagcccggcctaaaataatcatttttaaaaatcacaatcataaatggcaaaaccaggttttttgctaatatgatcgaggtgaaacatcaagttagaaatcccctaattagctttccgagtcctctaacctcgcacactctaatctcaccgttgggaaatacatgggggtaacaaccctgcaaacgcctgaaaatatggttatctttagaatttacgaagataaatgtgattaggcacatgtggaagaagttcaagagactgtaaatgagggaggccaggtttcgcgactattaaaccaggtggctttttccttcagcatccccaggagaagtacgaacgcgactacaacagccggcacaaatgggatcatgcctgaagtacccatggggcacagtagaaagagcagcaggaagccgcgggtaaggagaggggatgcctgtgtgcttacatgtaaagagagaagtaagccacctactcacactcgtacttcctattgactggcggatacttggccttgatcgccttctgttcttcagtcaaattgtaatctctaacatcttcctcttcctgcgccatgactgcaggattagacactctacttccgcccttcatccaccggacttcggcccggagttactacttccgctctagactccgccccttggcgcacacccttaaaggaccacactcctttctcggagttggctgttgacctactttagtccctaccctgccgcttggatcgcatatttaaaaagccaaaaccccatcttctgcgattccttcattactagttctttccaaagactaaggaaaaacgttgaagggcaccttgaatgaaacccgtctgggtctgactggcgaggttctttcccccgcttcacccccaaaattgataactagacccgaaggcattctagatttttcatctcagtactctgaaagggtcgtaagcttaatagccttcaagaaaatggctgccctcttgccgcgggagtgtgcggaccaaacctctctcacgtgaccctgaccgggcgcagtcccgtcaacgccggcgcgcgcaatcgctggaagtcggctcggggaggcgtggggggaggggcggagcgcgcgcctcggtccccgcggaaagctactccgcgcgtctggattggtcgcgaacgcggcttccccgcccatcccgccattaggagcgctcccattggctgatgttggcgcgaaggtgcgcgagtcagccctcgcgctgggggcgcaggaaacaatagaggccgcgcgcacagagcgagctcttgcagcctccccgcccctcccgcaacgctcgaccccaggattcccccggctcgcctgcccgccatggccgacaaggaaggtgagggtgccggggccgacccaggagggcagtgggtgcctgggctgagccgcggcctcgacatggcctaacagtgagggcaggcccgagtttgccgagtgcagtccccggtactgaaggcgtgaagagggaactccccgcggggcgtgctaacggctcgccagttccctgggaccgatttcggtcgcagctggcgaagccagcggtggggcccccggccagtgtttgtttctcttcctgcctccgatatcggtttctcggcctctgtcccgagcgtggggacaccgcttcctacccacaaggctcggagctcgggcctcctcgtcgggcttgtgagtttcggcgcgcacgagcgtgctccgaaggcctggctggccccttggcctggaacgggtaacggagtgtttggcggggatggcccgaggagtttcggcgccgcgaaagtggagagtgtggatgcctctgccgtggggatttagacaaatcacctccatttcatggttaggctgtaggagtcatgcaggtggctttgcagaggattactcggtttccgtttgtttgctaacttaaatttgtttttaaaaattttagcagccttcgacgacgcagtggaagaacgagtgatcaacgaggaatacaaaatatggaaaaagaacaccccttttctttatgatttggtgatgacccatgctctggagtggcccagcctaactgcccagtggcttccagatgtaaccaggtgacatgactctcccgaacgttattttgatgtattttcagtgtagatttctcatattgattttcttttttccgctcttcagtcacccggagaaggcatgtgatcaaaacctcttggtgacattttttctaggccacaaagtaaggcaaaataacaaaatgattttgtaacttacctgacaagagaaaacatattggcgtttttttctcaat

SEQ ID NO: 1495 - DNA, 6000 bp, Homo sapiens
tgagatagagtggtggggagcactcatcagacctgtgggatgttgtggacggaaataatttttaagtgcctgcacctctaccatcctgtgaatcctcaaggacaaggacctgattggagtcacttctgtgttcccgacagaacccagaactctccccaggacatagcattcctcaataaaagattgctgaaatgaaccgaagcccagtagctcaaggttactggccagctgccagtggcgaaaagcttggcgaatctccccagcagctcagtcccagggtagcactgttggagctggagaaacagccctggaaagacacagctgaatgtcctaagtccaacatccagaagcttccagaagctccactcacagcatgaataatttaggacaggactggtggtcagatttgggaagggcattgaggttggagaggagaacttcttaggtgccctctcagccgggcagctgggccttctggcttcccaggtgactgcacagcctccgtgagccctcccagctggccctggctgctgagaccctgcccacaggacctggccctgtggaggttcaatttcacacccaggccccccacactcttcctgtgcatgcagcttggcttcccttggtattcatcttcccctctcaccagggaaggactgtggcacttacttctcttcttctccttcttcttctttcttcctcttcctcttcttattcttatttgtagacagggtcttgctgtgttgcccaaggtggtctcaagctcctggaggcctcaagtgatcatctcacctcagcctcacaaagcagtggaattacaggcatcagccactgtgacttgacactcatttatttatttatttattttctaagacagagtttcgctcgtcgcccaggctggagtgcaatggcgcaatctcagctcactgcaacctctgcagtgagttcaagcgattctcctgcctcagcctcccgagtagctgggattacaggcacccaccaccccccagctaatttttgtattttcagtagagatggggtttcaccatgttggccaggctggtctcaaactcctgatctcaggtgatctgcccgcctcggcctcccaaactgctgggattacaggcgtgagtcactgcgcccagcgacactcatttctaagttgaaaatgattcttcagcttcatgccttagtgccttctagcccccctcacaggatcttttttatttttattttttaaattttattttttatttttttgaggcagagtttagctcttgttgcccaggctggagtgcaattgcgcgatctcggctcgccgcaacctccacctccccagttcaagcgattctcctgcctcagcctcccgggtagctgggattacaggcatgcgccaccatgcctggctaattttgtatttttagtagacatggggtttctccatgttggtcaggctggtcttgaactcctgacctcaggtgatcagcccaccttggcttcccaaagtgctgggattacaggcatgagccaccgtgcccggcatatttttaaaatttatttgtttgtttccttttttgagatggagtctcgctttgttgcccaggctggagtgcagtggcacggtctcagctcactgcaacctccgcctcccaggttcaagcgattctcctgcgtcagcctcctgagtagctgggattacaggcacatgccaccacacccagctaatttttttttttttttgagatggagtcttgctctgtcgcccaggctggagtgcagtggcatgatctcagctcactgcaacctccgcctcccgggttcaagcgattctcctgcctcagcctactgagtagctgggattacaggtgtgtgccaccacacccagctaatttttgtatttttagtagagacggggtttcaccatgttgaccaggctggtctcgaacccctgaactcaggtgatctgcccatctctgccacccaaagtgctgggattacaggtctgagacaccgcacccggcctactctctgcctctatgagctcaatatttttaggttccacatgtaagtgagattaggcagtatttatctttctgtgcctggcttatttcacttaacagtgtcctccaggttaatccatgttgtcacaaatgacaggatttctttctttctttctttctttctttcttttttttttgagacagtgtcttgctcttgcccaggctggagtacagtggcttgatcacaactcactgtagcactgtagcttcaaaatctcctgggctcaagtgatcctcttgtcttagcctccagagtagttaggactacaggtgggagccactatgcccagctaatttatttttattttttatttttttgtacagttggggtctccccatgttgcccaggctggtctcaaactcctggcctcaagcaattctcccaccttggcctcccaaagtgttgggattacaggtgtgagccaccacacccagccaggattttcttctttttaaaggctgaatagtattctattgtcccatagggactttagaatcaggctgtagaattctctggtgctgaggcctctgcaggcttctgtggagaagatatcccacagagggacctgcacttaggcaggttacaactgtggtctcctgatctttctccggaagccccagaggtacctgtggtctaaggaaaagaacccttggctgagtcataggacctagattctttgccttcgcttcagacagtagagagcagtggttaaagcatgagatttggagacaggcttggatgagaaccccagctccaacactagtttgctttgtggacttcagcaagtcatttaacctcttgaagtctctgtttccttatttgtaaaatgagaataataaaggtaactactgtacagggtttttgggaagacttaatgagataatatacacaaaacgcccaggacattgcctagcacttagtaggagttttgtaaatggtggttgcttgcccttaatatgaaacagtgcctgcaaacacagaaccttagcaagtttcagtgagtggaaaacatcccttcccatctctatcgtccctgctccagttgacagcctcattacctttggctgggactagtacagtagcctcctagcgtaaccatccacacccatctggtacctgtccttgggttacttttgctgttactttgacacctttcttggctgcttataataattaaatttaggtcaaatttcttttccttccttccttccttccttccttccttccttccttcctctctttcttgatggaattttcactcttgttgcccaggctggagtgcaatggcacaatctcggctcatcacaacatccgcctcccgggttcaagtgattctcctgcctcagcctcctgactagctgggattacaggcatgcgccacaacgcctggctaatttttttgtatttttagtagagacagggtttctccatgttggtcaggctgatctcgaactcccgacctcaggtgatccgccagcctcggccttccaaagtgctgggattacaggcgtgagccaccacgcccagccaatttaagccaaattccttagctcaagggcctttgtaaattgctccaacacatttttttttctcccaatcgttatggtgaaaaagaacagaatgtgaatctgaagacaggggtccagtcctgggaccatccgctttctccctacatgactttgagtatatcatctcagttctacatctatacattagagatcattatgctgcctcatgggatgcatccatctttcctgctgaactgtgagcccatggtcaacaggcagggatgaaatgcatcttgctcacactgtatcttcagtaccctgcatggggcctgacaccgggtagatgttcagcacgtatttgttgaatgaatgaatgaatgaatgaatgaatgaacagggttgtgaggactggatttggcatgatccaggtaaagcgccttgcacagtcaccaggagacacgcccatatggtagctgttgctacgcaggttactaagtggaatgactttagacacattacttctctggaaacattcacgtatctgtcctaggagaggatagaagggactcctgcctcgttttgtgcatcattaggtcgtgtgtgcagaaggagctcaataaatgcttcctcggtggataaagcatctcccaaggctccacttggggctagcgctgtctaaagagactgagttccctcattggggcctggttcttttctgctctttaccctgcggggaagatgaggccttctttgggtccctccttcattcagttccagaagcccagcagataggtgggcctataggacccgcaggatctgcaggacgctctccgagagctggagcaagagcgccaagggcggggacggaatgtgggtttaagggaaacgggcgaaagaggggtgggcatggaaaagggtggtttgagaaccaggggccaggcagaaggacagcccggcagcctgagagagcgactggggggcggtgaggagctccaagggggcgggtcggctgagctggcccagggtcagctagcggccgcggggccggggcggagaggtcgcagagcagagggcggagaatttgggggtgtggttggcctgcgggggacaccggaggccactagggaggagttgcagaggggagggaccgagggagggcctgggggcggccagaggacgcggggtcagtgaggagggggcgccgggcgacggactggcaggggcgcgcggggcgggcggaagcgcaggggtggggtgcagggcggggggagcgcgcatcggggggcggggggcggcgtcggcgctgggagtgggggagcgggttgggcggctgcgccggctctgcttcagccgctgccgctagggcgcggggggcggggggctcggcgccgcgagctcggccattgtgggagccgctcccctcggctccgccacgctcccctcgactgcgctccagcctggggcgcgcccggccgccgccgccttcgctgccgccacgggcccgtcttcttcctccttcggctcccagggtaaggcgcggggcgcggggttggatgcaggcgccctgcccgctgcgcgggatgcgcagcggcggctggggagcggtgattgatcgcccccggcggccgcgccccagctcccggcagccggcggccgcggacaggcggcttgacaggcgcgggcacagcggcagtgcgggcctcgcacctgcagcccccgcggccggcgccggggagcggcgaagactcggagctggggtttcccctctgcgggcgctgccagggtggaagggaggcgtgttccccgggaaaatgggacacggagccctgcaggggccgggcgccggaccttagggagcgggcagggctgggcggggaaggtcgcttcccggccccagggctcggccgctggccccagcgccctgtcggtcctcggtcgcgcgtccccgctctttgtcagccacgcttggcgggcgcgcggacccacccgcgccgccccaggctcgcgggcgcgcccctcctccgccgtggggaaacgggtgggggccaggtggggagggtcgcagggggtgagagcacctggtgaggtgcctgtcgccgaccggcctgcggcctagggggtgggctggggcttgggcgggcactcctgtgagtctcggggattgatggaatgacccaggtggccgagggtcgggcgggagcccggaggtcaaacaagtgtttgtgaggggccggagattgacggggtagagcccagaagggacgctttctccgggaggaggccttgggagagccggcctttgtagtgaaatgggcgtcttggagaggaatgggcggttctgggatgaagcaggtggtctgagaggaggggcatttttcctgcccccgagctgagggtagggatggaagcttggcctgagtttcccagaggt

SEQ ID NO: 1496 - DNA, 6000 bp, Homo sapiens
tcattcatgcatttaatcaaaaatttaggccgggtgcggtggctcatgcctgtaatcccagaactttgggaggctgaggtgggcagattacctgaggtcaggagtttgagactagcctggccaacaaggtgaaaccccatctctacgaaaaatacaaaaattagccgggggtggtggcaggcgcctgtaatcccagctactcgagaggctgaggcaggagaatggcttgaactcaggaggtggaggttgcagtgagcccagactgcgccattgcactctagcctgggtgacagagtgagactccgttgcaaataaataaataaattaaattaaattaaataaagtaaacaaatatacaaatgcacgcgcgcgtgtgtgtgtgtgtgtatgtatatttttagagaccaaattttgccatgttacccaggctggtcttgaactcctgggctcaagcgatcctcctgcctcggcctcccaaattgttggaattacaggtgtgagccaccatgcatagcattaaagaaatagttggccaggtgcggtggctcacgcctgtaatcccagcactttgggaagccgaggtggatggattacctgaggtcaggacttcaagactagcctggccaacaaggtgaaaccccatctctactaaaaatacaaaaattagctgggcatggtggcaggcgcctgtaatcccagctacttgagaggctgaggcaggagaatcacttgaacccaggaggtggaggttgcagtgagccgagatcacaccattgcactccagcctgggtgacagagccagactctgtctcaaaaaaaaaaaaaatatgtatatatatatatatgtgtgtgtatatgtatatttttagagaccgaattttgccatgttgcccaggctggtcgtgaactcctgggctcaagcaatcctctggcctcggcctcccaaagtgttgggattacaggtgtgagccactatgcatagcattaaagaaatagttggctgggtgcggtggctcactcctgtaatcccagcactttgggaggccaaggtgggtggttcacgaggtcaggagatggagaccatcctggctaacacagtgaaaccctttctctactaaaaataaaaaaaattagctgggcatggtggcgggcgcctgtagtcccacctactcgggaggctgaggcaggagaatggcgtgaacccgggaggtggaggttgcagtgagccgagatcacgccactgcactccagcctgggtggtgacagagcgagactccatctcaaaaaagaaaggaaagaaagaaagggagggagggagggaaagaaagaaaagagagagagaaagaaagaggctgggcgcggtggctcgcgcctgtaatcccagcactttggaaggccgatgcgggcggatcacgaggtcaggagatcgagaccatcctggctaacacagtgaaaccccgtctctactaaaaatacaaaaaattagccgggcgaggtggcgggcgcctgtagtcccagctactcgggaggctgaggcaggagaatggcgtgaaccccggggggcggagcctgcagtaagccgagatcgcgccactgcactccagcctgggcgacagcgagactccgtcaaaaaaaaagaagaaaaagaaagagagagagagagagagaaagagagagagaaagaaaagaaaagaaagacgaaatagttaatgagtgccctatatgtgccagatcagttgctaggtgctaaggatcctgtggtgaattagacgacaaacagtctcagccctcagggagcttacgatttagtaaggatgagagacactgtaccataacttcaagtgtgatgagtattaccaaagggtagaggaggacctattaattggaggcggggggggggtcaaggaaggctttcccctggggagtttcagcagaagcatgggtaggagtgagccaggccaaaggagagtgatgaagggttataatctgggaggaaagtcggttggatggccctgaggcgagataacacattagaggcgctgaaagaaatagaaagtggcagggctttagggataggggtatttgatgaggctttaattgggaggacaccaaggataaagggcattaatttccttgtattactcttctcttccactagatgcccttccgagtacatccttctgcttcccccattgcagccttcttagaaatgcagcagcagtctcacccatcaggagcaaaagaaaatcaaagaccaaaaggagaaagcctcagagcttttgcgactgtgtggtctggctataaatttagactgttgcttgaaagaagcgaaaaacctccccttcatagacttccttcttcccatcccccctggcagccgctttgttcctctagccttgtaaaattttctctgtataaaacaggaacatcagccaaacatgtggacttccccactttccattcattagaagaatgcattatttcaaaatctcctgggagcatttaaatgcaaattttgtcaagaaagcaatttgagtcttagagaagctctctagccacaacctaaagcagaagtttcttctttgatttgtgtgtttcttaaaaggaatctcaaccccttgccttctccctgcaacgcccccaggtcttctctgattctcacagcggactcttcccctttttgcccctgttctttcttcacctttggcaagcatcagtcacacatcttgaggaacctgctcacaaagtggcgcgtgtagcagccccaggtgggaatggagggacttttctatgtagtgtaatggacataaggaggcagatgtctgtgtgggggtgagatgtctgtgtggaggtgtttgtatgcgtgatttctgtctgggccttcttaggcctgctggtataaaataatatgggaaatgcagatgactcagcactgacacagtcaagatccccagagttagcatttctatattctctgctgtttacgaaaaatgtgcttgtgccatcaatcagcaactcatcctgcattttccgctaaaagccttttactgaaaaatgcatatacttcaaacttattccccttctttttgtaaactgagctcattagcagctgacaccaaactgagaactagttttgtttgtttgtttgttttagcacggaggattaaactggaaggaaatgagcatttgtctaaggatcctccctgtcctctttcaggcccttccctgcatgatcttcatgcccacaacttgggcaggccagcaaaacttgatgggaaaagatatgattaatgacttgctcacctgatttctgatcagggtgtggtgtggaaacaaccagcatgcacctattagcgaaaagcgtcatttgttttacttgttaccaatgtgctgagcattgaccaaaatacttggcactactcacaaggtacaaagacaccttccctagcctggggttaagaagtttctccttcaaactcttgagaatgggaactggaatggaagcccaagtcccaattttggttgctcagtgttgcatgaattctttttttacttgctaatgtgcccttattgtgagatcagccagtgtaacttcttacccacaaccacctctccagacctcctgaaaaatcaagctaacaggggaggataactgctaaatggggggtggcgggcacaacgtgtcacctacattgaccagagttcttcattcactgctcatggctccagcgcactccatgaatattgggattgaatgatacacaaccgaatgttggatcaaatgatgttgggagctctgtcctcaaaatggcccctaataaatccctacccatattttccagtttcctttctttactctttcctttcccctgatgacaaagaataattggcttccccttttcttccctgaccagctatgctccagagtcctttctttgttccctaacagtcctggttccgtctcaggttcccacatttctcccttttgatctctgtctctctgttcagatggctgtcacagtttaataattctggagggtctatcccctacagatttatgtctccctgtctctcctcttattcaccccatggtgcattcagaatcccgttttcgtgcctccctgggttgtcatttctcaggctctggctccttggcctggtttacttcatggtgctggatctgccccgtcacttcttgttcagcttcttctgtttctggaaaaccctttgttcccgggcttctttgtgggctcagtgtcctccggccctacactgcagccctgtctggatcttgcccttgtcctcgttctgaccgcgtctagccctgggatctgaggcatcgtggtcttttgccctctgctttcccttcagtttctccaggtccttctccagcagccgcacaggccccgctgggtttctctccagccagggagaaaccctcctttgtcccgctcccggcggcgtaggtcagcgctgactggggctcccgctcgccctgtggagccggcccgggtctccctgccgttcggccggcccagcctttcatcctgacgcgcggggcctcccacccagcgggactcccgcgtgggccggcctctcgcgcccctcggctcgggccccagtccgggccgggcgggggtcggcagcccctgggggacccgtgtgggcagcccgggcccagccggccgcagcctggggccgaggactcgccgggacccggaggcggcggggagagggggcggggaacgggccgggcctggcgctcctgacaggaggagccgccgccgccgcccgccgctgcagccgcgccggggcgggctgagggaggagcggagccgaggggtgaggacgcggaaacgcgagccgggaccggcggagcgcgagcgggccgggtgcgagcggactgaggagcggagcgcgactgccgggccgggcgaggcgggcggacggcggagagcgagggcgccgtcgccgtctctgagacgcacaaagggtcgaggctggggccgccgccgcctcagcgcgcgggcctggaaccggcagcccccggggctcggcgagaaggcggtgcgggcggccatggccggctacgtgccgggtcagcagccggccaaccgcagccaggagaaggagttcgtgcaggcgtacgaggatgtgctggagcggtacaaaggtagggccggggactggccggcgctgaggcccgcgggccggcgcagcgtggccttcggagccggtcggctcggcggctgcaggtggggcggccgggcggggtcgcacccaccgcgcggggcttggccctgagctgctgcttctcggggccagtttatttacagagttgagataagccttcggaaaccgcccccggggcagtcggcgcgctcagagcgccagttacatgatttgccctattatccggccccagctggaagaaggcgagacaaggcgctggcctggagaccggccgccgtggggagttgctggggaggaggaggaggaggagttgggcgcgggagaaaccacccgctctgctctgggtgcgagcttcctcccagaggggctcggacctctgtgtgcccgcggagagtccctccctcgcccccttttgtctctttgagtctcggatgagtcgcgtggaagccgaggttggaaagcaccttggtgtcttcggggtggggtgggcagcggtgtgggtgagtgtgcagtttttggtggcgagaccttaccccctccatctccccgggggtctgggcctgctggaggtaggggtctgtttttttcctcccacataaagatttgccttggagctcggatttcagccctgaaggctctcttgcgagacacttctgcaagttaatgcctaatctgcgccttgggtgtatggggagaaagttttgacagacaagagggcctgtggactgcatttccctaactgctgtaggtgcccctgaatggaagccagggatgcgtggccttgggaggcccttgccttgatcttta

SEQ ID NO: 1497 - DNA, 6000 bp, Homo sapiens
cattggcacattccgcatctttgtttgtttattgccatgttcgccacagtgtgccttgttttgcgctccttgttttgtgaagctggactcttatcagataaacttgccatgagtcacactggggagtggaagtatgtctccactaatttggagaatctttgatcttgtttcactccctggtttggcttgtccagtgcaatttgtctctcaacctgcaagaggtgtgtgtgtgtgtgtgtgtgtgtgtgtgtgtgtacttgggtgtcccttgcctgtggcttcacctgttgccatgaatggttgacttcagggcatgcccctttgtgtatacagacttcctctactattgttatcaccatcagcaaaaatgtctctgttaagagcctctttgaatgtagaatatagtatataacactgagagttcataaaccctctgtcctctagggatttacagtatataatacacattacaaatgacaaaagacaataaagaatgtgtaagcggttgaacaaataatggattattgctcctcatttagctatcatattcacagtagaagatatcctaaaaagacatgtagtcagtgaggaagaggattaacagagaccagatcatcttcagctccaactaagatggcagagagctgccacctgtggccctttgatgccaggtaatttctctctgatatcctttctagtcatgcaggacctttttgccatattatctatacatatggggcaggatcctaacaggacctttgctctctagtggtaacctgtcactgaaatgggaggctccagtttccagcagggagagtgcctggaaggcttggctcttctggtacagttatctttgtaacttgagaaaatttattccagacctactacaaacattcgtgtgctcacaagcaccacagacagagcagcagccaaagctagctgcagcctgagcatgggtcagtgtagggaaagaagctaactgacctggcctgagtcacctctagaggggaagaatgtaggacttgtcccagcctttgttggttagtttcccaaatggaaaacagggaccagagtaggtggggtactttgaggtcctcatacctttcagaggactggatccttgttttcattcttgttcttattgttaataagtgtaataacagtattcatgtaacactgcctttattaggaagaatgaggaactgccaaagggctggaaattttctttactttccctgtgggagagaaagatagatggagcattaggtgcccatctctcaggcctcctttctctgattatcctgtgggaagtacctggaaagcagtgaggcattggaaggaatggtctaggccttggcatgagtatgtggtcgtgaaggcataagacaaaatatcttgtgtagctgtagcacaggtgctgtggtaagaggaaataggtttgggggcagtattaagggggctaataagcgcagaaaatagtatttgttgctgtcgttagttacttcactttgccttgcctatatgtattgtctgacagcagagccgaaactccagcatccttttgtctcctcctcctcctcctctttttcttattttctgacttataaagatgtatatcttcaataaataagcttgtgatgatatggaaagttaaataaataaaagttctagaaattggaaaactaaatggtgatttcattgtggtctttaaatataacaagtgttataggccacggtggctcacacctgtaatcccagcactttgggaggccaaggcgggcagatcacctgagatcaggagttctagaccagcgggaccaacatggagaaaccccgtctgtactaaaaatacaaaattagctggcgtggtggcccatgcctgtaatcccagctacttgggaggctgaggcaggagaatcgcttgaacccgggaggcggaggttgcggtgagccgagatcgcaccattgcactctagcctgggcaacaagagcgaaactccgtctcaaaaaaaaaaaaaaaaaaaaacaaccagaaaaacaaacaagtgttataattgtaattcttgtaattccttaagccaaaactccattataacatttcttagtttgttgttgttgttgttgttgttactttttgtgtgtatttgtttgaacttcccagctgtattgtgatctctttgaaggtctagattgtgtctgatgagatgcatatgatgcacttcatgaattgagctactttgcaaatgatgctggttgttttatttcttagtgttttcagcaacttccagcacctttcacaatgtttctttccacgtggttgtcccacagatgttgcatacttgatatgtccaaaaggggcattgttgtccccctccctgctcctggacctgcctcttcttctatgttcccgattttagtgaatgcttttcccgtccatccagtggagaaattctaaatactgaatgctttgtgtatactaaatatatattctgtccatttcatagtttaaagtgttgctatcagatggagaattgtaatgtgcagaatataataaagcctctttttttttttttttttttttttttgagacagagttttgctcttgttgcccaggctaaagaagtgcaatggcatgatctcggctcaccgcaacctctgcctcccaggttcaagcgattctactgcctcagcctcctgagtagctgggattacagacatgcggcaccacgcttggctaattttgtattttttagtagagacggggtttctccatattgatgaggctggtcttgaacttctgatctcaggtgatccacctgtcttggcctccgaaagtgctgggattacaggcgtgagccaccgcacctggccaataaagcctctttataccattttctaatttctatttcatagaattttaaaactgcataagcctttaacctctgtttctcaaattcactttcccctttggaatgttataattctacttcacctgactcctggaactccctgttatcatgtaacatattttaattattttgattgttgtctgagtcttcctactacaagagtgagactgagtctcactcttggccaggctggagtgcagtggcgctgtctctgctcactgtaacctctgcattctgggttcaagagattctcctgcctcagcctcccgagtagctaggattacaggtgtgcaccaccacacttggctaatttgtgtattttagtagacacagggtttcaccatgttggccaggcaggtctcgaactcctgacctcgtgatctgcccgccttggcctcccaaagtgttgggattacaggtgtgagccaccacacccggccaacaatgcaaacttcttttaaaaatttgtttttaaattttttgtgggtacataataggtgtatgtatttatgaggtacatgagatgttttgatacaggcatgcaatgtgaaataagcacatcatggagaatggggtgtctatccctcaagcatttatctttgtgttgcaaacaatctaattacactctaagttattttaaaatgtatagttaagttattattgactatagtcacccttttgtgctatcaaatagtaggtcttattctaactattttttaaaaatgtggaacacttcacgaatttgtgtgtcatccttgtgcaggggcctccctaacctctctgttgttccaattttagtatatgtgttgcttaagtgagcactagaatgcaaacttcttaagaatagaggtttttatttgtgtattaactaatttccctagcacctagaagagtttctggtataaagtagctgctccaatcaatattgaatgaatgaattggaaatgttaagttagttcactcttgttccccataaggaaaagaggcatggaaaggcacaataacttgctcaagctaacgccatatctccttaccaggtaagtgggttttaaaaaagtttaaataaaacgatgcttaatcacagttcctttatgtgatttggtactaatgtgtattatggacttaactgtattatctctatgaaaaggggtgggggaagcaaaagggaagaagctaatatatattgagtccttactatatgccgggtattttgttttattttatttatttatttatttatttatttgagacagagtcttgctttgttgcctggtctggagtgcggtggcactatctcggctcactacaacttcgcctcccgggttcaagtgattcttgtgcctcagcctgctgagtagctgggactaggcgcgtgccaccactccgggctaactttttatatttttagtagagacggggtttcgccattttggccaggctagtctcaaactcctgacctcaggtagtccgctcgtcttggcctcccaaagtgctaggattataggcgtgagccaccgcgccaggccagtcttatttaattgtcataaatgatatcctatgatagtccagtaaccttactagattttacagatgagagaactgaggcttaaggaacctaaatcacttcccagagggtcacacagctagtaagtgactgaactgggttttgaacccaggcccgattaactccatttggccctcttttaccttaaggcacaggaaaattttggatttgtggtctgggttgctttaagattcccagatcagactactcttgaaaatggtctgatttgaactactcaagtagagttacaaaaattgtttaccttaagacagccccatggagcagtggggttgtgtctgtagcgctcttgagtaaaaaaaaattctgtgttgcacatactcccactcagttgtatcgtatataattcacatttcagactttctttttaaccagggatccagaataactacagaaaggtgattatgtaacatacttgtacagtgcagccacttctgtgtttggtaatattctttttttttttttttttgagatggagtcttgttctgtcactcaggctggagtacagtggcgcgatgtcggctcactacaacctctgcctcctggattcaagcaattctgtacctcagcctcccgagtagctgtgattacaggtgcccaccatcatgcctggctaattttttgtatttttagtagagatggggtttcaccatcttggccaggctagtcttgaactcctgacctcatgatccacctgcctcagcctcccaaagtgctgggattacaggcgtgagccactgtgctcggctggtagtactgttaagcgctaagagcacaaacaaaaactatgtctaaaatgtagggcaggtagagcaggtgaggattaaacccagttgaaatcagcggtttcagtagtaagtgggcagatcataattacctgtgttgctcagagacctaagctgagagtgggggtggggaaaggtcacacccattatctttggagaaatgatgagagtaaataacccatagtttccagtttattccagaagcattctcgccagagtcacaatgttgaagtgggttttgagttagaccttgttaccccagatcatccaaggttaacatagtttccttagataccacagccattcattgtgaacgctgttagcttcctcttaggtagctttatgtagcctaccttagaaaggagggtggggtctgggaggggagaggagggaatagcaaaagtagcagagaaacaaaggactaattaggaggttcctcagtcatttgggagtagatctttttcattagctgatcactgagatcaaggatggaggtggtgatccaggaggaggaggagttgtagtaatcagaagcagaatagcataacttggcagtcagtggtggtccaaggaccagcagcatctgatagcttgttagatacatatatatataaattttttttttttttttttttttttgagagagtctcgctctgttgcccaggctggagtgcagtggtgcgatcttggctcactgcaacctctatctcccaggttgaagcga

SEQ ID NO: 1498 - DNA, 6000 bp, Homo sapiens
ctctgctccccaggtaaatattatcctaaagttgatgtgtatcattcccatacatgcttttgtacatttacagcagatgatctattcataaacaatatgtactgttgcttgtatgtctttatatttgacacacatagtatctttggtatatcctttctttcatcttttttcttttttcttttttttttttttttttttgagacggagtctcactctgtcacccaggctggagtgcagtggcgcgatttcagctcactgcaagctccacctcccaggttcatgccattcttctgcctcagcctcccgagtagctggggctacaggcgcccgccaccacacccggctaattttttgtatttttagtagagatggggtttcaccgtgttagccaggatggtcttgatcttctgacctcatgatccgcccacctcagcctcccaaagtactgggattacaggcatgagccactgtgcccagcatgatttgttcattttaactaatttaatgtaagtggtgacccctgcagctgtgtaacacatctattatttgtaacgtattatttaattgtatgaataaaacattcattgctacagtgaacatctgtgtatatgcatccttgtgcctatagcaaagagggttttgggattgatacctggactggaattgctgggttatatactttccttcagtttgcctatattttgccaaattgctctcaaaggtactgtatgacttacagtattgtattgggtaacatttactactatttgacatattacatgtttacttgtttatttgctgcctggatgcctgcattagtatgtaagcttaacaatggcagggatttttgtctcttgttcttttctttgcctggcatagaataggcagtcagtaaatatttattaaatgaatggattgtttcatgaatttgatcttctcaaagctttggagtaggtagaccaaataaataggctgtaatgtctgttttcttatgcccatttctcagataaggaaactgaaacacagagaccgactgacttttttgggttacacacccagataggatttcttttttttttttttttttttttgagacggagtctcgctctgtcgcccaggccggactgcggactgcagtggcacaatctcggctcactgcaagctccgcttcccgggttcacgccattctcctgcctcagcctccccagtagctgggactacaggcgcccgccaccgcgcccggctaattttttgtattttttagtagagacggggtttcaccttgttagccaggatggtctcgatctcctgacctcatgatccacccgcctcggcctcccaaagtgctgggattacaggcgtgagccaccgcgcccggccaggatttcttgtcttttggctttgtccaagcttgttttaaggtataggttaagatttatagttcttctaaaagatactataaactctttataggcagaatctgacaaaactagttttccaaccctcaaatgtttgttaaatactagtgtatgcctagcattttgaaattttcaaaaaatgggaggtcttagctggctagacttgaggtttacagttttgtgcactttatggcacttggtgcttggcatatagatgaggcaccatttgtgtttttggaatgaatgaatgaatgagttcttttgctttggagtctttcactctggctgtctctgtgggagacctgtgggcagtaaacagttatctacaaaaagccaaaggagaaggcataaagaatgtataggcctcaaagtgtgctttcccagaaggcagcaagtcttgtgttaagagaccaggttagatgagaaaaggtcttggggaaaggtctcgtaatcagaattaacttagttgaaaatacatctgatatacctactgaaaactatagtttagcctatcttaaatgtattccgaacacttatattagctaaccgttgagcatttggccaaaatcatgtaacacaaagcctgtttgatagtaaagtgttgactagctcatgtaatttattgagtgctgtactgaaagtgaaaaacggaatggttgtgtgagtacttgaagtacagtttctactgaatgcatatggatttctcaccactggaaagtcgaaaaataagctggaccattttaagtcagggaccatctatatcttaggatccccccgggggctggggatgtctcataacttttagttccagtaataaatgggaagaaaagaaatttactgtaggtcaagtactgagccaagtactttatggacattatctcattaaccttgtctacaatcccagtaagtaggtggtagtatgcacattttacaagtaaggaaactgaaccatctaataaactagttaggttacttaacttatgagctgggaagttgaacctaggtccaccttactgaaatctctgctccttccctagaccagtttttctctggagcagaaggaaatgaaggtctgattggtctgacatatgcagaaattttaaaaaaagaataggctcacagaagtaaattctcagagaaactctacagcagtagtagtcatattaagcagctatttctcttgcctctaagtttattagtttcaggattttggtttgcttgtatgtcattcataaaattcaagtgcatcttaaagttcccatagttccaggtttcttcactggaggagtgaaggcctggtacctgcctagagaacttcatattgtaatgtcagattctttgttaattaaatgatttgcagtagcatgagtttctctcccatgctctctgcttatttcttactatagtttgtgatggccataagatggtgctgcagttttgcagtcagccttaaggataaggcttaggggaagaacacctactgcagttgtgaggcagatgggacatcaggagggtcttagaagggattgtgtaaaagccgttgctttagggcttcttgttgctttccttttgtggtcttttcctttttttttttttttttttttttttcaggtctccaggaaagatagttaaggctatgctagtgtaagtctttatggcttgcatggaaccaggcaggctactgctttctgctgtgtggcctggatccttttgttgtagaataaataactgcaataggaaagaaacacatatataattttattctccattcacagccctttgggttatagtcttttcccatatagcagatactatactaaaaaaaattggggtggaggaatcttcactgacatcacaaggtgatttttgaatccgacttttacagtctgaaattcagacttcctgccctactgcaatgggagtaaaaaccacctgaacctctttttggcagcttcttctcttactcccaaatggcaacaagtgttatctctttgattgagctcttggtccatgcagtctaattaccaattcagaacagtgggggaacttcttattttacacaactggcaactgagtacagatttccactactgcagtagttagaagagagtagttggggttgaaattaaaagtcttaaagttaacagaagttcatgttctggctttgtcacttactagctgtgtaacctagggctattaatcaactttcttaaacctcagtttcttttttcttttttggagacagagtcttgttctgttggccaggctggagtgcagtgacatgatcttggctcactgcaacctccacctcccagttcaagcaattctcatgcctcagcctcctgaatagctgggactaagggcgcatgccactgtgcccagctaattttttgtattttagtagagacggggtttcaccatgttgcccaggctggtcttaaactcctgagctcaggcaatccgcctgccttggccttctagagtactaggattataataggcgtgagccactgcgcctggccaaacctcagtttctttaccgataaaatataaaataatagttttgacctcatatagtgactgtaagaattaaatgagaaagtccatgtaaataactttacacagtgcttggcacacagcaagtgcaaaaaatatattagatgttagcagtggcagcatcaataattactattgaacatttttgtcaaatattgttcatcagagaccctgttcatctgttgtatttagaagtggtattctttttaccaagcactcatttactgtactcaaaaccaacttccagatttttcctgtctgtgtcattggctggcagaattaacagatctttcttttcttttataggaaaaaggagggaaataaatgctccagaaggctagatctttaaagtctgtgttccttttcttaactgtaagaagaaggctctggtttcttcaggttataatttcattaaaataattttattgttttctgacctgaaaaaattcagaatatgtatatctgcttgatattttcttttgggcatcttggtgcaacacttaaaatctatttcattttgtagtttgggagccataattgcagcttcaccaggcttggttcttcttggcccgggcccttcccttcccttgctggttagtaccagccgagctggtttgctttttccctttttggtactattctcctcctccttcctccacgttaccttctgccacggcctctcttctttttccctccattttcaatttacacttacattttccctcctcctcctggccctccctagtttttcccctcccctggtttctagctcctttttgctttctgtttgtgttactgagggcagtgctccaattacctcatatttggagagaggaagctgcagccaatccggtttctgtctgcttttaggtcaagtgatttctgaactgcagtgagatgctttgaatttgtcttgttgcagctctgagcctgtaagatggctgtctgaatcggcagcggctggaagagacagagagaggcggggagggagggagaaagaattggagggattgccggcatagtgcatgtttttaaatgtgcatcgaatccgatgaggccaaggttgggatttctgtgggatcccaggactggcttagctgcgtttttgctgagattaggagaggaaggaaatgggaaattcactgggctgttttaaggagccgaaagagtcaatagctattcctgagaaggctcccatatctcctaagaaaagggttcggttcaaaaggaggtggagagggaagaaaatccctactccagaggcatctcaccaggaagaaacctcagaaggaactggagtcattgaagagactgaaaccctaacgaagttaacagagagtctccaaaaggaagacggagtgggaggggtagagcatacccccccagatattttgctgcctggggactcagcccccaactcacgggtagtcgatcgggggatgatagtacaggtaaaggagagattccaaggggaggtccagaccgcccaccttttgttagagaatgagtcatcagttgctggaggggtctgggattccctggaagaggggatgactgtcattgctcacctgcttgataacccagcagaaaggaactgcgagaagtcagtgagccaactggtggaatttcctaggacagcatcctgcagcagcagggctgtgttgctgcctttgcaaggagagactgcagtggagaaaggaaatattcagcgtgggtttcggagctgtgctttgcctaggacagactaccccactgataaaggaaatcaagaacaattttcagagggctggagtgtggaggaaggaaccaagagtgtttcaggtgcccctcagacagcttcctggattatagaatgttctgtttcttcattactactggaccagcctggaggccaaagacgcacggagccttcccatgtgggtcaagtgcccccccaggattccagactgcctacttctcagagtgatttgtccatcagtggtgtgactgtgagcattttgccctcctcctctggctatggcagtga

SEQ ID NO: 1499 - DNA, 6000 bp, Homo sapiens
aggactgatagaataagaggaaatggaggcattaaggaaggcttaggacatatccatgagttgatggatagatcccatttgaatcaacagagttcattctcagaaacataatgtggaatgaaaaaagaaagttgcgggattcatcagattcaagaggtggttacctttgggaagaaagggaaaggaatggacttggtgacaaatatacagtgggctttaattatatctgtaatgtcttatttctaagaaagggtctaaagcggccaggtgcggtggctcacgcctataatcccagtactttgggaggctgaggcgggcaaatcacctgaggtcaggagttcgagaccagcctggccagcatggtgaaacccagtttgtactaaaattacaaaaattagctgggtgtggtggcgggcacgtgtaatcccagctactcgggaggctgaggcaggagaatcacttgaacctgggaagtggaggttgcagtaagccaagatcgcaccactgcacttcaacctgggtgacagagcgagactccatctcaaaaaaaaaaaaaaaaaaaaagagagaagaaaaagaaaaggccctaaagcaaatatgtaaaatagtaaattgtgaaatgaaagctggatagctagacaacaggtaaataagaatgtgttacattcttctgcctgtttaaaatattttattttaaaaagaaaataggtatagaaggagtaaagaaagataaaactgaaaggtagagttataatcatatagtggattcttgaagtctaagatttcagaagcagaataatttcagatgataggatctaagtttgacatttgggggtggggctaaagtggagatgaggtcatttgaactacaagcataggggtgacatagcattgacatcatcaagaaccatgacttgatttgagataaacagaagaactgactgaaatgccaaagtctccgatgaatatggaagaagatcatccatccaagatgaagaagtagcaattttgaagcaatagagcagagtttggagattgtttttttttctcctaaaaaagctttaatgcttcatcttccaggctctcagaaaaagagaagaaacaaatatctgagcaattgaatgccctaaacaaggcttaccatgacctttgtgatggttctgcaaatcagcttcagcagcttcagagccagttggctcaccagacagaacaaaaggtacttttagttttcatctccaaatattgggtggataccttttgaatggtatgaaggcagctttgctgattcagagtcatgatcactagctttccatgaccaatgtgacttaatttttaacctcaccttagcagccatttgtcttgtgtttctttactggggttccatgatgtgttggtcagtcaaaagcactagaagacacttacaactaaccctttagacctggttcaccttttttgtcttatgccattttgtggcagacagcagtctaggagaacataaattctgtattatatgtgatcacagggcagtaacatactcccttgtggcattgtcactcaaaagttgatagccaaaagttctggatattgggaagaaaaacctgtgaacctcttccctctatactaaggcagtaagaaatattaagttccaaagcaaactggtagagtagtttcactgactaagacgctggttcccctcacccatagtcatctcatcatgtggcatcttgaccagttcccctccatattcatttcctggaccatgtgaaagtcatcatagttcctactggttgtcctaagttcttcctggatacttgtgcgtgtgtgtacacttaccatattatatacatgtgtctctgggatatatatgtgtgtttgcctgcttatttcctatgttgtgaagcaatggccaacttatgtggggcaggccaaaattaagctcacgtgatagtcaaatttggtccagatgatgctcaaaatgatattcagacaaagcatgtcttgattctgatccttggatataaattttgtgcaacaggagctagagttgtaaaaaccacaagacaaaaccagctatgatttgatggtgtatttccaaaaacaaagtgctggtgtaacattctccatttaaggtagcccacttccagtggcttgttgcttcaccatataagggagtatgtgaaaagttttaacaattgcttgctgagaacatccggttctcattttgaaaggttaaaaaagaggggggaaaaggaaaaaaagaaaaaaagaaagacaggacaggctgctgagcaccactacattgagcatgatgtgtctcctgtatgtgtgtttcatgtgaagtattgttctgattaactgacatccttgcttacaagtttcactaaccctttggagtttaagcacaaatgcacaaagggaaaagaggacgacctgtttggggttcttttttgcaaaaacaaacagtcgcatgctggacgctaacaccaagcttacactgtgtgtgtgatacggctgagctgctccataaggctctatcttttatctgcccaaggcgtgccctgcaactctggtaagtagaagccttttatgttttctttcctcctctccttctatctcttaatgcttgtttaggtcagaatgtccatgtttggtaggacagaaatgagtttctctggattttttcccagctgagtatttcctgcctatccttcaattatatgagggtgttggaagtaacagtgtagacttttctctttggctacactgcaggcctttcttcaatgtcagcatttttgagactccatgaatctcacaaaagaaatgaaaagttctcaaagggatgtttttctttgtcatattgtctgttctgaatagtctttcatggattttctaaaaggaatttttaaggtatcttgaaatttttcagttatcacattccagtgaactttttccttcaatttctttaaaacagacacatagtgagtttgtataatatatatgtttaaattatatgaattggactttctattcttggtcagaaaacatggggatagggaataaataatactttaaatagtgtagagaagtctgtcagttattccattgattgaacacatatgtagaaatggagatgagaaccaaatatactgttctttcatttgctatccattctgtattcttattgtatgcacctcatcaagcttgaaatcctcagtgcgtgtttctaacacctgaggggaaatggcttaatgattttaagggtttccttattatttatccatattcatcccatatttattaaatgacagctactgttcctagaccttcatggacaatggatcagctcttacagaacttactcactgagataaaatgaaatgccattatttaggaggcagggaaataattggaaattgcttccacaagatcctctatcaataagatagagagttaaataagtaatcagaaagtagcactgaccaaagagggacagataaaattatatacagaaaatgaaaataatgaacatgaaaagaagagctgaaaagttggagagtaataaaaatgatgaagtgttgtaagtggttaaacacttaaataatttaaaatctgaatgtattattctgtgataaaagatctcaaaaatgagaattctttaggagctgtttctaggatttgcaagggtaattttgacagcgtatatgccttattcactgaccttcggacctaactcctgtgttaagatgtgactctactgtacttgtcttttacagttttctgggtctgactctgggaggacaaacaagatttagaatcagaccttgatttgtttctggaactcactagttttgtgaccttggacaagttacctaaactctgtgcctcattttcatttcttcaaactaaagattcaaacaattgttttcataggattactgtgagaattaaatgtcagtgttcagtagatctagtaataagtgatagctgtagtcatggttattgtactacccattctagcctggatcagaagaaaagttactagtggttccataggcaagggtccccaatctgtttcttccttgacttgctacttccaagacctagaactaacttaatttagagccattgccttgggagaagctagcattgtccaagaatatgagtatcccacttgctaaatagttgcttgagtagtatacacaggcctgtttactgggatgcacaattgttctggagcttctgggctgcataaatctctcttattctatggaccagtcctgctgtgctcatcagcagggaattgctacttctagagtcttctgtgtggtttgcaacaccaaaaacttgttgtatggcgttgaattctcactttgggggaactgttacgtgtctttaagaacatttatgatgatttagtcttagaaataagattaaatcctatcattttcactgcttaccaccctgtagagcttgtcactcagatatgcttaatgccactatctctcaagtaatctaggaacttctgacctattaaacattctgcagtttagaaaaactcttttttagtcttaacaccgggtggcttgcttcagaatatttcctacatgttggggcttatcccatgctgggttttccttgtggtcagaattttatatactgtagtactttttttttttttttttgagacagagtctcgctctgttgcccaggctggagtgcagtgatgcaatctcagctcactacaacctccacctcccgggttcaagccattctcctgcttcagcctcctgagtagctgggattacaggtgcgcaccacacccagctaatattttgtatttttagtagagacgggtttttcaccatgttggtcaggctggtctcagactcctgacctcatgatttgcctgccttgggcagattataggcgtgagccactgtgcctggcctgtatactatagttctttgaatgactcctttcaatagttgtgctttgccattggctctgattcagttttctttttcttctcttttccttttttttttttttttttttttttttttaggaatgcagagcagttgctggggtgattgacctaggcacagtggagatatttcccatcttcaaagccatgcaaaagggcctccttgaccaagacacaggcctagtgcttctggaatctcaggttatcatgtctggcctcattgcccctgagacgggtgaaaacctctctttggaggagggcatagccagaaacctcattaatccccagatgtaccagcagctccgggagctacaggatgccctggccttaataagcaggcttactgagagcagaggccctctttctgtggtggaagcaattgaaaagagaataatcagtgagacagttggactgaaaatcttagaagctcacctggcaactggaggtttcagtctttcccctagtgagaactgtattaacctggaagaggcttttcatcaaggcctcatttctgcatggcttcattcagtattagagtcttatcttagaacatccaagaatttgatagaccctaacacagctgagaaaattggtttgctggatctgatgcagcgatgtattgtccaccaggaatcaggattcaaattactgcctgtcaaacaattggcaggggggatggtgagcttgaaatcaggccggaaggttagcattttccgtgcagttcaggaagggctaatagataggcaggtcactgtccggttgctggaagctcagctttttgctggtggcatagtagatccaagaacaggacacagacttacagtggaagaggctgtaagacataatctgattgaccaagatatggcctgtgctatcctcataaggcagcttcagacaggaggcatcatagacactgtcacggggcaaaggctaacaatagatgaagcagtgagcaatgatctagtagctgctaagatcgcccttgtgattctggagtccctctggtcattcatggg

SEQ ID NO: 1500 - DNA, 6000 bp, Homo sapiens
gatcttcactataacagattccctttttttcttggatcaagtcaggtctcttcctattcaacagtaccttaatcaatagtcaattcatctgatcgtatcaggcatttataatatgttatagtgaggtctgaaggattctgctagattctagcaataatattggccccatgctaatctagcaacagaacagctttgccagagagcagccgaaaattccttcctcaagataaactcctcatatcatttggaaagttgacttttaaagctgagaaatgactactgacatggttgatatatctttttctcaaaaggcccagggcttccacagtgaaattgaagatttcctcttggaacttactagaatggagagccagctttctgcatctaagcccacaggaggacttcctgaaactgctagggaacagcttgatacacatatggtaatagcaattttttgaaattgagcataagcatcccatattcactagctcctttccaagttcacagtcataattaatatgtatctggaaatctacaaagtagtgcatttttatcaaacatatagtataacctttggggattgctgcctgttacaggcttctaataccttacagtaggcagcagtagtgacagggaaggtcagctggaaattttgagttaatcagctttactggcacacatatattgacttgaagatgacagcatcaagaagacaaatatacaacacagatgtgctttcacttaagaaggaaactacttaaggggggtttagggaaatcaaatagttacccgacagtatttcaagaatgcatgctagaacaaaaagcaacataatttctaggcaaatttttcatgaaaaggggaaatagattattggagtcttttgagggatctctaatccttaaaaaatgtttttcttggccgagcgcagtggctcacgcctgtaatcccagcactttgggaggccgaggtgggtggatcatgaggtcaggagatcaagaccatcctggctaacatggtgaaacctcgtctctactaaaaatacaaaaaattagccgggcgtggtggcgggcgcctgtagtcccagctactcaggaggctgaggcaggagaatggtgtgaacccgggaggcggagcttgcagtaagccgagatcactgccactgcactccagcctgggtgacagagtgagactccatctcaaaaaaaaaaaagtttttcttctatgggtgataaaattattttaatattttaatttgccacttgttatttagtaaaatatgttaatacttacattttaatacaaatgaattctaagtaatcagtatttagttattacaattaattttattattaagtatggtgggtttcattcccttatggctcagcacttgaactgaatccaaaagaatggcttgtaatcaagatgagcccttcctggactttcccagactctgctacagaatctatatgtaggtgtcttccagagaattcgtagaattgatatctttcctgccttttcttgtaggaactctattcccagctgaaagccaaggaagagacttataatcaactacttgacaagggcagactcatgcttctaagccgtgacgactctgggtctggctccaagacagaacagagtgtagcacttttggagcagaagtggcatgtggtcagcagtaagatggaagaaagaaaggtacagtgtatgatccccatgtttgagtaatttgctgagtgattgcatgtataataattgccatcttatttatatgaagattttttgaagaccagggtattgtaacagaagttgcagaactgattccatctgtgttgagttgcattgatggtataagtttctgttgttatttgcttttataattattcattccttacctgttaagacattactgccattatcgcttcgtgatgggctttatgtcctatattaatcaccaatttgtgttctacttaaaaacaaggttttgctggagttggtatcttggggttgagagattggggacagggcatatagggactgacgaataattctccacaaggaatttggttcctaacgtaaatgtagtgtgcaaggaaatttactagaaatcaggagagaagtaaattatatgacctcttcccactcatcctcaaaaatcaaattctcttctctacaaaataatgaaagatgactagggatcaaggtgtttgcccaaaaagattattttttatgagtacagagtttcactgtattttttgctgctcagatcaagtatgaaatatatacatacacaaacctgttgaccacattcactcaatgaatagttattgagcaagtgtgtgccaagtcctgtgcctgatttatggtggaaacactaaagacgaccctatctttgggaaattaatgaacagaagggcataaaacacatgaacatcttgagagaagcattaatttcctaaaaaccttctagcatgggattgggtaatttgattatattaagaatggctaaaggacctaagtgtatgctaattcttggacagagtcagacctggtggctcacgcctgtaattccagcacttgggaggctgatgcaggaggattgcttaacaccaggagtttgagaccagcctgggcaatatagcaagaccccatctctacaaaaatacctaaaaattagccaggtgtagtggcacacgcctgtagtcctagctacttgggaggctgaagtaggaggctcacttgagcctggagggttgaggctgcagtgagcagtgatggtgcccctgcattctagcctgggtgacatcaataacctatctccaaaaaaaagagaaaacaatccttggacaggctgtcatccatagatcctgcagaaggcaaagctaagattaaataaactgagacagattccagctcataaccaagaaattttcagagagttttcttaatagttgagcaaaataccttaagacatagttgcccattatcagaaatggtcaggcaaaagctgagtgtcaaggatagtttattattttgcagaaacattaccttcaggatcagtaaaatcatttattaaatgtgtgtggtgctgtagtaagaaaatataaagaatatgtagatataaagaatataaagatataaattagatataaaagtatatcttttatatctataaagtagatataaaaaatatataaagaatatgtggatagaatgatgtggaaagaattcctatcatctaggaacttgtaatatattaatttctaaacatttctatatatatttgaagtggatttcatttttccacctgatttgtttagattgggtttgtacatttttataacatttattgtaatttttttttttttggtggggggtggttacaaaaataacctgaaagcgcaaagaggaaaatagaaattacaacccagtcaggtagaattaacaacagttaacgtttttggtgtacatcttggagttttttctgtgaatattttggaaatactcatttttgtcagcctgtcatttttactttgcctgcctagtaggggggccagaggcagaagtcattaccaaaaggttagtgtaggtctctgaggatggagcttatgaactctgtgggattgaagcgtacttgtgaggagtagccttttccctgaatgagctcttgttgttgccattcttaggtaaatgaaagtgtctgaaaatctacatctagtgttgtcagatttttgcctagaatgtcttggcttctttcgttacctcttcttcttatagcataagcataatttttagactcatattttcatatgccatattttctgaaaacatgtatttaaacaaagagtactacattgaacatcatcttcatagtaaattgcttttcatttagctgtttttataccacaaaaagtacattaaaggaaactgaaacattacccaaagcaggttgtagatcctgcagctgtcaccactaaagggtctgttcacttacagttattgaatagtcttattcccgttcaaggaagtggagagtagcagagaaaggaacttagctgcttattgtgctctatttccttttccatgtacacagttcttgcccatttgtttcagacactaacattaaaatgtccccttctttacaaataaagcatgtttggacgttgattaaatgaggcttcctttttagaggtcatttcatttgttgtacaattcatgcctttgtcgctgagcctataattcctgaaattggcgctttttctttctgtgtgtgtgtgttttacttgaaattcagtcaaagctggaagaggccctcaacttggcaacagaattccagaattccctacaagaatttatcaactggctcactctagcagagcagagtttaaacatcgcttctccaccaagcctgattctaaatactgtcctttcccagatagaagagcacaaggtaagtatgatattatgatgctgcattctttttgaaagcactaattgaaagaaatgcccctttatcttatcttaagctaaaaaagagcactattgttccctcaggtttttgctaatgaagtaaatgctcatcgagaccagatcattgagctggatcaaactgggaatcaattaaagttccttagccaaaagcaggatgttgttctgatcaagaatttgttggtgagcgtgcagtctcgatgggagaaggttgtccagcgatctattgaaagagggcgatcactagatgatgccaggaagcgggcaaaacaagtaagttggggaagaaagatactaattcactgaagagtcttgggctgcatgtattgagtctctgggatgattctcaaacgtgctgtatagtgtgtatattcattcctgttaacttatttcttatgtaattttagttccatgaagcttggaaaaaactgattgactggctagaagatgcagagagtcacctggactcagaactagagatatccaatgacccagacaaaattaaacttcagctttctaagcataaggtaaagcagttaattgctcttaggtcccaagccatagtattcgctaaagcttgtatcttgccaaaaataaaaatcagagctagtaaaaagaaaaccaattggttaatgtttaaaagtcaaaatgatgaagccagggttccattttatatctagatggtctaatcatgatatttgctcatttaaataacagtttaaggaaagtagttatgggagtaactagttaaaactgtaggctttcacaaattgtcaggcacttctatatatggtataaacaaaaaattataaatttcttaaggataagctatggttaattttagttcaaaaaaagtggtgatattcatactttatttggtttctagcctgaaaactcaaattcttttgttccaaatcaagatgtcgtctgacttttaacacttttttcttttctttctggaaacataggagtttcagaagactcttggtggcaagcagcctgtgtatgataccacaattagaactggcagagcactgaaagaaaagactttgcttcccgaagatagtcagaaacttgacaatttcctaggagaagtcagagacaaatgggatactgtttgtggcaagtctgtggagcggtgagcatgaatgtccccttcaggggtctaaccgggatcccaaaagcaagaggttcttaccagattctataaaatggtgataaagctaatgcatcagtaagaggttttgtaccatcttaacaccaccagttagttcaaagactgttataatttaaataaaatgtgtaaaaattctcattttaaacttgaaccttattgtattagagagaggcctataaaatcaaaccaacaataatagatcagtaactcaaaagtatttgtaaatcatcaatttgtaataccaacaactgtcttattgactgctcttggacactccaaagcctctacatgcattacctcatttaaccataatgatacctgacctttgctgg

SEQ ID NO: 1501 - DNA, 6000 bp, Homo sapiens
tcatcagtgttgttccctgacgtctcattcttgatgctctcctcactctgctaagatttatctggtctaacagctttagctattacctataaagcttctgcatctttttcatcttcagcactatcatctcctaaagtccagacatacagtaaactagaagcagttctaaaatttccactttatctttgcccccttgcctgacgtcatttgtccattccagatctgccccccctttcctcattcagaggcctgtgatgtctggagttcctccttttcctcacatctagccactcaccagggcttgtcagtcccactttcaaaatacctcttggttccatctttcctgccctggctctggccctcaccatgttttgcctcagttgctgcaatggtttcttaacctgtcttctcactgctagccactccccatcccacacttacccccacccccacatcactccatgttttacactgaagccagagtgatagctgtaaagcatgggtctgatcatgtctcttacctggatcgaaatccttcagctgccccctgttgctctcagaataaatggccaacccttagcctgacacagaagcctttcgtgatctgtctcctgcctgcctctccaaccctgcctcttgccattcctctgattgcatcctctgcccagccagtgagtggaggggtcctggtcacagcactgtcaggcatccctgtctctgtttgggttgcaccctcttccaggactgccttcccaccatttgttgactgtttcttcattgctcagtgtgtcagtccgtttgcattgctataaaggaattcctgagactgggtaatttataaagaaaataggtttattttggcttacggttctgcaggctgtacgggaagcatggtgccaatatctgcttctggtgagggcttcaggaagcttagaatcatggtggaaggcaaaggggagccagcgtgttacatggcaagagagggagagagagaaagaggaggagatagcaggctccttttaaacagccagttctcatgtgaactaacagcaagaactcactcattaccatggggagggcaccaaggccattcatgaggaatttgcccccataactcaatcacatcccgttagaccccacctccagcattggaaatcacatttcaacatgagatttggaggggacaaatatccaaactacatccctcagtaactcaactcaggcaccagcctccacacagcctttcctgccaccacaggccgtaaagtacccatcctagctcttcctttgcccccataagagtaaaaatacaatatttaactctttttcctattttttgtgtttaacagacatttatggaggagatgactcgcaaacagcctgacgtggaccgggtcaccaagacatacaaaaggaaaaacatagagcctactcacgcgcctttcatagagaaatcccgcagcggaggcagtatgtttccagccccctgtgttaggatgcttcattcctgctaattgaggatgagcactttccaaatgcctatcaaaaaaaattatattccattttcaaaaaccgtgttggttttgaaccaaaatctctcatttttgaaactcacttttcttacattgacagacagtagctgtactccatattctttggtatgattggtatgaaattacgaggtggttaagcttattttttaacagtggcctttccattgttttggttatcagccctagctgtttacatttggcttgtactaatttaatcaacacaacagcttctacagaatatgttgcttttttagttgagttaacgtgtcatcagctcactaaggtaggacagaattgcttggagatatgtaggcagcaggtaagtatgtgctgggaggatcagtacttttggaattagtacacctccgtatctaaatattgccaagtcccgtatttcttttctcagttattgactggatattattataaagatcttctaggtttatacatacagctatttctctttgtatactaaccagctgttctaatcttgtgattatttttccttttagggaaatccctaagtcagccaacccctcctcccatgccaatcctttcacagtctgaagcaaaaaacccacggatcaaccagctttctgcccgctggcagcaggtgtggctgttagcactggagcggcaaaggaaactgaatgatgccttggatcggctggaggaggtaatgccctgctgagtggccttccctgaaacaaagtgcttttttcaatcaaaacacagcccttctgaggctctcttaatgtgaaccttgtgtcttaatttactttttcacaatagaaacagacctataccaagccagtactcattctttgaggcccctgaatgagaaaagacacatgtgtaagaaaaccgtttgtgacagagtaggctaaagcttctaggtgtggaaagcaagaaaacagccagtccataatgagggccaggacctgatctgcctcagcatcttgctgtggttgggaatcaggaacagaactttggaaatttatctccagatatgtagcatagcacaaaaatgacccttgttgagcctttcatgtaaaaacagatgctacagaattatgaaataggagtaatttttaatgattttgttattagtcttcacttgatcatgagaagcaactctattttgaagtgtcattacccagtataaaaaatatagtactatgcttcctagtttctaaaacaagcctctaatatcttttgtatttttttatttgtgcatatcaaagcagctatgcctggaagtgagtgttctgtgttttgtttattttttccttaggtcagttgacttttaagcttattgggttcttggtgcttttttcccccattccttctaactttggagtttgaaagaccaaggggaaactgctgcactctttaagtcattttgagtgtatatcattaacgtagacttaagtagctgaaaattgtcttgcccactgcataggcctgctgttttccatcaaggccaaatatttaacatggaggtcagatgggcaatttgctctctggtgccattccaaagaaacatgcttggatacaacattgggttcccaatgcttccatccagaactcagattttctcattgaaatctcagaagatagtggtaaacacgagcctcctgatatgagccctatgtgtgattataatgcctttcaaaacaacataatcgaggagtgctaaggacctcccttctgggttagaatccatttccttgcatctaagagagtgatcctttgaaaagcccaaagggaaagcaaggctggcttcacccattctcattctgtgtgctccatattttccatggtgattcagttattgtttctcttgctattccattataccatagctcgtgtaaatagtcatggctttaagtgaaagagccagattgtgccttcacaaaagaagcaaacacatagatttcattgttgatggcccctggaagcatggctttactgaatgtctgaaagtttgggtatgctctgggcagcttttgagggcccaaaaaataaatcttattgacacttctgatttctgtgtagttgaaagaatttgccaactttgactttgatgtctggaggaaaaagtatatgcgttggatgaatcacaaaaagtctcgagtgatggatttcttccggcgcattgataaggaccaggatgggaagataacacgtcaggagtttatcgatggcattttagcatccagtgagtctagtcatcattccaaacatgggtcacacctggattccttgcactttgtagaagctgtgatattctagctaaacagtctttctgaagctggccaggagcttggctcacacctgtaattccagcactttgggaggcaggtggcaaaggcatggtggcacacttgcagtcctagctacttgggaggctgaggtgaatcacctgagcctggggaggtcaaggcctgcagtaagctgtaatcgtgccagtgaactctagcctgggcaacagagtgagactctgtctcaaaaaaaaaaaaaaaaaagacagtggttaaccagaggttttcagctgggaaacaatatgatttggtctgtgttttagtaaatcactgtgactactataaatagtcacacttccctttgtatagcaatttgtttagaatctaagacaataatctaaacataggaaaacttcatgctattccaaactgtcactattctgaaataatctaaatatccaataattgtggagtggatgagtatattcttgagttgagtggtaggactgtgggtggttgtaatattatgtttatgccttttggtatatttgaaatggggaatattaccttttttcgttgcatttggggtaggggagtctataagtggatatgtattatttttcaggaaaaatcaagacataaatttttttgctcttaagaagtatttctggccaggcgtggtggctcgcgcctgtaatcccagcactttgggaggccaagatgggtggatcacttgaggccaggagttcaagaccagcctggccaacatggcaaaacctcgtctctactaaaaatacaaaaaaaattagccgggcctggtgacaggcgcttgtattcccagctactctggaagctgaggcaggagaatcacttgaaccagggagacggaagttgcagtgagccgagattgcaccactgcactccagcctgggcgacagagcaagaccttgtctcaaaaaaaaaaaaaaaaaaaaaaaaaaatctataaccgccaaccgaacaagtacccctcttaatgtttcaaaatatgattccttttctccagagttccccaccaccaagttagagatgactgctgtggctgacattttcgaccgagatggggatggttacattgattattatgaatttgtggctgctcttcatcccaacaaggatgcgtatcgaccaacaaccgatgcagataaaatcgaagatgaggtaagggaaataattatattttgagtacacttctggctgtaggtttgtaatatcctgaatttggttgggttcagtgatcatattagcctttgacttgtctgttgggagataattatttggagttctattttgagatctctttttggatagcatttcaaagagtcccagaggatctctgacatctgagctctagctcaggctagatggattactcaagtgagtcatgtctgtgtggtgctctgaagtttacagagaacctttgcagggcagcatactcatcctggttcactcgtcctgtgtttgggatggactcatctcactcttgagcatgctgcctggaatctagggaaatggtctaccagtgtagcatttaagggttgaaatggactgggcatggtggcttacatctgtagctctagcactttgggaggccaacacgggaggatcactggagcccaggagttcgagaccagcctgggcaacatagtatgattctgtctgtcccccccgccaaaaaaaaaaaaaaaattagccaggtgtggtggcaagtgcttgtagccccagctactcaggagactgaggtggaaggatcacttgagcatgggagatcaaaggtgtggtaagctgtgatcatgccactacactccagcctgggcaacagagcaagacttgtcttaaaaaataaaaacaaatgtttaaaaggggagtaaaatgtaatgtttaaaatggtgtatacccatcatgctttctgccttgttaagaactaccacattgaaactgccaaatttattagtgccatctagaaaccctaacatctgttgataacagatcttggtaagggagaggtgctgggacaggtcttaggagtggccctggaacacaccaggactgacttccagggaatcttgggctcctagggtgaaatttaaagcagttcataatttgctttattaataatttgattttgatgcaagcatattagc

SEQ ID NO: 1502 - DNA, 6000 bp, Homo sapiens
aaatatatctggtttagaatatgatctggggacctactgccactaaactactagactcaccctgcttatcttgcttttcttctttccttaatggctccagtttcataaaaatctcagttctattttaaattttagatgtttaatgatgtacaaattctcatacagttctgataaatcagggcttttgttctgtcttaaggttttattttctgtttcatttcattttgaggcttcatctttccttacttattggtgttctgtagccaggccatctcctgacttggaattctagcccgggttctagctgtggtcttccagcagcagtgcgcaggaaccttagcttctgaaactggtgttcttcctcctatgtggccaggaaattttgtgcttgagtgttaatcactttctatcgcttatgctttttctttataaatttaagaagtacagcaaacaatgagatggattgcttttctcttctgtttgcataaacgtcttaaaggtcctggaaaacaatttacataattgatttcaaagaaaaattagaatggcatgctgtagcatgtggcataagtaatgttttgggggtttttttgtttgtttgtttgtttgttttttcattttttaaaaagcaaagtagagacaaggtcaaataatggatgtttaaaacatttaaggatcagcctggtcaacatggcaaaaccccatctctactaaaaatacagaattagctgggtgtggtggcaggcgcctgttgtcccagctacatgggaggctgaggcaggagatcacttgaacctgggaggcagaggttgcagtgagccaagattgtgccactgcactccagcctgggcaacagagtgagactgcctcaaaaaaaaaaaaaaaaaaaaaaaaccccacacagatttaaggctggacatggtggctcacccctgtaatcccaacactttgtgaggccgaggtgggcagatcacttgagcccaggagttcaagaccagcctgggcaacatggagaaaccctgtctctacaaaaaatacaaaaataagccagccactagggaggctgaggtgggaggattgcttgagcctgggaggtcgaggctgcaatgagccatgaagtatgccactgtgctccagtctgggtgatggagcaagactctgtctcaaaaaaaaaaaaaaaaaaaaaaaaaacacccacacatttaaaatactctttttcctccagttaagcctactatctaaaaaaccaaaaaaaatcactcaaataggaaacatagcacctattggtagcagtgataataatatgtagctcttttccagtttgggaaatgcttctattcatcatttattcatgcaagtttttattgagttcctcttctgtgctgtgcagaacacaggaagcaggggagagaatagaagtgtacaagcagtgttctgagtagtgagacaagacctctctactaaggtcatcctttcaatagagcccctgcagggaatgagggggtgagccacacgtgtatctggggtaggcttggggtgtggtgattgtgcaacaacagtccaggcaaaatgaacagcaaggggacaagactggtggaccctcactgggccattggtggaacagcaaggaagctagtgtggctgggatggactgatgaggagtgtggtagaaatgaagtcaaagaggcaggatttaatccctgatttcccaagagagaagcaaagacacaggtgttaatttcaatcagtcctggaacccagactcaaacccaggtctcctggttcttcatgcacagacttgttcctgatgtctcagtcccacagtcgtgtgcttctcatagtttatttgatccacaagttaagtaattttatctgcattttaccagtaaggataatgactaaaagatcttactaaagttactgcacctacttagtgttaagagattggggccaggtgcggtggctcacacctgtaatcctagcactttgggaggctgaggtgggcagatcacaaggtcaggagatcgagaccatcctggctaacacggtgaaaccccgtctccactaaaaaatacaaaaaaattagctggacgtggtggcgggtgcctgtagtcccagctacttcggaggctgaggcaggagaatggtgtgaacccaggaggcagagcttgcggtgatccgagattgcaccactgcactccagcctgggtgacagagcgagactccgtctcaaaaaaataaaataaaaaaagattggagtaatacttgaatctccatatcaaataggtgggctaaaactcatttcaaatttttaaccccaaaatcttgatacctagtattatttgaatttctttttcctttactcattcaccataattgtttgttgtaactattgtattcttactgaggattttttttttttcatttctaggggaaattagtaaaacaaaaggtatttgaagacattttgaaatttttatttggaacataaaactttgattttgggaattatcaaaatatatgacctaggatactttaagagaaatctttgttttcctggacttttaatttgcttttcaactaagcaaatataaggaggtgtaaggagaccttttaaagttgaatttctggcaaagattttaccaagtaaaatgtgacctttttattattttttttaaggttatcccatcatcaggtagcaagttgaaacgaccaacaccaacttttcattctagtcggacatcccttgctggtgataccagcaatagttcttccccggcctccacaggtgccaaaactaatcgggcaggtaagtacctgccccgtgacctacaagccaggctgagaatttggaaacaacagcctatgtggaatgtttcactgctcccaaggagcgggtaatgagagtggcacttagtgtgatgcccagaaagacagacctgcagatgctcaagtgacctttactttttctgtcattacagctagctttaagctttccttctgagatgagatgcttccacagccaaagctgggccatgcgttctcatcagaaatgatcacatttgagagaatgtaaaaggaaatgtgggtcttcctcagacaccagtccagtgttgggatgagcagcttgctagtaatttttccaacacgtcatacttactatggctgctgttgaaccaagaaaggcaggggaagatcacatctgttctcctgctactgttcctcatgggaacctaggaatcttccttcatttcctggctggctgcttcccctcattttgcctctatccatcctgcccatggattagcccggctggcaggctcacccacctgtgctgaggtggttgagcaaccttgcttgcctccactttggggccatggaaggtgacagtgctgctgatagagtggctttctaatccccaggaggcagcttctcaagtagaatcacaaagccagaaaaggcttcagcaacttctgtatggatgaggaaactggggtgcagaaaggctgtgagatttgcttaagatcacacaggatcagaaccctagcttctgctcacttgttcttccaccccatgccatctctattaagtctgctgttttattcttgaattccagaccctaaaaagtctgccagtcgccctgggagtcgggctgggagtcgagccgggagtcgagccagcagccggcgaggaagtgacgcttctgactttgacctcttagagacgcagtctgcttgttccgacacttcagaaagcagcgctgcagggggccaaggcaactccaggagagggctaaacaaaccttccaaaatcccaaccatgtctaagaagaccaccactgcctcccccaggactccaggtcccaagcgataacactgtctaagcacccccaagccactatccactttgaatcctgctccatacattgggtgtatatttattctgaacgggagaagttatattgttaaaagtgtaaaagaataattgtgttatgaagctgccttattttttttctttttgtaagttactattttcatgtgaatatttatgtagataaaatttgcctcctggtaaccctgtaatggatggggcccagaaatgaaatatttgagaaaaacaagtgaaaaggtcaagatacaaatgtgtattaaaaaaaaaaaagcctattaatagggtttctgcgcggtgcagggttgtaaacctgctttatcttttaggattattcctaaatgcatcttctttataaacttgacttgctatctcagcaagataaattatattaaaaaaataagaatcctgcagtgtttaaggaactctttttttgtaaatcacggacacctcaattagcaagaactgaggggagggctttttccattgtttaatgttttgtgatttttagctaaagagagggaacctcatctaagtaacatttgcacatgatacagcaaaaggagttcattgcaatactgtctttggatattgtttcagtactgggtgtttaaaggacaaatagctgctagaattcaggggtaaatgtaagtgttcagaaaacgtcagaacatttggggttttaaactgatttgttgctccctatccagcctagacaccagtaactcttgtgttcaccaggacccagacccttggcaagggataggctcgttggtgacattgtgaatttcagatttgttttatccactttttttgctatttatttaaatggtcgatcaacttcccacaaactgaggaatgaattccacgagcctgttctgaaaatgtggacgtaagacaaacacgtgctcgtcctttaatggagttcaccagcacacttgttaaccagtcctgtttgctttcgtctttttttgtgcgtaataaagtcaactgaccaagtgaccatgaaaaggggctgtctggggctcctgttttttagctgctgttcttcagctccgaccatgttgctgtgtgattatctcaattggttttaattgaggcagaaactgaagctctaccaatgaactgtttagaaacaagacacacttttgtattaaaattgcttgcagtaacaaatattttgtatttcctgattttcttttcaactattaccttatctataaatgttaccctggggtataatcatgttgtaggtacttaaatgcattccgcaaatcaaaatatcttgatggataaattatagagcttaatagatcttgttttatttcatccttgttaattttgtttaatatggctgggcatggtggctcacgcccataatcccagcactatgggaggccaaggcaggaggatcacttgagttcaggagttggagaccagcctgggaaacatagtaagaccttgtatctactaaaactaaagaaacaattaggcatggtggcacatgcctatagccgcaactactagggaacttaaggtgggaggatcacttgagcctgggaagtcaaggctacagtgagccacgattgcaccactgcaccccagcctgggtgacacagcgagaccctgtctcaaaaaaaaagacaagctattaacatgaacatgtaggatatctgtcctacttacatgattaaacaaatagtattatgtaaaaagatactagaaatcatggagatcctgggttctcagaatgggaccagtttgtcacactatgtcacagtatgctgaaatttctggttaaatggtagaatttcagaggtggaagcaaaatcggtcatcatatctagctcctttgttttacagatggagaaactgggatgggaaagtacaagagaaagtgatttccctgagctcacaaaatgaataaatgacagaagtgaaccttgaatccagtcctcgactccctgttcaagtctggcacttctatttcctccagcctctagtcagttggctttataatagagcagccaaatgttaacttagtaataagaagaaaagggctagaggcttcggaggtaaaggggctaagactcatgccacctgtgttcttgg

SEQ ID NO: 1503 - DNA, 6000 bp, Homo sapiens
actccatcttactctcttttccagattgcttttaatcatagttttgatcatgtcactatcttctgtaaaaccttctaccattgggaatgtaaaatggtatgatgctatggaaaacagtatggtggctcctcaaaaaaaaaaaaaaattaaacataagaattgccatataatccagcaatttcacttctgggtatatacccccaataattgaaagcagggactccaacagatatttgtatactaatgtccacagaagcatcattcacagtggccaaaaggtgaaagtagaatggtggttaccagaggctggggaaaagagaatagggcgtaagcgtttaacgtatacagaatttcagtatgggataatgacaaattctgctgatggatgcacaacgtgaacaggcttaatgtcactgaaatgtatacttaaagatggttaaatttaggccaggggcggtggctcacgtctgtaatcccagcactttgggaggccaaggcaggtggatcacctgaggtcaggagttccagaccagcctgatcaacataatgaaaccccgtctctactaaaaacacaaaaattagccgggcctggtggcacgcgcctgtaatcccagctactcggtaggctgagaaaggagaatcgcttgaacccgagaggcggaggtcgcagtgaaccgagattgcaccattgcactgcagccccggcaacaagagcaaaactccatctcctaaaaaaaaaaaaaaaaaaaaatggttaaacctgtttaaaagcaaaacaaaaaacttctaccactcacttcccgtatcagaaaataaagcccaagagccttaatttaaccataataatgtatctttccatgattcttcttccattccctcttactctgtgtttcctcaactgatccctcgcttcttctatttgctttagtggctgcctacatgtcttccctaattttactcatttttcaagacccagttcaaatgtcacatccttgcaaatctttcctgaactcctcccactatttcatactaagtggaagtaagctttccctttttgaactccagcagcacatgaactatatcttttagtgccgcttttctattttttgagacagagtctcgctctgtcacctaggctagagtgcaatggtgcgatctcggctcattgcaacctctgcctcccaggttcaagtgattctcctgcctcagcctcctgagtagctgggattacaggcgtgtgccaccatgcccggctaatttttgtattttcagtagagacggggttttaccatgttgatcaggctggtctcgaactcctgacctcgtgatctgcccgcctcagcctcccaaagtgctggaattacaggtgtgagccaccacgcctggccagcgctgcttttcttttaggccaaaggtacacaatgagatagagaggtgtggcttaaggaagtccagctggctgtctagacaggttctgttatacagtgctataaccttaaggaatttaccatgatacaagaactgatgtttaaccttgcaaactcagaaacctaattttaatagtaagcagaaagttgaaccatttcctgggggtagggggtgtcttgtatttgccaagctcacagaaacttttatataaagaggaatctaactgattagttacaatgaaaaatacaatgatcaaaagaactagaatactctaggtggcagatcacttaattctgtccctatcgccaagacacttgctgggtgaacatagaggaaagcatgttgatcttaagaagtatttcttagctgaggcagtctgagatattcccatccactacagagatgacacgggcaaggaaatcctaatgctcagtgtggcttaattgagatgaggcttagaggggcaatggtagtgctagcctttgtgactgccttgttttgggctgccatggctgagcaagcccttttgttcacagaatctctctccaaacagggtacagaatggctgacgagattgattaggttccatttattaaattacaatatctaccttcttcaggttcctcccatatgccctttatcagagtttgttttgttttgtttggtcatgtttgtaaaaaaggtcttggcttacccccatggatagctaatttcatggttgtattagtctgcttagctagcatgttatgctgcagtaacaacgaaaacaatctcagtggcttacaacaaaggtttatttattgttcacacaacattacaggttatgtgtgtcagctgtcgctctgcacatcttcattctgggaccaaagctgaagagggagctctatttaggacatgctgctcttgtgtcagaggaaagataatatggcaaaattgtaagatagctcataaatttctgctcagaagtggttcatgccatttctttctttctttttttgagacagagtctcactctgtcgcccaggctggagtgcagtggcgtgatatttgctcactgcaacctccaactccctggttaaagcaattctcctgcctcagcctcccgagtagctgggattgcaggtgcctgccaccacacctggctaatttttttatttttagtagagacagggcttcaccatcttggccaggctggtcttgaactcctgacctcgtcatccacccacctcggcctcccaaagtgctgggattacaggtgtgagccaccgtgcccggccggttcatgccatttctactcatatttcattggtcaaaacaaggccaagcttgacgacattagggtgagaagtctttcaccctaatctcctagggacaggccagatagcaacggctttagaaagggaagggcggaggctattgataataaagactatagcaaggactaatattaggcttatatgtatcaattgactgttatcagttataacattgactattaaaatactgaaatactctagtactacctggtaaatagctgctgtcccaaacctcctgaccactcccttcccctgggatcccttgggacctcctattcacaaaccagcaactgaagggttaacacctagcacagacgtatacctccaggatcctagctgcatttctaattctgcttcatctatgcttgagcactacttgttgttaaatatacttaatatcactcttagctaatttcctctatgtagatttttatttatttctgagggcaacccaacttccaggctcttggaaggaaatagactgcagcccctaagtgtgatcaatacttaattataacaataatcactaataataacttgtgctgcttcattgtaactaaatgtacacttttacattttttggcaagcatagtatatgcaataagtactcaataaacatctgtagagagacttatttagcttttttccattagctacatctgtctctacaatctcaacatactattctcttgaatctgtttttaattttatgccatttctcatgtctgaaaatgtcattataagtaactttttttttttctgagacagggcctcgcactgtcgcccatgctagagtgcagcgagacactcgtagctcttaccagtaacttctttataacacttttgcaatttacgaagcactctcacattatttcattcactctccccaacattaccaaaagttaggaattagatctttttacagatgaaggaattgagactccctgaagtcaagtgtcttatagttaggttttgttcattcattcatcaaatagagtgcctgatgtgagatttattgaaactggatttgaaaacaattttcctgaattcaagtcgagggtttactccactattctcaattactttatcaccagggttataaacccaaaggaagtgagtaacaacagtgtgattttattgaggacccatgcaacactagtctcagaaaggctccagtgtcatttgtaaaattcaaggttaccatcagcagaggcagtcattcctctctgcgcttgttacctaatgcactaactctcactgtaggtaattccattcaagacacatttgatgactatacctacaggttttgaagttattcggatggggttttgacacttactagctgtggggacttagatcaagttacttaacctttttgagcttcagttttatcatttgtaaaatggatacaatcctgatgcctttggaccaagtggtcacggaaatgaaagagataagtatgaaaaaatccatgctcatagtagctgtggtttccaactgcgtgataaaactttaaaatctgcattcaaataagaacaactatgtcgacgtaaggttacaagctaactattcttggtaagtactgttctttattctagaggacatcactttacagtttggtgctaaatgctcttttatgaatttaaggtgccagtagctgtctacttgaacggcatgcttaatctggaacgccatgtcgaccttcatcccccagttctttctccccaaattaaaaacacaaatacacacacacgcccctacttagttcctaaaactcaagggcacgcgcacacacctacttatttcctaaaattcaagctcgcaccaaggagatccacaaggataggcagggtggtggaggtcactgggcagcgcctccggatcccccgaaagggggcggggtcaaaactcagatctcgagctcccgaaagggggcggggttaaaactctcagatctcattccgcctccctctgtcgtcgccccttcccaattctcgcgagacctcaaggagcacagcttctgcgcaccgcacgatactgggagtccaggcgccaagggagggggaagggaaaaggggaaacggtgcaaacggcgtggccgccatcttgcttgtgcccccgcttcgcgcgcgctccgttctccgtgacgcacacttccccctcccctccgccgcgcctgggcctctgcattgcccgactccgtaggagcgcgggggcggctcctgctcttcctggactcctgagcagaggtgtgtgagtgtgcgggagtttctgtgcgagggtgatagggaagcggcggcggggggaggggcagcgcttcccgccttcgccagagacctcacttcctcgcgcggccgctgctgtagctcggtccgtcctgcccgccgccatgttgtgctcttgcctggcccgctgctgtcgccgccgccgcgctcgtggggtccgtgtgcctcgtcggcccggcccgcgggctttctcccattggcggaaggcgacggcgggggggctcgctcgtgattggtcggtggcggggaggccgcggacctggcaccttattggacgcgccagctccggtctagggggtgatgaaggaatctgaggctgcggggatgcgcgcgtcttgggctagggcggctggggcaatgaccccctgcggcgcaggcgtggggttgcggcgagagggcgagcctagaggctttaagggggaagagagggtgatggcctggcaggtactttgggggtagcttaggccatggcctgggaatgggggacactcactttcagaggtgcttttcctggtacatgcatggcccaagattggggtgtgcaggccctcagggttccaggcttggaaacaccgaaacccaagtgacaggctgagagtcttcgagatccagggttgctaatgtgacccagtttggaagtggccctgaagtccacggtgtgagtgtatggtgtaggaagaaaggcatcagggctaggggcatagctgaacggtagaatcggatcagggattttgctggagagtgcaagcattcaaacactgaggttttggtggagccctggagtccagagtcaacggacctgggatgtgatgtgaggagcaagtaaaccgagagaggaatgctattgagaagtgtgctctgtccgagcctaggaagcacagcattaagtagtatcagatttaaagtgacaaaatctgatataggaagcattttaggggacattttcggacttgggaagtgtattaatagaa

SEQ ID NO: 1504 - DNA, 6000 bp, Homo sapiens
tggtctgactccaatcagcaactaatactgtcctctcccataggcactttttggccaaagttttaaaaatccatttcctcctgcaattaatctacttacattatattgagtgctttgagtctctgcaggaaaacactaaaatgaccttgtagccttcctaaactgtgacagtgcatgcatgaaaaactgaataaacaaaatgaaaagaaagactgtaagacatcagataactcacaaccagtttcctctgagaacaagaaacagaatggaaaagaacaacttactggcaaaggaatattcttcctggttgtatgcctgaggccaggattgaccttaagaaggtcatttgtgaccctagtaatgtcctctgccattctcattccggtgaatgaagtaaacctgtcacttaaagtcatctctgccatcaagtcaatgcgtccacaggagaggcaatgctatccagtggaatgagcacctatctggaaatccagtgatctgggcaagatttggctctgcccttgcatagccaagtgaccctgtcaaggtcatctcactcttttggagcctcagtacaaaggacacgcctgaaagaactgaagttcgcttcctgagctaagaagccaggactttttttcttttcccataacattctatggtgtcaacacagtgtttaagagtaagggcttcatttacataagaattaagaattacaaatctgtggctgagcactgtggctaacacctgtaatcccaccacttcaggaggccgaagagggcggatcacgaggtcaggagtttgagaccagcctggccaacacagtgaaaccccgtctctactaaaaatacaaaaaattagccaggcatggtggcgggcgtctataatcccagctactcaggaggctgaggcaagagaatcgcttgaacctgggaggcagaggttgcagtgagccaagatcgcgccattgcactccagtctggggaaacagtgcgagactctatctcaaaaaaaaaaaaaaaacagaattacaaatccgtgtctgaatctgggctctgctacttactggctgtgagaacttaagcaaattacttttcagtttcctcacacgtaaaaatgagggtggctatattatctacctcatagtgtatgagaataaatatacataatacatttatatcccagctggtacaatgtaagcaagcactcaataaaagtagtaactatattatccctgtgtttgattcacagatcctagtggctcagtacttttgaactaaaagatataaatttcaaaattacctcaaaaagacacccagcatagcctggctgggcacggtggctcacgcctataatcccagcactttgggaggccgaggtgggtggatcacctgaggtcaggagttgaagaccagcctggctaacatggtggaagcccgtgtctactaaaaatacaaaaattagctgggtgttgtggtgcacacctgtaatcccagctactcgggaggctgaggcaggagaatcgcttgaacccgggagacagaggttgcagtaagccaagatcacaccactgcaactccagcctgagtgacagagtaaaactctcaaaaaacaaaacaaaacaaaacccaaaacaagactcccagcatagctccatagcacagaatgggtttagcccatatatgtttacaattctgtggtatgaatcctcatttcgctttgccttcatttctctgaaaataaaaggggataaaaatgccttgtaaaatcttctctagtacagttttgggatttttatttattttttgggagactgagtctcgctgtgttgcccagactggagggcagtgacacaatctcagctcactgcaacctctacctcccgggttccagcaattctcctgcctcagtcttccgagtagctgggattacaggcgcccaccaccatgccaggctaatttttgtaattttgtttcatcatgtgtgcgaggctggtctcaaactcctgacttcaaataccacctgcctcagcctcccaaaacgctgggattagaggcgtgagccactgcgcccagtctctagtagttctgaccaaagaaaaaaatgtgtaagtataaatgagataacagatttgtcataagaattaaataagatgccatgaacacagcctataaagtataaatcttagtatgatttctgcctgaagaaaaagctgaggttcacaagttttcaacataaactcagatctactgagatttcctgagagttcaagatttctagagtggtcaattccagatcttaacaaggtggccatgggtataaggggctaacatggaatgaaggtggtcaccaatgttgaagggcaggttgctccagaaatgcctgctgaaaaaaaaaaggtgtacatatacactcatttttatcaccttgtctagtcttactaaaaacgaaactaagttatagatctacagcattcttcatatttggttaacttgatgactgagccaaatgaggctgaaatgaccaatgtacaaaatacatggcaaaccctattttcacttgtagctttgcctctatcttccacagtgaaacgttattgtaaacaaaaatgagggagggcttcacctaagcacatcaagacataaagcaattaagatttccaactcactggtctcctctcaaaccctgatttaaaggtttccatgcaaaattggaactgcaaatattttgtcctatccagtcttaattttacacattgttcaggataagcatatcctagaatcaatatcccacagtctgaagaaagcactaggcctttgaataggtcctggtatttggggacaccctaaggaactggtgatgcttgaaaaacctctccagtgagctctttacactaggcacttggtagttcctcgccatttggcataaattacctccacatacagaaagactatctgcaatattctgaagcttggttttaaggaatgcagattcttcaagtttctgtacatatttttccccattatctacctggattcaggaaaaaatgcagcaatttacttggtaaatcttccctttcacaatagaagccaagggatatgatttgaatacctagctgaagaacccatattctctatggttacaattctgtggtctgaatccttaagcagcacaagaaattcttaagaattatagtcttccattttatacactctaaacacccagaaatcaaagtagatgatccacttggaaatacaaaattatctggaagtttcattagtcaggtttatgttgatagctgatgtagcagataaaattacaggctttggcatcaggcaaccagggtttgaattctagctcaaccacttactgagtgacaccagacaagctacttaaactctctgatcctcagtttcctcatctgcaatatggggacgataatgcctacctattggagttaaaatatgccccaaaatagcaattctcttcctctgctacttatcaattcccttctccagaaaatgtagttgcattcacataaaactaaatttgaaaaccctaggagtttcttgaaattggtatgaaaacagaagagtaccatctaaagctaaaaaggactacctaacaaaaacaaggaaaaacaaattaggaaaacacagatgtttaacataaatgtgtttccatggccctcacacactgggacgagcaaatgtaaagcaatacaagtaactacgattcagattcagtggaaaagaacatattcccaacaagttgactggaacgactctggattggaataaaaactttttgaatatgaaccagaaagtgttgacaagtcctgttccttaagaagctatgcatgggcttttttttggtttggagctgcttatttgaaaaaacaaacaaaaaattcaaagtacacatgggaatgggtatactttttaggcacatatacaaggaaataaaccaagaccgaaaatttctggctagctccctttcccttaaaggggaacctaacaatatttactcaacaaataactaccaactacctaatatttgctaatgtggctttggaaactcagccatgacctgtatccttcctagagcagcaaatttcatatacaacatctcaaaactacttgtatggtcctgagactcaataatgtataactgttctattaatacacttcccaagtccgaaaatgtcccctaaaatgcttcctatatcagattttgtcactttaaatctgatactacttaatgctgtgcttcctaggctcggacagagcacacttctcaatagcattcctctctcggtttacttgctcctcacatcacatcccaggtccgttgactctggactccagggctccaccaaaacctcagtgtttgaatgcttgcactctccagcaaaatccctgatccgattctaccgttcagctatgcccctagccctgatgcctttcttcctacaccatacactcacaccgtggacttcagggccacttccaaactgggtcacattagcaaccctggatctcgaagactctcagcctgtcacttgggtttcggtgtttccaagcctggaaccctgagggcctgcacaccccaatcttgggccatgcatgtaccaggaaaagcacctctgaaagtgagtgtcccccattcccaggccatggcctaagctacccccaaagtacctgccaggccatcaccctctcttcccccttaaagcctctaggctcgccctctcgccgcaaccccacgcctgcgccgcagggggtcattgccccagccgccctagcccaagacgcgcgcatccccgcagcctcagattccttcatcaccccctagaccggagctggcgcgtccaataaggtgccaggtccgcggcctccccgccaccgaccaatcacgagcgagcccccccgccgtcgccttccgccaatgggagaaagcccgcgggccgggccgacgaggcacacggaccccacgagcgcggcggcggcgacagcagcgggccaggcaagagcacaacatggcggcgggcaggacggaccgagctacagcagcggccgcgcgaggaagtgaggtctctggcgaaggcgggaagcgctgcccctccccccgccgccgcttccctatcaccctcgcacagaaactcccgcacactcacacacctctgctcaggagtccaggaagagcaggagccgcccccgcgctcctacggagtcgggcaatgcagaggcccaggcgcggcggaggggagggggaagtgtgcgtcacggagaacggagcgcgcgcgaagcgggggcacaagcaagatggcggccacgccgtttgcaccgtttccccttttcccttccccctcccttggcgcctggactcccagtatcgtgcggtgcgcagaagctgtgctccttgaggtctcgcgagaattgggaaggggcgacgacagagggaggcggaatgagatctgagagttttaaccccgccccctttcgggagctcgagatctgagttttgaccccgccccctttcgggggatccggaggcgctgcccagtgacctccaccaccctgcctatccttgtggatctccttggtgcgagcttgaattttaggaaataagtaggtgtgtgcgcgtgcccttgagttttaggaactaagtaggggcgtgtgtgtgtatttgtgtttttaatttggggagaaagaactgggggatgaaggtcgacatggcgttccagattaagcatgccgttcaagtagacagctactggcaccttaaattcataaaagagcatttagcaccaaactgtaaagtgatgtcctctagaataaagaacagtacttaccaagaatagttagcttgtaaccttacgtcgacatagttgttcttatttgaatgcagattttaaagttttatcacgcagttggaaaccacagctactatgagcatggattttttcatacttatctctttcatttccgtgaccacttggtccaa

SEQ ID NO: 1505 - DNA, 6000 bp, Homo sapiens
agcctgatttgagtgttttttagggtaagaagatgcagttgtctggtgtagagggctgctgagatccaggaccagggaagaatgttagctgaaatcctagagattctgttaggttctcagtccacagtaatgacaggtagaagagaaagctatagtaagagtgaatggattcagctgccaaatggaattcaagaataatttgggttctcttcccactgtggcttgaattctaaggtaagtgttgatgagaagtaggacttgaggtcttttccttgcaaactgccaagaagtaataaaaactacgctgaagaccttcatagagtgttaaaggtcatgattgggttaatctggtacatccaaagcagagtcggagggccagcttttggaacagtgatcagacatttggtgggattagtggtgaaaaacctgggtttccagcataaaaagtggagaattttatggctcctggtagtcttcccatactgtcctttatggctaaggagttgctttctgcaggcctgcagaatatgctagagatagaagagaggtgtttcttcaaagtggcttcagggccttaagcaggtcttctccctttctgaaccttaaccgtctataaatcaaggaagttgaattggatgacatttaatactttccattttttcaatgcttattcaggcatagtacaatatgctttacatatattaccttgtttaatccttaaaatggctctctggtatacatggtgatatctatacattacagataaggaaactgaggctcagggttagtacagtgtcatataattaataagtagagtcagaacttgaaactaacactgccttccaagtgcttagttgttttgccatactggcactaattagtaatcagcgaggttgtgaacatgttctccctattcttctgctccccacccccacccttcacatgagctgcttttccttgtcagctgactggccctcaggtgttctggggctaagagaagctccagtacagataaggcctgttggccttctgccttctcttcccaggatgggagtagctattcagaatctgtaatctaaacttttgagaaaagaattacagtacctataacacatcgtgttaacataaccaaactctttatttggatgccattgtgaaattgtctcacaaccccttcaaattttaacagtgtactcttgttaatgatttacctagttgtttcatgctcttataaatgtggtttgttactggttaaatggtcctaataatttagtagtaaaatttgtaacaatttatagggtgatatttggtcataccattggctaggtctctaactggcatatcaaatttaacattagtcagatttttaaattttaatatttatttatttatttacttgaggtagagtctcactctgtcgcccaggctggagggcagtgggatgatcacggctcattgcagccttgacctcctgggtcaagtgatcctctggtctcagcttccaaagtaagtgggaccacaggcgtgtgccaccacacctagctaatttttgtattttttatagagatggggtctcactatgttacccaggctggtctcaaatgcctgagctcaagtgatcctccttccttggcctcccaaaatgctgggattacaggtgtgagccaacacgcctggcccagatttttaatttttaaatttgttgaagttggataatggtttatgctatctacacatatatatggcacctaagaatttccatggatgtgccctgaggtgctccatgtcttggtaagcagtgtggtgcagcggaaagagtaccactctcggtgggacccaagtttgaatccagatgtatggctagggaccagtttttgtaacttctttgaacctcactctttctcactggtagaagggtattgtagtgagaattagaggggtaaagtctgtaatatacctagcacagaacctggcactagtaggtgttcagaaatcatttcatttcatcatgggaaatgagtggaatgtagagaagttaatatggcagagtgatagggcagaccaccttgctcctatttcgggtccctgctgaatctctgcacatgtcaaggatgagttctcatgtatggtcaaatgaggagtttctagaaaagagctcgtctacctagcaaaacaattgtatttttcagtcctaggatatttagctttggtgggaggaagcagatctaaggagattgttaaaggcctcaggtaatgaatggtgagatgcttgtatttgaatgtgttgctaaaaaaaaataatgaaaagaaaagaaaaacatgctaattgattttcaccacattaggagctgcctcttaaaaaaccgaagcagttggtccaaaatccataagaaaatctttgactaccactggtagacttcagcaccttggaatgttttcaataaccacagtgagactagtaagaatacttataatatctcttctgagatcagctctgctgtgcttattcttaaaaatatggggccgggcgtggtggctcatgcctgtaatcccagcactttgggagaccgaggtgggtaggttttctgaggtcaggagtttgaaaccaccctggcccacatggtgaaaccctgtctctactaaaactacaaaaattagtcggatgtggtggtgggcacctgtaatcctagctactcgggaggccgaggcatgagaatcgcttgaacccaggaggcagaggttgctgcgagctgagatcgcaccgttgtactctagcctaggtgacagagggagactctgcctcaaaaaaaaaaaagaaaatttttttatatatatatggtagaaggctggggtgcagtggctcactcctgtaatcccagcacttcaggaggccgaggtaggtggatcacttgaggtcaggagttcaagaccagcctggccaccatagtcaaaccctatctctactaaaaatacaaaaattagctgggcatggtggtgggtgcctgtagtcccagctactaagtagatcacttgaacccaggaggtggaggttgcagtgagtcaagatcacgccgctgcactccagcctaggcaacagagtgagactccatctccaaaaaaaaaaaaaagagagagagagagaaaaatttatcctcgtccaggcacagtggctcacgcctgtaatcccagcacttcgggaggcaggggcaggagaatcccttcagcccagaagttcgagaccagcctgggcaacatggtgagaacccatctctaccaatttaaaaaaagaaaaaaaaaaaacaagaaaagaaagaaatagaaaaattagcgggggtggtagcacacacctgtagtcctagctactcaggaggctaaggtgggaagatcgcttgagcccaggaggcggaggctgcagtaagccgagatcgtgcctctacaccccagcaacaccccagcttcggtgacagagccagaccctatctcaaaaaaaaaaaaaaaaagaatgaaagaaataacgaatttatcctctggaatgtcaaactctgtgactgccctaaataaatcagttagtccatcaaattataatgtgcttttagtaatacatcgtcagccctctgcatctaaggatttaaccaaccatgggtcaaaaatatttttaaaaattgtgtctgtacggaacatatgcagactttttttcttgtcattattccctaaacaatacagtataacaactacatatatagcatttacattttattaggtattatacataacctagcgattatttaaagtatggaggaagctgggcaaagtgacatgcacctgtagtttcacccaagttggaagctgcagtgggaagattgcttgagcccaggagtttgaggctgttgtgccctgattgtgcctgcatagctactgcattgcagcctagcaacatagtgagacaccatctcttaaaaacaagtatacatgggaatgtgcaagtgttttatgcaaatactataccattttatattagggacatgagcacccaaggattttggtatccatgagagggttggctggggagtatcctggaaccagtctcccatggataccaggggatgattgtattcactaatgttctagcttttttgtcattccccccaaccccttatcattatatttccttcttaggttcctggttgactttctagaaatgccacttccattgtccctgccgctaacttcatacattaccttaaaattttcctatttaaattagtttgtgttttaaaataaagtgctttgccttgataccagtctgtgcctttaaagtgccactaacataatgacagatgccttttagaaatcatgcaaactattgtatggccattggcatcactctgttagtgttaaagaagctgtattttctttggattagccctacccagttttgtttttcttctgttaatgctcaacagaaaactgaagatggtcacaactttccgaccttgtgcacattgcttctctggtctattgccataggataccgtagcagtatcttacagacatctttgatggccaatcagaagcagttaaattaccttaaattttttaaatggaactctgacagccaataagaaatcccgtgggtgggaacactaacaaccctttggcttgtttttaagaacaattctaaattttcaatattctgttttagaagcacatgatgccctagtgcagctgctatgtgcatttgccagacatttccacgccttagagttccccatagtttgaagtctgaatctgacccctgttctgcttctcaaggtaactttaaaacaggaagtgtacaaaagaggtaactgatgacgtgaacagccaatcgtggctttgtgttcttagccgataaagcagttcagccaatgggaccactgtggaggcaaggtttggtgtcaaatagcatgctagattgaatgcctttgactgttaaagtggaaggaggctgcagggcttcattggagcctcggagtttttcactgaggcaggggtcagctgaaagacaaagaaaaatggcgaatagtttgttggggggtgggaggacagctgttcgggttttcagtggagtggacattccagactcatgtttctgcatctcctgctgccttttgtttcctccgtcctttggggggtagggataggagtgacttaaattctcccagtcggtggaggtataaataactacatgtaaaattaatgcagttcccggtaagtttaattctttgttttgtgttgaaatgatagaaactgtttagcttcagagagtgtagacaagttgcactgttcagaaaatggccactttacattccatgcataccttttggtgcacctagaataccttgctgtgtttagattttgcatgtccttcaactaggatttctttcctagttgggtatcgacaagatcaggtacatggagaaaggctaatcatttttcaggggcacacagaagcaaaacacttttctctttgcattgggtaaacttaactgttttccaaataattttcctttgttcaagtgccctgaagctttcctacggaataagctgggttgttgtgagagtttttctatttccatgcactttgttgacatctgtgttttcagatatggaagcaacactgttgctgttagaaatttgtgtgaaaatacgatttgcactgctgcaggttctaatggtgaaggcccacatgccagtgtgaaattttcccataactttcttgatttaccagtctacctctagattctaataagtagtagttaatgtagtaacaatctttgtttttaatgcacattttagcttagaatgctggttagaaatatcttcacttatattgacagtgatgagcaaatatttttccacagatttcacacattttgtcaggtgttgatttagttctttaaaatgatgtgagcaaagtgctttccatttttccgtattaaatatttaaaatcctgcagt

SEQ ID NO: 1506 - DNA, 6000 bp, Homo sapiens
gagagatacttgttgacatgttaagttggagatgcacaggaatggttgggaactcaacccaaaaagcctaagggctgcaagtcggtttggggaacattaaaggggaatgataataccaacattatatttgtttcttagtcagtactgagctaagatatatttgtttgcatttgacagtgagagcattatttttaggtaaaacatgtcttcccaggatggttcaactagtagtacagagggtcttcagacaatgttgtttgattataatattgatgaagaaaaaagaaaccagttcctggccggggtcactctctgtgtggagtttgagcattgtccccacgtctgtttggttttttttccagtactctgctttcttcttgcatcccgaatatgtgcatgttaggttaattggcacatctaaattgtctcagcctgagtgagagtgtgccctgtgattgagttgtccaggcttggttcccaccttgtgccctgaactgttgggataggcttcaatcatctgcaaccctgaactggaataattggataaataatcatcttacttttttttttgggacggagtcttgctgtatcccagtatggagtgcagtggcatgatcttggttcactgcaacctccacctcctgggttcaagcgattctcatgccttagcctcccaagtagctgggattacaggcgcctgccaccatgcctggctaatttttgtatttttagtagagacagggttttaccatgttggccaggctggtcttgaactcctgacctcaggtgatcctcctgcctcagcctcccaaagttggggttacaggtgtgagccaccgcacctggcctttctttttctttttcttttggcgggggcgggggacagagtcttgctctgttgccaggctctagtgcagtggcgcgacctcagctcactgcagcctccacctcctggattcaagcgattcccccgcctcagcctcctgagtagctgggactacaggtgtacgccaccacacccagctaattttttatatttttagtagagatggggtttcaccatgttggccaggatggtctcaatctcctgacctcgtgatctgcccacctcggcctctcaaagtgctgggtttacaggcgtgagccaccgcgcctggccccggcctttatttttcttaatctttcttcaatgtatgtatagttcatacttatttcagtgtttaatattagaagtgtcttgatctttatttagaagtttggtgatgtttttgtgaccagaaatatggaataggaactaactcttatttatgtcaattagcctttggtaaaattggttttgttatatgtttggcttaagttgcggtttccaagagcctatcgaagacattaagggaggacttaactttgctttaattggaagcagcattggtcaagaattgggtttcattttagcggagcttcctgtggtctttttcccttggacagttgttgtgatgttaggtttttaagtattatctcccaacaacatctatttagttttagttacctcaaagagctgtattgtgggtttaggctactataaaagagtttggtatagagaatgaagtacatgccaaggaatagagagctgaactgaagtctaaaggtcctgagtttcagaaaccaggtcatattgcaataaaaccttagatttctttttatttatgaggttgataattttgatacatcctgttgttccatgcccaggcatatcactaagagaagatttggcaggcatggtacctggttgagagcaagagcttgaaagatttccaaacaattttaaaaggaacactctgattttgggatgttttgaaaacttctgaagtttcatttttttctttaagaatgataaagagtaactggatataagagtaacagctagattgcccactcatcagtggtctgatcaaatcatctcacttctgcatgattttccccttcttgctaatggatggccaggcagaggtatttatcttcctcctacttacccattgtcattaatatttcagactttgctaatctatcctggtcacttttctgaagaggttctgactttgaaaagatttacacttgagaatggtatgcatccacatttccagccttcaagtctgcctttcagcttccagcactgtcttagatgtttgtgtgtgtgtgtcctttctgtcatccccttttattttaaatccatttcagtaaatcagtttcaggtagatttctgattgcagtcttgctttaaagtcctggagctcatttagtctaagcttctggaatagcttgtgtaaccatttcctttggttaggcaattccaataagtatgtcagggccaagctttccaagattcgcccccccccccttttttttttttcctgaaaggccatacccagcatcagtcttgcacctcctcttaggggtaattagttatcagactgtgtgctggatactgtgagggatccagagagatgaatcatatgcagatcctaccctcaaggagcttgtatagcaggaggggaaataagacatacacattgatgtgtatgtcatacaaggtatcaaatacaatgattgtacaaggtaatgtggtgaggacagaaagagaggtgcagatcgggcctccttaatgctcccaagggagggaccagttccagaaagcagtagagaatacttcgtggagagatagtaattgagttgagtgcctgtagtcccagctacttgggaggctgtggtaggaggattgcttgagcccaggaggtagaggctgcagtgagccaagatcacaccattgcactccagcctgggcaacagagcgaaaccctggctttgagaaaaaaaaaatagagagaaagagtagtttaacatggaatgaagaggatcctggaatgagtctcttttttcttgtattttttattattataatttttttgaggcagggtctccctctgttgcccaggctggagtgcagtggtgtgatcatagctcactgtagcctcaaactcctgggcccaggagatccttctgcctcagcctcctgagtagctaagacttacacgtgtgtgccacaatgcctatttaaaaattttttttttattcttctttttgagatggagtctcgctctgtcgcccaggctgttgtgcagtggcattatcttgactcactgcaacctccgcttcccaggttccagtgaaactgttgcctcagcctcccaagtagctgggattataagcatgtgccaccatgctcggctaatgtattttgtgtttttagtagaaacagggttttgctatattagccaggctggtcttgaactcctgacctcaagtgatcctccacctcagcctcccaaagtgttgggattacaggtgtgagccacagcccctggccttaaaaaatcctttttttagagacagagtctcactgtgttgccaaggctggtctcaaactactggcctgaagtgattctcctgtctcagcctccggagttgttgggattacagacataagccacaacacccagcctcctcttacttttaaatacattctttcccttattatcctagaagatgaacccagaatattttccatgggcttgtagatgttgtaaatggactacttctgtagcaaaatcaatttatttgcaattaatgcattaaaataagaggtgattaactacggttgctttatttatttatttatttatttatttatttatttattttgagatggagtcttgctctgtcacccaggctggagtgcagtggcatgacctcggctcactgcaacctccacctcctgggtttgcagcctccacctccttggttcccgagtagctgggactacaggcatgtgccaccacagccagctaatttttgcatttttagtagagatgaggtttcaccatgttggccaggctggtctcgaactcctgacctcaggtgatccacccgccttggcctcccaaagtgctgggattacagacgtgaaccaccgtgcccggcctgctttatatatataatattaattgttgggtgtttttaaagctccatgcaaagaatggatctgctttaggaaaagccttttgaataaaagtactcactttttccaggaatttacattaacaatttatgttcttctaagagacattactaataatatctgcaaagatgttagaaaacatgcttcaaacctttttctcttttttcctggtgagaagaacttgtgtccttcaaaagaagattacctttgtctttcgaagtcaggaatttataaaaagagtttgctggatggaaaaatcataaaggccataactctaaaacctaatgtaaagaagaacagttagagctgtccaaagatgggaaagaatgtcttaccagtaagccagtttcccagaactggagtgggggggccctcaaatgtaagctggttgaacacttaaggtagaatcacccggggttgggcagaggttgaagaaaagctgcgagcgtcttatgaaggggtgggcctgagtgtctccttatgtctttttttttttttttcagtcctgaacttctatgatgcagtaaaatgtaaaggatattattgacttgtatttttcgctttacctatttgggatttcctaatgtagatgggcttctcaattttaaaacttaacctttaatacattttcagttccaaaaaaatttgataacttctgttttgtacctaacttccactactacagtatgtggctctgagccagccaaagattcatgatctgttgactacacagatgtttgcgggctgatcatgcctgcacatctgtagttgggacagttcaaaatttaaaagcagactgcacagatggttctagacgtgctttttgaattgtgtacctttgtaatgttttggggggatatcagaggacagccagaatttgttaccagacttttaaatcgtacaggtctttgtactccaactaaacctacccatccattagcaagtgtacagagatatcgtcctggcaattgtgcatctttctcctttgaccttagcagtttgcatggcagattgtgccaagatgaggcctgtccagggacccatgcaataaaaggttagattcttttaaagctttttgataattattattatttccagaaagatatttttgtttgccccatttaaaaaaggttaaattgagtcactgtcttcattttcatgagtaccttgtagaaaactattaataatgataaataactaaacttctctagattaccttaatttttttgttgttgttctcagtacatctaagagagtagcatataggccatgtgtatgtggtgataaatgaaaatgcaggggtcttacttggttatttaggacttaagattttatctagtcattttcaactgtgattgaacacttccctttaactcccttcagaaactccaagatcatattgtatcccaggtactagaatttctgttcagctgtttataggcctccaccacaagaaattggctccaaacctattcccattacatcatcacccactaatgtcattacaccagaatgaaatctgctttgaggcttgtattgttgttttccttccatttctttcccctcatcatttcctttagaaggaaaagggaaggaaaaaaaaagaaaaaaatcagagacctgtaaacatttaagagtgaattggacatccccacaggctaaacctagagttgtcagctttcattccattctgctgtgatagagtgttctgcccagtatgtatccacatggagcctggaaagtaacaagtctggtcatgtgacaactggctttggtgctttgctttcagcccctcagaattagttcctaatggctcacatagctccctgccagcatcccgtcactggcacgttaaaccttttcaaataattcctcagaatagagattcttaggagagcactaaatttctccattctttgtgtttaatt

SEQ ID NO: 1507 - DNA, 6000 bp, Homo sapiens
aaaagggctgtacagttatttccccctccctgccttaaaacttgggagaggagcactcagggctggccccacaaagggtctcgtggcctttttcctcacacagaagaggtcagcaataatgtcactgtggacccagtctcactcctccaccccacacactgaagcagtagcttctgggccaaaggtcagggtgggcgggggcctgggaatacagcctgtggaggctgcttactcaacttgtgtcttaattaaaagtgacagaggaaaccacggaggctgtgtgtatacgtatgtgaacagaggaggtgggggaacacaacacgcttagccctgtccacaaacaagagggatggatggtccaggctcccacaggacatatctagctctctgatcccagtagagtagagcccctaggaaggctgctgggacataggtcatgaaagaagaaaggcattagctgaaacagatttaaaaaaaaaacatgaagggagacatgactttattagaaaaataaaaaacaactgaggtgatgggttggtcttcagcggatgccttggtggatgaggctgcttttggctgcactggccttctcccgctcccgccgccgcgcagggtccaactcaaaacagcgccatagcctcagggtctcatctgctgctgcggatgccactgtggccccatctgggctcatggtcagactcaggacccgggatgtgtgacctggagcaaatgagaacagtacatacgaatgctgatgcagccatagccataaaggaggcactgggccacccacctacctttttgttttttttgagacttgctctgtcacccaggctggagtgcagtggcgcaatcttggctcactgcaagctccgcctcctgggttcatgccattttcctgcctcagcctcccgagtagctgggactacaggtgcttgccaccacgcctggctaattttttgtgttttttagtagagacagggcttcaccatgttagccaggattgtctctatctcctgacctcatgatctgcccgcctcagcctcccaaagtgctgggattacaggcgtgagccaccgtgcctggcctcctcccttttttttcaatggtgttactgagatataattcacacaccataaaatgcatccttttaaagtgtacagtttagtgatttttagtatattcacaaaattgtacaactgttaaaactaattctaagacattttcaacatttcccattaccctctctcagcccctggcaaccattaatgtgttttttctctggatttgcttattctggacatttcagtcatacattatgtggccttttatgtccggcttttcacctagccacttacctttgagttcagccaccttggccatggttgggtacttccaaataactagctggttctgtgcaaagccatggcctgagatgagctccttgtaatggggagaccagaggatggagcacacctgtggagaggagctggtgtgggcatgacatatagccaaggctacttaaatcagaactgagcccattctagtgttaggcaccctgccacatgctccagactcagagttgaatgatcatagtccatacaaaagttccttgagaggcaaattatagacactcgctgatgtaaccattttttacctttacagtgggtttactgggacttaaatcagggagcatctgtattatccattggatagatgaggaatcaatcagaaggaagttcaataggttgccaaaggtcacattcaagtttagtagatgacagagccagaattttaacttgggccatctggctctagagtccatatctacagtgaaggctgaatgtggggggagtggaaggagagagcctcaagtatctttctaatggatttggattatatgccataagtgatgggaagccatcacaggtttaaggacagtacagtataacagaccacagcatggaggatgcattgcaggagataacaaagaatgcttgacaccagtgaggaagccattgtagtgggcctccacttggaaggatgaggctgaggggaggggacagatgtcaatgatattttgaggtaaaactgatagatcctggtgaggaggatgaaaaattctaggaggtttctcagatttctgagcaggttctgccattccaaagcaatgtgagacaggaaggaacacatttcagggaggcaaggggaagtgacaaggttaatttgggacagatcaaggtggtggtgcctataggacataggattggagatagccacagactgttggaaatgaagctcatgagtgagagctgagttagaagtttgggaatcaccagggcatagagttggtgaagccattggagtgaatgtagttgcccggtaagaatgcatgtgggagaggcaggaacaggcaaaagattacctgggaatgggcatccacggcactcagacaggccccagagcacacattccagatgcgaatgtgtcgatcactggtgccccctcctgttgccaggacattggactgccagggacaccatgctacggcctagatggaataaaggtggggtcagcaggtactagagccagacaaggagctctaggggtcacagattaacccagtccaatcctaccatcccttctccccttaacagtccccagattataggtgagggtctgcagaggcttcagcccaaccctactcaccttgacagccccttgatgctgggtgaatgtctgcagaggaacccagccaccctctccaggagcactaggccacacattgaccaagttatcattaccaccactggccaaatgtcgtccatctggggcccagcgcagcccacacacttcctggctgtggccactcagtgtggccacatggtgttctgctacccgaacatcatggtggtggatgtggccagaacgtgaaccactggaggaggaaagaagggaatcaggttctgtggcagcaccaaatgcaagcaagccagagctggttcagttcaggggtgtacagtcaaggggagggtgggcaaatatcagactaccatagaccaacaaaaaccactgacctggacaggatatagctgttccagcttagggagcccactcgggcagagtgactggtcatatttcgaagccgtttctgctgctgcacatcccatagctagagagagaagcccactaggatcagagattgggacttggcattaatatcctccagctgtgcaagcccattgggactggtgagaatgacagcactggacacgtctcacctgcacctcagcactgctggtgcccacagccaagtagttgccctctttgatccaggccacagaggatatatattccccaggctgctccatttgcaaaagctgcaggatgtcaccagagcttgcactccacaggtacacactgttgtccagtgccacggccagtacattcccagaactccaatccacaaggttcaggtctgtcagaggtggagagaagagcatgagcttccttgtttgtgtggtcccaggccctctttctccatgcatgaggcgaggataaggatgcacttacaatagtcatttcggatttcaggcgcatccaggatacggtctggcagggaaggaatgtaacggcaggtcttccggctggagccaggagtggccttttggctgtagagtactttcagtctgttctgataacctgtggcaacggagtgagtctagacgctgggaaaatcaacacctcccttgccctcaatcttagataggaagaggagacagatatctgtgctcagccctggagatgaactgacacctccctccaggaaccaggaacttcgggtcttaccctctggcgcattttgtggttttccactgagccgaaggatcttggcttcctctacatcaaaaccgttcaggttcaaagcccaggctttctgatgttcctggcataaagggtagtgaaggagcaagatggtattatccaaagaacagtcaggtcccgtgccttaagcccctctgggacacataccttcttggtgggcgtctggctgttttcaggctggttctccttgctcaggaggaagctggccacctccatctgggcagcactgcgatgggggatatagcggtcaccgccaggtttgctaggagtggtctgaaccttggaactggatttgcctggggcggagaaagagaagacagtctgaccaggctccccagggagaaagtatgaaggctgctctcactcagttcctttggcacctcactgaccaggagttcggcccggagtcctgccggcgctgtgggatcggttggcggcccgcatgggtgagggggccgggcctgcggcttccttggctttgcgctgccagcgcgcagggggtgcattggggatgggtgcatccagctgaagcagcgagtgcaggtcactctcgaacgcgaactgtgccatgggagcgcccgcagggggaggggtccttgcagttggtgcctacggagccctggaggaaaggaggcgacggtgctcaggggacagaaagggaccccttcgctcctggccggccacaaaatcagggccaccctcggctgcagccccttccggcctagcaccccctccccctggccacggccccacctcggctcagccccaccacctctcaccgtgccctccggagcagttccgaccggctttaacacgcctggcttacgcctcttaaactctccgctccgagcgcctattggctccttcaaaatccaaccgtcgcaaccgttgccctagcccattggcctctccggcgaagggggcgggccttccggggaaagtctcagctatcacgagagtctagcggcggagcgcgatttgaagggtacgagaggggctgggagccggcgccagaggactagtactggaaagccggccgggacagggcggggcagggcggggccgggtggggcctgcgctgcctcagcgtcctggagtcgtctcggttcgcccttttgcgtgccttccaccgccgcgagctcggaatgtctggccccgggtgcttcagggtccgagaacctgcagaagttcacacttaaatcctacacgagagtcgtatttatgatgcagaactcggtgcagaacccgatggagtgcccaaggcgcttgagccgttcctagaaggggaaggagagccgcgggcggcagcggggcaggggacggaattgggaagcttgggagcaggaagaaggccagagctacttagggtacattccacttttgcttggcgccgggtaggaaccctgctagaaaggaagtaacgtgtgtttgtctcgtttgctgttgttttacaaacagggaaaatgaggttgaaaagggtgaatgaattccttaaggtcaagaaaaaggatcggtattcaaacctgcctatctggaagataagcttagactgccctacaggaggcactgtggcttatccccttggggctttaaagatgtgaggaccttagagatccattagtctaacctgtgcgtggtgcagcctccccaccccgacaacaaatccatattttacagatggagaaacggaggcccagggaagggatgtgcccgaggtcatacaaagaagtttgtgggaatccaggtctgactcgcactcaatctagtgctctaataatgacttgagtgaattgtatgaatgtgctcagaggtggagcagcaatcataaaagtaataatggtaccatttatggaccatctaactactgtgttaaaacaatttacaggccatgcgcggtggctcacgcttgtaatcccagcactttgggaggccgaggcgggcagatcacgaagtcagaagatcgagaccatcctggctaacacggtgaaaccccgtctttactaaaaatacaaaaaattagccgggcttggtggcgggcgcctgtagttccagctactcgagaggctgaggcaggagaatggcgtgaacccgggaggcggagcttgcagtgagccg

SEQ ID NO: 1508 - DNA, 6000 bp, Homo sapiens
tatccgaactactgttataattattccttcttactctcctcttctagcatttcttccaattattacagtccttcaagattccatttcttaacagtctccaatcccatctattctctgcctttactatatgttgaccattccaaagttcttatctctagctcagacatctactacagcactgtgatgctttatgcaactaactgtttacatatctgtcccctgctactagattgtgagctccttgagggaaaggaacatgatttatttgtccttttcccccagcacctagagtagtgcttggtgcatgatagtaggccttcaataaattttttctaaatgaatgaaatctttctggacaaggttaccttaatcccatgccagctgtcctcatcctctaaaccgttcataggcagcagtaaatgtgctcagacagttctgattatggactctcctaacacattctaattctcaaacaaatggttttgttgtcattgttttttctggctccaaatatacccactgtatcagtcagggtcttggaagaaatagatgacacactcaaattgggtaatatgatgacagtgtaataaacggcaaacagtatttacaaagatgagggcaagatttgggaaaaccatcaaggaacagtgcaagtgcctctgaggctaacaacaacaaggtgctggcactagccctaggcatcaaggggtaagggagggagtggttcccagatcaccagagagtagctgtaagacagggctgccaggaaggagtcatggcctttctttggtggaggggtgcagccaacctatgggcaggtggcaatgagagatccagggggatagacagctcaatttcatgctcttcccattccagtcttgagtccctaggagtaaagtcagagcctttcatgtggctggggaggaattatggagattgggtatactggatgtcatccatttgtcccacccagacctattctccatccttctccatcttgtcctatgcttagcaaggctgattcatatggctggcatccaagcattctcctgggctttggtttctgcttgggttccaacagtaggaggatattatggattgaattctattcctctcctctccctcaaattcacatgttaaagtccttttttttttttttttggccgggcccggtggcacacacctgaaatcccagctacttgggaggctgaggcacaagaatgacttgaaaccgggaggcagaggttgcagtgagccaagaccacaccacaaaaaaagataaaagtttttttgtttttttttttttttttgagacagggtcttcactctgtcgcccaggctggaatgcagtggtgtggtcacggctcactgcagcctcaaactcctggtctcaagcgatcctcccacctcagcctcccaagtagctgggactactggaattacaggtgtgcaccactagcttggctaatgttttctgtattattattatttttttttgagatggaatcttgctctgtcgcccaggctggagtgcagtggcgcgatctcggcctactgcaagctccacctcccgagttcacgccattctcctgcctcagcctcccgagtagctgagactacaggcgcccgccaccatgcccggcgaattttttttatatttttcgcaggacagggtttcaccgcgttagccaggatggtctcgatctcctgacctagtgatccgcccgcctcagcctcccaaagtgctgggattacaggtgtgagccaccgcgcaggcctgttttctgtattttttttagagacaaggtgatactatgttgcccagactggtcccaaactcatgagctcaagcaatcctctggccttggccttccaaagtgctgggattacaagtgtaagccaccacacccagccagatgttgaagtcttaactcccagtacttcaaatacgaccttattaggaaatagggtcattgcagatataattagttaagatgaggtcagggccctagttcaatatgattggtattcttataaaaagagaaaattggacacacatacacacagaaagaaagccaagtgaagatgaaggcagagaacagggcgattcttctataagccaaggaatgacaaagattgccggcaaaccaccaccagaagccaggagagaggcatggaacagattcttcctcacggttctcacacaactctcatgacaccttgatctggaacttctaacctccagaattgtgagacaaccaatttctgtcatttaagccagtttgtggtactttgttacagtaactctagcaaacgaatatagaggatatcaggggatgggctacacaagtcacctatacttgccggcttcccgttctccctatttcattctttccgcaactcctccaaaatggatctcaagcacccactttcctgatcctgctctctccaaagtcatcggtaatttgattttcaatggccaaatctgaccctttctgtcatcattccacttgactacatatattagggtatctcccacttcaagatccatgtctggataatttccattgccttccttcattcatttattattattattattttgagacaaagtctccctctgtcacccaggctagagtgcagtggcgcgacctcgctcactacaacctgcgcctcccaggttcaagcgattcccctgcctcagcctcccaggtagctgggattacaggtgtgcaccaccacacctggctaattttgtacttctagtagagacagggtttcgccacattggcccgactagtcttgaactactgacttcaagtgatctgcccgccttggcctcccaaagtgctgggattacaggagtgaaccatgacaacctgcccaaatcctttatttttaaatgtacaaattccctgaggctataccctttatccttctctatagctaccaccagaagttgcaaattattgccatatcccccccctcagatgttttatttggtccttccctacacagaaaccccacaggtaccacaatgcctagcagatgaagtccaaagtctttagcttaacatttaagaccctgaccaacttgacatgagacaaccttttctatgttttctgggaattccccacctctaacctaagcatatccaattccttattttccaaggtaattggaaatagagaatgcaaaggcttcaagtcaaagataataacattatctgtaagcatcggagtggactttaagctaatgactgaaaatgatttttccagcctctttctgggacagtatagcgtattgtttagattgcagggattagtcagatagtttgaatcctgggctcccctacttattattggctgcatgcctttgggcaagtttctaatctttctgacccagtttcttttttctgtaaagggaagatggggtatctatctgccttatgggattaaggattgaactcgataatgtatgtaaactttttttttttttttcagacagagtatcgctctgttgcccaggctggagtgcagtggctcgatctcggctcactgcaagctccgcctcccgggttcacgccattctcctgcctcagcctctcgagtagctggaactacaggcgcccgccaccaagcccggctaattttttgtatttttagtaaagacggggtttcaccgtgttagccaggatggtctcgatcttctgacttcgtgatctgcccgcctcggcctcccaaagtgctgggattacaagcgtgagccaccgcgcatggcctgtaaattgttttaacacagtagttagatggtccataaatggtaccattattacttttatgattgctgctccacctctgagcacattcatacaattcactcaagtcattattagagcactagattgagtgcgagtcagacctggattcccacaaacttctttgtatgacctcgggcacatcccttccctgggcctccgtttctccatctgtaaaatatggatttgttgtcggggtggggaggctgcaccacgcacaggttagactaatggatctctaaggtcctcacatctttaaagccccaaggggataagccacagtgcctcctgtagggcagtctaagcttatcttccagataggcaggtttgaataccgatcctttttcttgaccttaaggaattcattcacccttttcaacctcattttccctgtttgtaaaacaacagcaaacgagacaaacacacgttacttcctttctagcagggttcctacccggcgccaagcaaaagtggaatgtaccctaagtagctctggccttcttcctgctcccaagcttcccaattccgtcccctgccccgctgccgcccgcggctctccttccccttctaggaacggctcaagcgccttgggcactccatcgggttctgcaccgagttctgcatcataaatacgactctcgtgtaggatttaagtgtgaacttctgcaggttctcggaccctgaagcacccggggccagacattccgagctcgcggcggtggaaggcacgcaaaagggcgaaccgagacgactccaggacgctgaggcagcgcaggccccacccggccccgccctgccccgccctgtcccggccggctttccagtactagtcctctggcgccggctcccagcccctctcgtacccttcaaatcgcgctccgccgctagactctcgtgatagctgagactttccccggaaggcccgcccccttcgccggagaggccaatgggctagggcaacggttgcgacggttggattttgaaggagccaataggcgctcggagcggagagtttaagaggcgtaagccaggcgtgttaaagccggtcggaactgctccggagggcacggtgagaggtggtggggctgagccgaggtggggccgtggccagggggagggggtgctaggccggaaggggctgcagccgagggtggccctgattttgtggccggccaggagcgaaggggtccctttctgtcccctgagcaccgtcgcctcctttcctccagggctccgtaggcaccaactgcaaggacccctccccctgcgggcgctcccatggcacagttcgcgttcgagagtgacctgcactcgctgcttcagctggatgcacccatccccaatgcaccccctgcgcgctggcagcgcaaagccaaggaagccgcaggcccggccccctcacccatgcgggccgccaaccgatcccacagcgccggcaggactccgggccgaactcctggtcagtgaggtgccaaaggaactgagtgagagcagccttcatactttctccctggggagcctggtcagactgtcttctctttctccgccccaggcaaatccagttccaaggttcagaccactcctagcaaacctggcggtgaccgctatatcccccatcgcagtgctgcccagatggaggtggccagcttcctcctgagcaaggagaaccagcctgaaaacagccagacgcccaccaagaaggtatgtgtcccagaggggcttaaggcacgggacctgactgttctttggataataccatcttgctccttcactaccctttatgccaggaacatcagaaagcctgggctttgaacctgaacggttttgatgtagaggaagccaagatccttcggctcagtggaaaaccacaaaatgcgccagagggtaagacccgaagttcctggttcctggagggaggtgtcagttcatctccagggctgagcacagatatctgtctcctcttcctatctaagattgagggcaagggaggtgttgattttcccagcgtctagactcactccgttgccacaggttatcagaacagactgaaagtactctacagccaaaaggccactcctggctccagccggaagacctgccgttacattccttccctgccagaccgtatcctggatgcgcctgaaatccgaaatgactattgtaagtgcatccttatcctcgcc

SEQ ID NO: 1509 - DNA, 6000 bp, Homo sapiens
atataaatataaatatataaaaatatataaaaatatatataaatatataaatatatataaatatataaatatatataaatatatataaatatataaatatatataaatatatataaatatataaatatataaatatatataaatatatataaatatataaatatataaatataaatatataaatatatataaatatatataaatatataaatatatataaatatatataaatatatataaatatatataaatatataaatatatataaatatatatataaatatatataaatatataaatatataaatatataaaaatatataacaatatataaatatatataaaaatatataacaatatataaatataaatatatataaaaatatataacaatatataaatataaatatatataaatatataaatataaatataaaaaatatatataaatatataaatatatataaatatataaatgtataaatatatataaaaatatataacaatatataaatatataaatatataacaatatataaatatataaaaatatataacaatatataaatataaatatatataaaaatatataacaatatataaatataaatatatatataaatatataaatataaatataaaaaatatatataaatatataaatatatatataaatatatataaatatataaatgtataaatatatataaatatataaatatataaaaatatataaatatatataaatatatataaatatataaatataaatatataaatatatataaatatataaatataaatatataaacatatataaatatatataaataaacatatataaagatatataaagatataaagatatataaatatataaatatataaagatatataaatatataaagatatataaatatataaagatatataaatatataaagatatataaatataatatataaatatataaagatatataaatataatataaaaatatataaatatatattaaaaatatatacatataaatatatgtatatttttttgagatggggtctcgctcagccacccacgctggagtgcagtggcacgagctcggctcactgcaaccactgtctctcgggtccaagcaattctgtctcagcctcccaagtagctgggattacaggcacctgccatcatgcccggctaatttttgtattttagtagagatggagtttcaccatgttggccaggttggtctcgaattcctgacctcaggtgatctgccggcctcggcctcccagtgctgggattacaggcatgagtcaccacgcccggccctatatatatttttgagacaagctctgtgtctcccaggctggagtgcagcagcatgatcatgactcactgtagcctagacctccagggctcaagtgattctcccacctcagcctcccaagtagctgggattacaggcatgcaccaccacacccagctaatttttgttttgttttgttttggagacagaatctctctctgtcacccaggctggagtgcagtggtgtgatctcagctcagtgcaacctccacctcctgggttcaagtgattctcatgcctcagcctcctgagtagctgggactacaggcgtgagccaccacgccctgataaattttgtattttttttttcagatggagtctcactctgtcatactcaggctggagtgcagtggcgtgattttggtttattgcaacctctgcttcctgggttcaagcgattctcctgcctcagcctccagagtagctgggattacaggcgcctgccaccatgcccacctagctaacttttttttttttttttttgagatagagtctcactctgtcacccaggctggagtgcaatggggcgatattggctcactacaacctccacctcccaggttcaagcgattctcctgcctcagcctcctgagtagctgggattacaggtgggtgccaccacgccagactaatatttgtattattagtagagacggggtttcaccacattggtcaggctggtttcgaactcctggcctcaggtgatctgcctgcctcggcctcccaaagtgctgggattacaggcatgagccactgcggctggcccaatttttgcatttttttggtagagacgggggtttcactatgcttcccaggctggtctcaaactcctggactcaagcgatctgcctgtctcagcctcccaaagtgcagggattacagtcatgagccaccactgcacggccccaaaatttatttattttattattattattattttttagatggagtctccttctgttgccagattggaatgcagtgccacgatctcagctcactgcaacctccccctcctgggatcaagtgattcttttttttttaagactctgtctcaaaaaaaaagaaaaaaaaaaaaaatatatatatatatatatatatacacgaattttgggccaggcacagtggcttatgcctgtaatcccagcactttgggagggccgaggtgggtggatcacaaggtcaggagtttgagaccagcctggccaatatggtgaaaccctgtctctactaaaaaatacaaaaattagctgggcgtggtggcacgagcctgtaatcctggctactctggaggctaaggcaggagaatcgcttgaaccggggaggcagaggttgcagtgagccaggatcgcatcactgcactccagcctgggtaacagagcaagactctgtctcaaaaaacaaacaaaacaaaacaaaacaaaataaataacggtgcaaaattgaatatgcctttttgactctctaaatgcctcagatccatttaccctggggatttgtcctttctagccccaccaccatctcccctctggaagactgctgacctataaggataaagaccagactcttgagcaggcacttagggtcttcctgcccatccctatccccaactccccctcagtaattttggctactagtatttctccacatctgaggctatcgtgggtctcccttcagtggtcatgaaggacaaggttggagaagtttgccctcgtgagtctgatgagggattgggtgggatccctctaatagcatatggaggggatgaaatgggcatgagaccaaaggccaggagagcagcaaggagctgtggcaatcatcctgacaagagagactgtggcccaggccagggtgtgaggggaagatggagccaaggggatagatatcagagctatttgggaggtaaaattggcacaaattgggtactcagcaaatatttgttgactttcctggctactctttctaaagtaggctcttcatttgctcttctgtttattcttccttcatagcacttttcacagcctgcaattaccttgtttatctgcttgcctattgtctgtttccatcaagcagaatgtaaactaaatgagggctgcaagcttgattagttttattcgagatagtgtccagcacttagcagatgctctcaataaatctttgaggaatggcatggtaattgattggctggcacagagggagggcagagaggtgagagacaaggccaggaggcctgtggtcctgggcctctgtctctggccctgggaagggtgggcattgcgcaggggtctaggggtccacgtggtccagagactagctgcccaagtgcccgtgtctagcatttgagaaaatgcaattcccagccaggcaaggtggctcacgcctgtaatcccagcactttgggacgccgaagcgggtagatcacctgaggttgggagttccagaccagtctgaccaacatggagaaaccccgtctctacttaaaaaaaaaaaaatacaaaattagccgggtgtgatggcgcatgcctgtaatcccagctgctcgggaggctgaggcaggagaatcgcttgaacctgggaggcagagtttgcgatgagccaagatcgcgccattgcactccagcctaggcaacaagagcgaaactctgtctcaaaaaaaaaaaaaagaaagaaagaaagaaaaaagaaaatccaattcccattcactttctggcctctggctgctgacccaggcccgggggtattttcagaggaagggaattgcggaccccggaggaacccgaaatttgcccctcaagagtgtagaagtgggtagcggaagatgtggcctggagcatggtaaaagccttgaaattccagactctgcttgactcctaaacctggcaaggcagccctcgggccaggcaagccaggcgcgagactgtgccttccttccaggccctaaagagggcagcactgggccgggccccgggcgagggcgagggacacacgcggtccggcacactgaaaggggagtgtcgggtaacatgcccgggcaaaagcgagcgccgcccctgcctctccgctgctggctggaacgctgatctatctagttgctggggagacgcccccagatgcccgggccccactcggacttcagcacacatcccgaaggatggggaaagaaagaggcccccacgagcgggactcgcagtggccaaggaggggtgagaggcggacagggatcagctggcccctgcggcctggttgcacctgcatggtgactagctgccgggctgcgccccggggcgcggcgaggaggcggggtctggcagtgcgttgggtgggggaggagcttctgggtgatgtaaggccgggaatgggagtggcctctcctcgactcgctgctaggaagggggcgggactctcggtgaccagacgccggggagggggcaggcgttcattgataaaacgctgggctcccctgggcgccagcgcagcgtagcaaatccaggcagcgccacgcgcggccggggccgggcggaaccgagaagccgggaccgcgctgcgacgcgccggccgcatggagcctgccgccggtttcctgtctccgcgccccttccagcgtgcggccgccgcgcccgctcccccggccgggcccgggccgcctccgagtgccttgcgcggacctgagctggagatgctggccgggctaccgacgtcagaccccgggcgcctcatcacggacccgcgcagcggccgcacctacctcaaaggccgcttgttgggcaaggtgggccgagggacgtccgcggggtggtgatggtggaggtgggggtcccggccggcctcttttctggcgccgagcagggcgtgggcacttgacccccaacgcggggacgcccgcgggccagactcggcccccctggaacaaccagcctgatgccccctcttcacaggggggcttcgcccgctgctacgaggccactgacacagagactggcagcgcctacgctgtcaaagtcatcccgcagagccgcgtcgccaagccgcatcagcgcgagaaggtgggtccaggctcagcgggcgaggggtggggtggggacggtggcatgggaaccatggaaggatgacgactccgcgccctcatcgcagatcctaaatgagattgagctgcaccgagacctgcagcaccgccacatcgtgcgtttttcgcaccactttgaggacgctgacaacatctacattttcttggagctctgcagccgaaaggtgaaagatggtgattcccgcagggatgagagtgagggagagaagacagtcttttttttttttttttttttttttgagatggagtcttgctctgttgcccaggctggagtgcagtggcgcgatctcggctcactgcaatctctgcctcccgggttcaagcaattctcctgcctcagcctcctgagtagctgggattacaggcatgcaccaccacgcccggctaatttttgtatttttagtagagacagggtttcaccctgttggtcaggctggtctcaaactcctgaccttgtgatacacctgccttggcctcccaaagtgctgggattacaggcgtgagccactacacccagccgagaagacagtcttaagacccaaagctggggccctgt

SEQ ID NO: 1510 - DNA, 6000 bp, Homo sapiens
caggtaagaatcatgcccaggagagggatgaggtctccggtttggtgagcggcctcatgcgcacatccgttggccatcaggatgccaggccagaggtgaggcgctcaggtggacactgttcccctgactcacccccaccctagcagctgagggaagccggggataaaagaggctgctgaagcatccagcctcgtggtggcctaattggctgtgtgtcaccagcctggcggggctgacctggggtgccctgggagccagggcagggccaggccatggactcaagggtttggattttggggcctgtgtcactccctttccctgcccaaccctccaggctccagcagcttctggcccagcccctgtcagcctggtagagacagcacctgaagacagctcaccccgtgggacactggcaagcagtggagatggtgaggagccagggaggatgagaggtgatagaggttgctggagctgagatcaggggcgagagggaaggagtgggcagaggggcctggcctgggtcctggggtgctaattcctaaatctcagtgccctgtctccttcaggatttgaagaaggtctgactgtggccacagtagtggagtcagccctttgtgctctgagaaattgtatagccttcatgcccccaggtaagggtggggtctggtacatgctgctgtggtgggagttctgtggctgggaggccaggagcaggtgctgactccctcctctcccatgacagcggaacagaacccggcccccctggcccagccagagcctctggtgtgggtcagcaagtgggttgactactccaataagttcggctttgggtatcaactgtccagccgccgtgtggctgtgctcttcaacgatggcacacatatggccctgtcggccaacagaaagtaagtgctgttatggggtgccttgtattcaggccactaatccagcagggccgcaccctcgtgagtgctcctgggctcaggggtctgggtttctcagaggaggggcattggtgcagggctccctctgacctctgcctccccattctaggactgtgcactacaatcccaccagcacaaagcacttctccttctccgtgggtgctgtgccccgggccctgcagcctcagctgggtatcctgcggtacttcgcctcctacatggagcagcacctcatgaaggtgtgagggctggggctgtggtacattgaaacctaacccatcctggccgggtgcggtggctcacgcctgtaatcccagcactttgggaggccgaggcgggtggattatgaggtcaggagatcgagaccatcctggctaacaaggtgaaaccccgtctctactaaaaatacaacaaattagccgggcgtggtggcgggcgcctgtagtcccagctactcgggaggctgaggcaggagaatgggcgaacccaggaggcggagcttgcagtgagcagagatggcgcaccattgcactccagcctgggcaacagagcgagactccatctcaaaaaaaaaaaataaagaaaagaaaactaacccatcctgatccctctgattcccccttggtggtggttggggttgctgaaagctagaggataaggcatacactaatggggagggggctgtctcacgctggatcagtgacctgccctgatcctgctcccagggtggagatctgcccagtgtggaagaggtagaggtacctgctccgcccttgctgctgcagtgggtcaagacggatcaggctctcctcatgctgtttagtgatggcactgtccaggtaagagcctatccaggagttgcgggaaggtctgggaggcccagggtgctggggaggaagctgggcccggagcctaggtcctgaccactgtcatgctctgtgtgcaggtgaacttctacggggaccacaccaagctgattctcagtggctgggagcccctccttgtgacttttgtggcccgaaatcgtagtgcttgtacttacctcgcttcccaccttcggcagctgggctgctctccagacctgcggcagcgactccgctatgctctgcgcctgctccgggaccgcagcccagcctaggacccaagccctgaggcctgaggcctgtgcctgtcaggctctggcccttgcctttgtggccttcccccttcctttggtgcctcactgggggctttgggccgaatcccccagggaatcagggaccagctttactggagttgggggcggcttgtcttcgctggctcctaccccatctccaagataagcctgagccttagctcccagctagggggcgttatttatggaccacttttatttattgtcagacacttatttattgggatgtgagccccaggggggcctcctcctaggataataaacaattttgcagaattggactccccctcactcgcagtagagcccgtggaccgtggccaccgcgaagagcgaggtgttggtgtaggagaccgaggccagcccatcgcgcgccacgtcccagagcgcacggctgaccacgtgaacgccctggcccgcgcgcggccccagcaccacactgcataccagcttgtagcgtggcgggctgagctcgcgcaggcgaacgtgcacctgctcgcagagctcccgcaccagccgcgcggcctcgtcgctggagtagcacgcgtcgtgcagccctgcggccagcgccgcctccagggcacgctgtgcacgcgcagcctcccagcgctccccgggcactggctccgtgcggtaggagggcgccacccaacgggcgggcgccaggggcaaccctgagaagctgacccttgagcccagagggggcaccgggcccagggatggccgctgacccccaggacccgcgcctggcccgaccagcgagttgcggcgggagaaggacgcggccaggcccagcatggagccccggcgcgaggccggggctggacctggacctgccggtcgggcctcatcaatgctgggcaggcagcctcggggccgcaccggtgagggtttccgcccggagtctttggcattctcctcctcctggcgtcccgggggcagaggcctgctggccatggacctgctggctggaggaaccacactcagggtggccttcaccaggcatctgtctacccaccccagcctcttgctcagtgatgtcaagggtttttaccttctacccccttcttacctgtgttttagaacaagtggatcagatagtcccaggctgcctgggttcctaggtgctgagaaggttaaaggctgttagacacatgagcaggggacaggaggctgctaggactgggatcctcggctagtccttgccgactgagctccttctctgggcactatggaagttagccaggtacgctcggagtcttagagactgccatttctcccttccacccgacttctctggaaggagaggcaggcctctgcctcagcctggactgtggaggcagagcctccaacccctaaccaggaaggactgacagactcagctccttcaaccccacagatccttccagccctgggggtgttgaatccagtcatcttccacccagatctactctagggtggctggcacaaagatctcccctacacctggcccaggctgagggcagatgactcatgaagcccccttccaccttctgcctttggcctctgatcccacttcctccagaatcagttctgagatggctgccctctgctcccgaaactccctcaggcacctgagtcacccgcaggctttggcttctgagttctgtcctggctgcacagccctggccccgctggcctgaagggcaagtgggaggggaaagacctgtgttgtggagttgccatgggttgctagagcaaacactcctccctcccaggatccctccctccagtctggctctggcttaacctgagagcattgttgctgtgagcatgtgctgagcatggggtgcccctgagtcatcagggagagcggccgacagggtcttgcagcttagaggcaaacttcctaagcgcaggcaacagaggggcagatgtagagcaaggctgtggtcagaaaggctttgtcctaccccaggactcttgagccagggcccattttctccccttgtggaatggccagatgactggccattcgtgaacaagtcacagaggcctaggttagggggagatcttgaggctgcgggggtggtggctcaggaatccagagtctgggcccacaggaaggaacacgtcatggctctgttgtctccccatcggcctcgacaaggacaaacatttccgctcccggcgcagagttagggtggggcttggatgacttcctcagttcagggctatgtgcgggggaggggaggcccactggctcagctggtaggcaccaggccttataaagtggcagtgactcggcagtgaaccccgagtccagcctcgtgacctttgctgacccaagtgtcctggggcttgtccctagctggctacacctctagtacctaggtttccccaaagttacatttcagagatggcagaggctgtgacacctctgccagggctgacaactcatgtgactcctcctctggcagggatgggactgtcccctcccaaacaagccaggtcggggccctgacccatctatgggggcgaggattttccctgttgagtgggggtttccccggcctggctaaccggatcctgaccctgtgtgcctgtggaggagggaagggttaggagggcaaggagtttgaactctgaacctagggcaggctcagcttcgggggctaagaccctcgtatggcgcttaatgcccctctaagggctgaagttttccctgggcctgcccgggagatgggtggagtctcttctcaggccagctccagtttccatggaaacccacaggcttcccaccccgtcggctgcctgggcagactcccagccagggcctctttcgccgccgccgccgccgccagccagccagcttcttcccaggaccataggccactccagcctcagcttctcctggccccctccctgtgtctgttcctgtccccgagcctctggcctctgatgccttcaggagcttgggcctctcctgctccactcctaaacttcagcttctcagcaaacaggcctcccaagtccctgcttctccctctcaggccttgctaacctcaccagctctagggcctggccaggcctcccaggctccctcctccaccccaaccccttctcactcatggagcccttgggactggtcgtgcatgggaaagctgaacctttttccgcagcactccgaagccttgtcaacaacccgcgatacaggtgaggggtgggccctgcctgcgggtttttcttagctggctctgtgggccccaggactctaaggaggccctggtgagaagaggctgggaattagaacttggccatcctccctggtgaacttaggctatggggaggtcaaatgtggaacatggctactggtcactcagtgtctgtgagaccctgagggccagaggcaaggctggcggggtggagctgctgtgtgagctcaggcaaagcccttccttctttggactttggcccctggcagaagaaaatgattctcagcccctgggatccttagagatggtgggtcatgattcccctcctccctccactcactcagcttggtattgaggcctcactgctagaagaagaggaacagatgacctgttctgggaactgaggcttcacaagaagaacaaagctccagagattgagccatagtccctgacaggaagcctcgggggtgctggctgctccctgctggccgggatgccagtggtgtctgaaaccaggggtagagtttacaggaggccgggctgctcaggagagctagaatgaagttctctgtcctcatggtctcagatctgagctcttccccaaagggtggtgacttccatcaccctgcttctttggggtcacagtctggtctgggtaatgtgaaccccccaggctttggacctgggacta

SEQ ID NO: 1511 - DNA, 6000 bp, Homo sapiens
ctatctatctatctatatttttgagactgaatctcgctttgtcgcccaggcagagtgcagtggcgcgatctcagctcactccaatctctgcctcctaggttcaagcaattcttctgcctcagcccccgagtacctgggattacaggtgcgcaccaccacgcccggctaatttttgtatctttagtagagacagggtttcaccatgttggtcaggctggtctcgaactcctgacctcatgatccgcccaccttggcctcccaaagtgctgggattacaggtgtgagccaccacacacagccaatgcatatattaatctttacaacaattctgtgaagtgactgtgataataatccccgtatttcaggtgagggaattgaggctggcagaaattgtgatttaaagtcagtgaatactagacataggatttgaattcagttcttggggctccaaaccttatactttttccattagtccagggtccgccactagtatcctaaacaacactaaatcactagatgaaatacatatgtgcagtagcattagttttctcatgaattacattatgagcaagaagtattatttaagaaattggttatcttaaccaaagaatcaaggttatcactaccagtaataactcaagttgataacacatggccttgatatgatgtaacaaggacatatcacctctgcggtgatacacatctcagtgtaattctgagaatacattaggtaatcccagattgagggagattttataaagttcctgactcttcagaagtgtccactgagaaactgtcacagattggaagaggctactgagacatgacaactaaatgtaatgtggtattattggaccatggaacaagaaaaggacattagtgtaaaaatccaaatagagcctccagaatttaactagtagtatttagcagtgttaatttcctagttttgatagatgtaccatgttaaataagatggtaacattagagaaaaatgggctaaaagcatataggaacattctgtactgtctttggaagtattctaaaataatttcaaataaaaatttagtaaaatataaataatatttattatttatattggaaataaagatgatataaaagtttcttttaaaagaacatggagattctagaaaaagatctgtatttaacttaggctgagctccatgaactactgtgggccaactatgagaatagataaattaaaattacttttctttgctcgtgcatggaccaaatttctttacatttccttcttttggtttatgacacttaactgaaattgtttctcttaaggatggaattctggagaaatgaaaaatgattttttttctcctaattcagtatttatttttcttcccttctcttatctgtagtagataaccactctggatgctaggtatccaaccatgaagagttaggccatagggaagaaacagtgtctttgggaatggtataaactaagcagcatggaagggaaattgtacagaggcaacatggtaagtggaaggagcactaatttgacctagtcttgaatcctaggtctgtcactctgtagcatgactttgagcaaattcttaacttgccagagcagctttatattctgtaaagtagtagttgtaaatattaaatgagataaagtttgtaatgtatctgtacatagtagactcccaataaaaattaataaattcaaaagcatttgccatctgttatgttcacaagactttgctatgtttgcactatggtgaatataaaaacacatggcataaagcggtttataatctcaagaaactttcaacctttggggggagattaaacatacatatatgaaaacaattagagaaaaaaattacaaaatttactggagcactaagttgtgttgtaaagatagtaaaagcagtaattagaaaggagaaagatccttactggcttaaattttatgaaaggggtggtcctgagaaaagcatttaggaattggtatacagagtaataactaatatgtttggagagttttaaggtttatgaggaattttcacaagcatttgatcattcaacattcaaaatcacaagctttttagcccaattttagagataaagaaatagaaccagagagcctttgttaaagagcagagttagaactcaaaccacaattattgactattaaatttatgttagtgtgataccaatattttatattttccatgcattttcataattgttttttcatttatcagaggaaatagtcctgtgagtagctgaagtcagagagattaaatgactcatccaagttccctcagctaattatttggaaaagcagtactaatatatgcctgaatgtctagtgtgttcatcccattgttctacataccacattgttttaatttccagatggagagaaaggaaagaaaaagggagcaacatgggatttgaatgggttctgaggtacacacgcatcattacagagaaaaactctcaactttttaggactgcattaatccttggccatataactagaaacaattattcacctgccttatactgagggtggcctatatgaatggggcaactgaattgccacatttatattattggtgctgtgttttgcctcatgattcacatttgtgctgacttttggaattactttctttttaaaaaaatatttatttatttattttgaaacagttttactctgtcacccaggctggggtgcagtagtgtgatcttggttcacactgcaacctccacctcccaggttcaggtgattctcctccctcagcctccctagtagctgggactacaggcatatgccaccatgcccagctaatttttgtattatttttagcagagatgggatttcactatgttggccaggctggtcttgaactcctgacctcaagtgatctgcctgcctcggcctcccaaagtgttgggattataggcataagccactgccctggccatggaattattttcttacggctgaaaattaagcaagacattttgattcatgtgactgtggagggttctattatctagctaattctggtctaaacacagattagtacttaagaactgtaggccagcctattttcatttaaggaaacacacagaataaactcagatcataatacagtgcacttctttatattcagtgaaactgaacaattaggtcatatttctgatttctcatgaatatattcccagtttatggagcctaggccttgctgggtgtggtggtatggctcacacctgtaatccccactctcaggaggctgaggtgggaggatggcttgagcacaggagttggaagccagcctgggcaacatagtgaggccctgtctctaaaaaagtaaataaatgatacaagtttaaaaagttcttaagggaagcctaggccttcatgctacatgatgatttcactagttattttagctctacaggataaaatcagcaatcttacttcacattttcaagcttttacatactttccaaagcaagtaaatgccccatgacaatccagaagctgatattttcccaagtcaaggatgaacaacttccactgtcacactttctctaacctggacgacaattacaaactgtcacacttcattgtacatagtctttggctgttttagttacagaggttgtcaatttctgaccatgggttgaaactttcaatatttggtgaatattccaaaataatttcttatgaaaatgaataggccgggtgcagtggctcacgcctgtaatcccaacactttgggaggccgaggagggcggatcacgaggacaggagttcgagatcagcttgcccaacatagtgaaaccccgtctctactaaaaatacaaaaaaaacttagccgggcttggtggcgggagcctgtaatcccagctactatggaggctgaggcaggagaatcgcttgaacccagaaagcggaggtcgcagcgagccgagatcgcgccactgcactccagcccgggccacagtgcgagactccgtctcaaaataataaataaataaataaataaataaataaataaaaatagactgactatattcaaagctggattcaagttttatcccatttgtaagatgtctcagcttaaaaaaacaaatataactgcagcagtagaaaggttttcccttttttccccctttggagcaaccctattaactcgaggttgttatttctcataactaccttatcaattaaaaaaaatgctcctcctcttctctggaacgagatttttacctttctcagcttcctcgtctctcccatgtctaccatggcagtctggttacttctgtgttacggagtctgaggatgcagacgtcagggagcttgggactgggtgtgacagtgtggattcggttttgacaggttgagcgtgagagactatatgaagctgtattttgctgaaacattgtagagaaaaacatatatttctgaaatgctgtttgttagacgagttgtaacagtgtgtttagttggtttgtgagggtggtgtgtatttgtgtgactaaccacgtgaggtgcacaatctggtccccgcctcagctagggggaggcgctatcctgaggcctttgcttaaatccaaactggaataacctgttgcgagacttgaagcttccgcagctgcaggttgcagtctctgccgccagcgcagagatcctggccgggtagtcgcgcgctcagcgcttgacaggagggtggtcacgtggagccgcaaagcggcgctttgcgacctcgatgacaggcaaaatgtgcgacagccgtggcgctggccaaccaggggcggaggcggcggccagggaggaagcggaggaggcggaggcggccgcggcgttcgcccgcccgctcgctcgctcggtttccccgcccccgccgggcttaacgccgctgaaggtatccgggtgcgcgctgtcgcaacctgccctcatcctggcccgcgactgtaagaccggacccacatccagaccaatcttcctgtccgggctgctgcgacgcgggctccgcaggttgcaggcgggcggccggggcgcctgaaggttaccgagtgcatgagcgcctagcgcttcccgcgctgccccgcccgctggcccgccgacccgcccgccggctcgcccgccagcccctcggcgcccggcggcggcggcggcggtggcggcgacggtcgcaggaggtgccgtctgcctcccaggtgcgcgcttcgctcccggagccgcggaactcggcggccgccatggcgtccaacatggaccgggagatgatcctggcggattttcaggtgaagtatctggccctcttcccctcccacttccaacctcgtgggtttccggtgccacaagggagtcttcttcccagcgtttgaacgctgcagtggtgtgtcatttaggcttttatacggtgcgtggcgtgtgtgtgtgtgtgtggcgagctatggagaagcgtataatttatatgctatcatgagtgtgtagaatgtgttaagtacgggttgaatgggattggaggtattaatgacttgggttacaatgtgtgtggaatgtgtagtgtttcctgtattatatggggggacgtgtagagtttttgttttaattggtgttggaccattaagtatgggatgttttgggtggttctgtggggagagatgtatggagtgtgagcgtggagcgtgtggtgttatgggcgtggtgtatttatattgtattaagggaagagtaaaaaagcagaatgatgagatggcgagggcaatgacaatggggtactgaggtccttttcaaagaggagtaaacatttgagactttgcctaattggaatctttggagggtaagaagataacaaggagacagataagactatatattccagagtatctctgcaatgaattcacaagcttaataaattacctattcatatttgcggattcccctcccctacagacttgaattgcttggttggtgtcctttctccaggaata

SEQ ID NO: 1512 - DNA, 6000 bp, Homo sapiens
agttaaatacagatctttttctagaatctccatgttcttttaaaagaaacttttatatcatctttatttccaatataaataataaatattatttatattttactaaatttttatttgaaattattttagaatacttccaaagacagtacagaatgttcctatatgcttttagcccatttttctctaatgttaccatcttatttaacatggtacatctatcaaaactaggaaattaacactgctaaatactactagttaaattctggaggctctatttggatttttacactaatgtccttttcttgttccatggtccaataataccacattacatttagttgtcatgtctcagtagcctcttccaatctgtgacagtttctcagtggacacttctgaagagtcaggaactttataaaatctccctcaatctgggattacctaatgtattctcagaattacactgagatgtgtatcaccgcagaggtgatatgtccttgttacatcatatcaaggccatgtgttatcaacttgagttattactggtagtgataaccttgattctttggttaagataaccaatttcttaaataatacttcttgctcataatgtaattcatgagaaaactaatgctactgcacatatgtatttcatctagtgatttagtgttgtttaggatactagtggcggaccctggactaatggaaaaagtataaggtttggagccccaagaactgaattcaaatcctatgtctagtattcactgactttaaatcacaatttctgccagcctcaattccctcacctgaaatacggggattattatcacagtcacttcacagaattgttgtaaagattaatatatgcattggctgtgtgtggtggctcacacctgtaatcccagcactttgggaggccaaggtgggcggatcatgaggtcaggagttcgagaccagcctgaccaacatggtgaaaccctgtctctactaaagatacaaaaattagccgggcgtggtggtgcgcacctgtaatcccaggtactcgggggctgaggcagaagaattgcttgaacctaggaggcagagattggagtgagctgagatcgcgccactgcactctgcctgggcgacaaagcgagattcagtctcaaaaatatagatagatagatagatagatagatagatagatagatagatatgcatcatattttataaccatgaaacactatacaaatattaattgttgctattatttttcagcttttgggttgcttactgggctttttttccttcttactttaacgaagaactttcaggccgggtgcggtggctcacacctgtaatcctagcactgtgggaggctgagtcgggcagatcatgaggtcaggagatggagaccatcctggccaacgtggtgaaaccccatctctactaaaaatacaaaaattagctgggtgtggtagtgggcgcctgtaatcccagctactcaggaggctgaggcaggagaatggcttgaatttggaggtggaggttgcagtgagccgggatcgcgccactgcactccagcctgatgacagagagagactctgtctcaaaaaaaaaagaactttcagcctggccaatatagtaagaccccatctccacaaaattagaaaaattatccaggcatggtggagcatgcctgtggtcccagcgactccagaggctgaggtaggagggtcacttggacctgggaagtcaaggcttcagtgagccatgatcatgaccaagccactgcactctagcctgggcaacagagtgagaacctgtctcaaaaataaaataaaataaaaataataaaaaattttcataaataagtacctatatgaaaaaaaccactgaatctcagaaataaaatgctgaagctacaattataaagtcacataaaaggctgcctgggggtgcccagtctgttttccacctctgttgatctataaatacaacaaaaaggaaaactttgagaccagttaaataaatggtaaataccacatacacatttccaaaagttaatcattcagaaactgtacctacttgagtcaatgagggaaaagcacagaataatttgactgaatcacatttctattctatgtcaatgagggaaaagcacagaataatttgactgaatcacatttctattctatgtctctttttttttttttttttgagactgctgggccgccactgcctcccaggttcaagcaatcctcctgcctcagcctcctgagcagctgggattacaggcgccagccaccacgcccagctaatttttttttgtatttttagtggagttggggtttaaccatgttggccaggctggtctcgaactcctgacctcaggtgatctgcccacctcagcctcccaaaatgctgggattataggcgtgagccactgcgcccggccacttctatgtctccttaaatgattatgaactgctggagcaaaaggtttccatgactgttaatatttaatatctaactataaaggctatatttcagtatttgatgtacttatcattttgatgttaaaaaggaaagcaccactctcaatatagtagaaacttaactatgaatttttcttgtaagccatgttagaatataagcttattgagggtagagatacccttgaatctgctgtagtgaactagccctcaataaatactagattttcattggagttactgtgtaatacttatgtatgccttctgaactaagaccctaagctctgcactgccaattctggtttacccaacaggcagatgaagcatatgcttcagggcaccagcaaaaccagaatgttaaaaaaaaaaaaaaaacctttgccaaataatttaatatctcagcaaaaccactgaagtagccatcatgggaaaaaaatcagaactttgttggacttttttactgttattttggggttctgttatttttctttttatttctatataaggaagaggtggtagaacatcaaaatcttttcagtgcttagggcctccaaaaatcttaatacaactctgtgtacatcttaaattatcataagttttccttagttgttcagcaataagcattttatttcatgaaaattatagtacgtttacccgtactttatgtaatcatacaatttaagattcttcctctttacaatttatctctaagcaagaaaccataataaatgctagaaggcaatcctcataaattggactaataccagttctcttttatcagccaacagtgctaatatgtcctcacaccctctggctgtatgaaaagattacacagttcccagaataatcaaaagtaaattattatttatttcttactggtataaatggaatcttaaatgtttctatttgaaacgtctacatatatgtaagaaaaagagagttaatttcttgttttgtagttctcatttgattcacaattcaagtttagttacctaagaaaagaactctagtttttttctcaacaattacattaaagaaaacactgccagattcttcccagtttcaactttccctctacctaccaatctcttgctggatgattacccagatatttctggtgtgttttgttgctaatactcccagtgtacttcaagaagggtacagatactgcttgaggatccgcttgccaaaggccggttctaattagacttgtcattttttgcttggtttcattttgaccactgggtgcatcatgcaaccgtgttggatatttttaagagtataaaaatacagaaagcaatagttaattaatctcacatagctaaaagaggaagttaaaagtactggaaattggtgtcggatgattaaataaaggattaggagagagaccattctagacaccctccccaaccccacatccccaaaatccaagccacttctaagtagtgagagaacttcggcaaccaagaaatggctttgttagaaaacacttcacacgacttattttaaattttgctttaaatttaattgcttttctcctttttctctaataataggactatttcgcagtttccagtccttgattaattaaggcttcagagttcgttcttacatatgccatgtcttaagttttcataaaattcagtctacacaagacttgctttttgtgagcactgtgcttagtggcagtccggatttttccctccacccccgcggccacccctgcccaccgcgccgtcgggcatggatctggcaggtgcgaggccgaggccagggctcagcgaaggacgccgagtttacagagcgcgcgcgcctagaggaggcagcagcagccgcagcctggccgcccgaactttgcgagcctggcgggggagcacagaggcgggccgacctgccccgctagcgctgaggaacgactccctttatgccagctcgctgtccgccttcccgcagcgtacgctgcggagcctcaaagaccctgcggccctccacaaccgtcttaaataacaaacccctgtcctcgcccccgtaggaattggggcagctgggggttcgcgtcacagactcaagcccgccagcagaagggcaggccggacttcgcggggccgaaccccgctccagctggggacaggccgcctagccggcaggagggagccggcgcgagagacttgacgggaggaggtggagagcgggaggcgggaatgagggcgcgggaccgggcgggcggagcgtgcgagactgcgagcgcgagcgccagcagggcggagggcggggcgtgggcggcgcccggccttcccgctcccgcggcgctgcaactctgccgagcctccttaaaactctgccgttaaaatgggggcgggtttttcaactcaaaaagcgctcaatttttttcttttcaaaaaaagctgatgaggtcggaaaaaagggagaagaaaccggcaccctctctgagaggcaacagaagcagcaattgtttcagcgaaaaaagcagcaagggagggagtgaaggaaaaaagcaaaaaagggggcgacacgcaagtgcctgtaggggtgaaaggagcagggaccggcgatctagggggggatcagctacaaaagaaactgtcactgggagcggtgcggccaaggaggaagcagtgctgccaggctctgctccagggcacagctggctggcggctgccctgtccgcagcaaaggggcacaggccggggaccgcgagaggtggcaaagtggcaccgggcgccgaggctgctgagcgctcgccgagacggcgaccggactggctgccccggaactgcggcgactctccctactcagaacttggcctacgtttcccaggactctccccatctccagaggcccccacaaaaccgggaaaggaaggaaaggacagcggcggcagcagctcaatgagtgcctacagcagaaagcctgaacgagctcggtcgtaggcgggaagttcccgggggggctgcccagtgcagccgcaatgctgccgcgagctgccccagcagtccgggctccgtagacgctttccgcatcactctccttcctcgggctgccgggagtcccgggacctggcggggccggcatgacgggcttctcgggggcccgccgcacgcccggcagcctccggagacgcgcgccgagcccggctcccacggcctctgaggctcggcggggctgcggctgcctggcgggcgggctccggagctttcctgagcggcattagcccacggcttggcccggacgcgaccaaaggctcttctggagaagcccagagcactgggcaatcgttacgacctgtaacttgagggccaccgaactgctactcccgttcgcctttggcgatcatcttttaaccctccggagcacgtcagcatccagccaccgcggcgctctcccagcagcggaggacccaggactatcccttcggcgagacggatggaaaccgagccccctggaggacctgcccctgcagttctgcctcacacggctcaagtcaccaccgtgaacaagggtgggt

SEQ ID NO: 1513 - DNA, 6000 bp, Homo sapiens
gggggctgaggcagaagaattgcttgaacctaggaggcagagattggagtgagctgagatcgcgccactgcactctgcctgggcgacaaagcgagattcagtctcaaaaatatagatagatagatagatagatagatagatagatagatagatatgcatcatattttataaccatgaaacactatacaaatattaattgttgctattatttttcagcttttgggttgcttactgggctttttttccttcttactttaacgaagaactttcaggccgggtgcggtggctcacacctgtaatcctagcactgtgggaggctgagtcgggcagatcatgaggtcaggagatggagaccatcctggccaacgtggtgaaaccccatctctactaaaaatacaaaaattagctgggtgtggtagtgggcgcctgtaatcccagctactcaggaggctgaggcaggagaatggcttgaatttggaggtggaggttgcagtgagccgggatcgcgccactgcactccagcctgatgacagagagagactctgtctcaaaaaaaaaagaactttcagcctggccaatatagtaagaccccatctccacaaaattagaaaaattatccaggcatggtggagcatgcctgtggtcccagcgactccagaggctgaggtaggagggtcacttggacctgggaagtcaaggcttcagtgagccatgatcatgaccaagccactgcactctagcctgggcaacagagtgagaacctgtctcaaaaataaaataaaataaaaataataaaaaattttcataaataagtacctatatgaaaaaaaccactgaatctcagaaataaaatgctgaagctacaattataaagtcacataaaaggctgcctgggggtgcccagtctgttttccacctctgttgatctataaatacaacaaaaaggaaaactttgagaccagttaaataaatggtaaataccacatacacatttccaaaagttaatcattcagaaactgtacctacttgagtcaatgagggaaaagcacagaataatttgactgaatcacatttctattctatgtcaatgagggaaaagcacagaataatttgactgaatcacatttctattctatgtctctttttttttttttttttgagactgctgggccgccactgcctcccaggttcaagcaatcctcctgcctcagcctcctgagcagctgggattacaggcgccagccaccacgcccagctaatttttttttgtatttttagtggagttggggtttaaccatgttggccaggctggtctcgaactcctgacctcaggtgatctgcccacctcagcctcccaaaatgctgggattataggcgtgagccactgcgcccggccacttctatgtctccttaaatgattatgaactgctggagcaaaaggtttccatgactgttaatatttaatatctaactataaaggctatatttcagtatttgatgtacttatcattttgatgttaaaaaggaaagcaccactctcaatatagtagaaacttaactatgaatttttcttgtaagccatgttagaatataagcttattgagggtagagatacccttgaatctgctgtagtgaactagccctcaataaatactagattttcattggagttactgtgtaatacttatgtatgccttctgaactaagaccctaagctctgcactgccaattctggtttacccaacaggcagatgaagcatatgcttcagggcaccagcaaaaccagaatgttaaaaaaaaaaaaaaaacctttgccaaataatttaatatctcagcaaaaccactgaagtagccatcatgggaaaaaaatcagaactttgttggacttttttactgttattttggggttctgttatttttctttttatttctatataaggaagaggtggtagaacatcaaaatcttttcagtgcttagggcctccaaaaatcttaatacaactctgtgtacatcttaaattatcataagttttccttagttgttcagcaataagcattttatttcatgaaaattatagtacgtttacccgtactttatgtaatcatacaatttaagattcttcctctttacaatttatctctaagcaagaaaccataataaatgctagaaggcaatcctcataaattggactaataccagttctcttttatcagccaacagtgctaatatgtcctcacaccctctggctgtatgaaaagattacacagttcccagaataatcaaaagtaaattattatttatttcttactggtataaatggaatcttaaatgtttctatttgaaacgtctacatatatgtaagaaaaagagagttaatttcttgttttgtagttctcatttgattcacaattcaagtttagttacctaagaaaagaactctagtttttttctcaacaattacattaaagaaaacactgccagattcttcccagtttcaactttccctctacctaccaatctcttgctggatgattacccagatatttctggtgtgttttgttgctaatactcccagtgtacttcaagaagggtacagatactgcttgaggatccgcttgccaaaggccggttctaattagacttgtcattttttgcttggtttcattttgaccactgggtgcatcatgcaaccgtgttggatatttttaagagtataaaaatacagaaagcaatagttaattaatctcacatagctaaaagaggaagttaaaagtactggaaattggtgtcggatgattaaataaaggattaggagagagaccattctagacaccctccccaaccccacatccccaaaatccaagccacttctaagtagtgagagaacttcggcaaccaagaaatggctttgttagaaaacacttcacacgacttattttaaattttgctttaaatttaattgcttttctcctttttctctaataataggactatttcgcagtttccagtccttgattaattaaggcttcagagttcgttcttacatatgccatgtcttaagttttcataaaattcagtctacacaagacttgctttttgtgagcactgtgcttagtggcagtccggatttttccctccacccccgcggccacccctgcccaccgcgccgtcgggcatggatctggcaggtgcgaggccgaggccagggctcagcgaaggacgccgagtttacagagcgcgcgcgcctagaggaggcagcagcagccgcagcctggccgcccgaactttgcgagcctggcgggggagcacagaggcgggccgacctgccccgctagcgctgaggaacgactccctttatgccagctcgctgtccgccttcccgcagcgtacgctgcggagcctcaaagaccctgcggccctccacaaccgtcttaaataacaaacccctgtcctcgcccccgtaggaattggggcagctgggggttcgcgtcacagactcaagcccgccagcagaagggcaggccggacttcgcggggccgaaccccgctccagctggggacaggccgcctagccggcaggagggagccggcgcgagagacttgacgggaggaggtggagagcgggaggcgggaatgagggcgcgggaccgggcgggcggagcgtgcgagactgcgagcgcgagcgccagcagggcggagggcggggcgtgggcggcgcccggccttcccgctcccgcggcgctgcaactctgccgagcctccttaaaactctgccgttaaaatgggggcgggtttttcaactcaaaaagcgctcaatttttttcttttcaaaaaaagctgatgaggtcggaaaaaagggagaagaaaccggcaccctctctgagaggcaacagaagcagcaattgtttcagcgaaaaaagcagcaagggagggagtgaaggaaaaaagcaaaaaagggggcgacacgcaagtgcctgtaggggtgaaaggagcagggaccggcgatctagggggggatcagctacaaaagaaactgtcactgggagcggtgcggccaaggaggaagcagtgctgccaggctctgctccagggcacagctggctggcggctgccctgtccgcagcaaaggggcacaggccggggaccgcgagaggtggcaaagtggcaccgggcgccgaggctgctgagcgctcgccgagacggcgaccggactggctgccccggaactgcggcgactctccctactcagaacttggcctacgtttcccaggactctccccatctccagaggcccccacaaaaccgggaaaggaaggaaaggacagcggcggcagcagctcaatgagtgcctacagcagaaagcctgaacgagctcggtcgtaggcgggaagttcccgggggggctgcccagtgcagccgcaatgctgccgcgagctgccccagcagtccgggctccgtagacgctttccgcatcactctccttcctcgggctgccgggagtcccgggacctggcggggccggcatgacgggcttctcgggggcccgccgcacgcccggcagcctccggagacgcgcgccgagcccggctcccacggcctctgaggctcggcggggctgcggctgcctggcgggcgggctccggagctttcctgagcggcattagcccacggcttggcccggacgcgaccaaaggctcttctggagaagcccagagcactgggcaatcgttacgacctgtaacttgagggccaccgaactgctactcccgttcgcctttggcgatcatcttttaaccctccggagcacgtcagcatccagccaccgcggcgctctcccagcagcggaggacccaggactatcccttcggcgagacggatggaaaccgagccccctggaggacctgcccctgcagttctgcctcacacggctcaagtcaccaccgtgaacaagggtgggtgaatgccttttcttccccctgaatgtctttccttccgcggtattttctgccccgatctatagtcccttgagtctccacacacactcctcacagagatctgtagcgtaggtacgtgacagctctgcctacatctgacgtccggagtcattaaccaggaatgtatgtgtgtctgtgtgtctctctgtggagtcgtcagaattcttcataggggttaagctaaaaaagcgaggcgaggagcccctctccaatggctcagttttgctgaataatcacgtgtgaatcgaggggcgggcttttggcaggcagatcttactagtatttactaccaagctctactccagattaaccatcccagtccttctgtcagtctccgatgccatcatgcagcctggttaggagcaaaggaaaggggaaaaagaaaaacgactaattcatcttttcctgatcgtcaggaccctaaagaatggccgagccttgggggaacgagttggcgtccgcagctgccaggggggacctagagcaacttactagtttgttgcaaaataatgtaaacgtcaatgcacaaaatggatttggaaggactgcgctgcaggttggtattaagagaggtggggaaaacaagtcaataatgttgcctacgtgacccgggtttctagatttacagcttttaagctttcagggacataaaatttcactgtttttaaacctagttggttgccatattttatatctttaagtggatgcaacttctcaaaatgacgtactttgaacaaactcctcaaatccaataacatccttgatatcaagtggggtccagatttggtcttagtttttggaatgtttttgtgacggtggggattttaaagtagtcagtgtagggccgaggtttgtttgttttgttttgtttttaaagacagctctgtaaacacattattatgattattatttgaagtaaatacactgctattagtggttttacgtactttgcccccaataatagactttaacgttaattttcttgactactgatgagggtgtttt

SEQ ID NO: 1514 - DNA, 6000 bp, Homo sapiens
gtgggcatgtgtaggtcttccaaaggtaaccaaggaaacaataaaagccaggctatttattgagatcctgttgcatgccagacattggcaaaggcgcaggatctaacagaagaaaacaggcaggtccctgacttcatgggagtggtccggcagctccagaggagtgagggaaagggtcactcagccttcagtgcttacacacatggctgctttggggagtcaccgtgccccctagtctgatgtggaccctttcatgagctgccccagcctctgtttgtccccactcttcccacactcatccagtggcctgtgtcttccacacctgcggttgtgggtgtcttaaggacagagaccatgtctcagttatcttggttccccagcacccagcatagaacctggttcctgacctcggaggccccttggaactgttttttttttttttttggagacggagtctcactctgtcgcccacactggagtgcagtggcacaatctcggctcactgcaagctccgcctcctgggttcacgccattctcctgcctcagcctcctgagtagctgggactacaggcgcccgccaccatgcccggctaattttttgtatttttagtagaaacggggtttcaccgtgttagccaggatagtctcgatctcctgacctcatgatccatctgcctcggcctcccaaagtgctgggattacaggcatgagccaccgtgcctggccagaactgtttaatgaatggaggagcagccttggcttcaagggctcccagagctgtgagaatcgggcatcagtggacactggggaccctcaggaacatggtaggactcaagcagggaggaggattgtgacccaggggccaaagtcttctctgttggaggtgggcagagctggagggaagagggggccatcgtcaggaggcagcagtgctgagtgaggaagctcccgcctcgtggcagtctgaggcgtggaagagaacagcttctgcgcaggagggtttccagggagaccgaattgggggagccaggcgggtggtcaggctgtgagcaagggatgctgcaaaccagtgggctccttgtcgaacctgagccagactgcacccaccccatgagcgctgtctctggctgtgtgcccctagggagactgcttaaattctctaagaatcactatgctcattcaacagcattcgtttctcaaacatttatggaatgccagctctattccagccagatctcaacagctagatcaggaatgatagctagctcattattgcactccaggcatggggttgagtgccttccacttggtattaatatctcattatcctcacaaggcccattttacagataaggaaactgagctcaaagaagttaagtaactagcccggggtcatcactactggcgaatgccagagctgagaagcaaacctagattggactggtaaagtcctaggtcccatcacaccccctccaaagaggggaattggactcaggcgtgcttctgtcaagcacagaatgggacctggcccctggccccttgcacttggagacattcaacccttgttggtttttttctctccaaccctaatctttgttttccaggacattatcccctttggcaacaaccccatcttccgctacctctttggctggatggtgcctcccaagatctccctcctgaagctgacccagggtgagaccctgcgcaagctgtacgagcagcaccacgtggtgcaggacatgctggtgcccatgaagtgcctgcagcaggccctgcacaccttccaaaacgacatccacgtgagtggggcagggcagggagggcgcaccaggtgcattcccttggaatccatggtctcctcccctgaaccgtgtgaccgaccttgggcacactgccctctgggtgttttcccaactttaagatgaggtccttgtccctatgtctgctgaggcctcaacccactcagtgatggcccccctgggagaggagtcatagggtctggcatcgagcactcccatgacctgctccgattgtgtcctccaaggtggtggagtcagggtgttctcagccagggctggggggcggggcagtgaagctgagagcacctgagggggtcttgagaatgctgcaaagccttcatttgggtgggtatgagcgggccagccatgagcctgtcacctgttggagaaaaagcaccaatacccacctccctggtctacccaggtctaccccatctggctgtgtccgttcatcctgcccagccagccaggcctagtgcaccccaaaggaaatgaggcagagctctacatcgacattggagcatatggggagccgcgtgtgaaacactttgaagccaggtcctgcatgaggcagctggagaagtttgtccgcagcgtgcatgggtgagtggcccagagtatagtatgttgcctctagctgacagccccagggtactgctccaggggaatgaggccagctctatggagaaccaggagccccaagcctatcaactggttccttagggcccctgcagctgtggcagcctctgggtcaggaggtaagctgtgaaagatgggcagggggtgggcttgcaggactacttgccctcttctccctgcaccccctcctccagtgaacatgtcacacccccccagcagccccagccagaaacctgggagtcaccccactcctccccacggaacagatgatgggtgtgggcttagctgggtccaggggcaactgctccagatggaaaggccaaagctaaggagagagggattcctgtctatgaaaaccacggagaggcccaggacagaggattgctcagaaaacagcctggataaactattgagtggaacatggacaaagccaggaaaaaacaatgccatatgattcctttcatataaaattcccaaaaacacacatgaatccatactgatagcgcatcagtagttgcctggggatggcagagggcaacggataactaaggggcatggggaaagtttggggctgatggttatagccacgatctggactgcagtgattggagtccttggttgcatgcatgtgtcaagcttatccaattgtgtactttaaattatgtctagtttattgaaagtcaataacagattaaaggaaaacaaccccactgctccattagggaaggcagctgtgcctctggccaagcagaggggcagaagcccagcagtctgagctctactcctgactctacctccactgctaagctacctaacccccaagccccaattccctacctgcaaaagggggataagaatacctgcaccatcttcttcaccaggttaacggggttaaacaagagaaatcctccaaaagccttttctgggctgcagaatgagcagttgggtttctctcacgcctcgcgttccgtgtgcctcctggcgtcctcacccacttctctgcctctgcagcttccagatgctgtatgccgactgctacatgaaccgggaggagttctgggagatgtttgatggctccttgtaccacaagctgcgagagaagctgggttgccaggacgccttccccgaggtgtacgacaagatctgcaaggccgccaggcactgagctggagcccgcctggagagacagacacgtgtgagtggtcaggcatcttcccttcactcaagcttggctgctttcctagatccacactttcaaagagaaacccctccagaactcccaccctgacagcccaacaccaccttcctcctggcttccagggggcagcccagtggaatggaaagaatgtgggatttggagtcagacaagcctgagtccagttccccgtttagaactcattagctgtgtgactctgggtgagtcccttaacccctctgagcccgggtctcttcattagttgaaagggatagtaatacctacttgcaggttgttgtcatctgagttgagcactggtcacattgaaggtgctgggtaagtggtagctcttgttgcttcccgttcagcgtcacatctgcagtggagcctgaaaaggctccacattaggtcacctgtgcacagccatggctggaatgatgaaggggatacgctggagttgccctgccatcgcctccatcagccagacgaggtcctcacaggagaaggacagctcttccccaccctgggatctcaggagggcagccacggagtggggaggccccagatgcgctgtgccaaagccaggtccgaggccaaagttctccctgccatccttggtgccgtcctgccccttcctccttcatgcctgggcctgcaggcccaccccagccaccactgagtccactcggagtgccctgtgttcctggagaaggcattccagggttgaatcttgtcccagcctcagcctgggacacctaggtggagagagtggtctccgctctgaattggatccaggggacctgggctcattcttcttggctcaccaaccctgcaggcctcatctttcccaaaacccactttgtcttggtgggagtgggtccgcgctgctctgcagcaggggctggggagtggacagcatcaggtgggaaagtggagtccaccctcatgtttctgtaggattctcaccgtggggctggaagaaaagagcatcgacttgatttctccaaccactcatccctctttttctttcttccaccactccccaccccagctgtagttaatttcagtgccttacaaatcctaagctcagagaaagttccatttccgttccagagggaagggaacctccctaggtccttccctggcttgttataacgcaaagcttggttgtttatgcaactctatcttaagaactgcccagcctcagctgaaaacccgaatctgagaaggaattgcgtcatgtaagggaagctggaattaagggagctgagccagtcatggttgtggcgtgtgagtcaggagacctaggtttcagcccctctctactgtcagcgagctgtgcaacgtgggcaagtcattgtcctctgagctgcagtttcctcatctgtcacatcgctacagacaagacctccctggaacccttctgattgtcttagacactgtggttgcaaaacccacggaaagcctcatttgtgtggaaagtcagaggaaaaatgatccagtggacacttggggattatctgtcattcaagatccttccttcaaccccaaggtcagctcccatctcatttccagaaaggctcatacctggcttgcagggaagcatctgtcttgtcattccaggtgccagaatcctctcagagtcattgaagggtgttcacccatcccacccaaggcttggcacactgccagtgtcttagcagggtcttgtgagggctgggggcatccaggcactcagaaggcaaaggaaccaccctacccatttggcctctggagggggcagaagaaagaaataaacctcatcctatattttacaaagcatgtgaattctggcattagctctcataggagacccatgtgcttccttgctcagtgcaaaactgatgattctacttgctgtagatgaatggttaacacgagctagttaaacagtgccattgttttgccagtgaagcctccaaccctaagccactgggacggtggccagagatgccagcagcctctgtcgcccttagtcatataaccaaaatccagaccttatccacaacccggggcttggaaaggaaggtattttggaatcacaccctccggttatgttgctccagtaaaatcttgcctggaaagaggcagtcttcttagcatggtgagctgagttcatggcttttttttgtagccagtcctgtccctggccatccatgtgatggttttggatggagttaaacttgatgccagtgggcagtgcatgtggaaagtatcagagtaaggctctcccctccagagccctgagtttcttggctgcatgaaggttttctttagaatcagaattgtagccagtttctttggccagaaggatgaatacttgga

SEQ ID NO: 1515 - DNA, 6000 bp, Homo sapiens
tgtgctgatctgtcattgtgtggtagtagggaagtgggactgggaagagggagaagtcaagctgtggtgcagtcacaaggaagacctcagctaacccacaggcagccctggggtaagatggccctccagagttgtgtcacctttaggccagtgggctaggactttataccaaatgctgccccatcaaccagtcattgtgcagactgaccttggatgaggcagctcccttctgccaagggcagttctccctgagtgtcagcagtcagcaccctgtgcagctgggggaacgggtgcctccctggagcgggcatctgcgcgcagcatcctctacagtagaaatgcagaagacaagacatttctagaggggaggaataaacaatttcaaatgcatgccttttccccccctctgctgggataactcttctcctcccattggcggcctttcccccaggttcctccctgatgagtaaggccctggaatgaaccaagtgtgaccaggcctgcgtgctaagccccttaacaagctgcattctgggtgattagtccattctggtcacacctgtgccaggcctggctggtccagtcacttcccttcccccagcttggtcaatcagcaacacgcggggtcagggttagctgcataatttgtagggccaggtgcaaaaagcaggccagaagtgccattaaaggtactaaatataaagcttttttctttctccatggtctgtctcttgtcataaatatttgcaacttaatgccattctaagtgaagaaaaatttaaattattagtatgaattttactgttcactgtttaaatgttacatttaactcctcatgtatatgtatttcttggtttcattaagaatgctgcataaactctttttacttctctttgttacatgcacattctaccaacactacctttgacttacggtaaggaaggactgaaagaaaaggagccaagctgggcagctctgtcttgtcattcctttttatgtcatcattttagtataagcggttggctaacacagggagttaacaccagtaagaaaggataagatagggtccttgtgttcatagaaggccattgccccaggacttcctgctggggctggggttcctggctcaggctgggccccttagatttgccatggggccctacagccagtgagcaaggatggccagagaacaagggctgcagtgagattctctgcaatgactggcctcagcaagggggcagcttaggaccctgacatcccaggtcactaagccacataggataagtaatgggtggacagaagcgggaaaggagaagggcagggcacatgtttaaaacttgaactttctgaggctaagactggaaaaggaatggtttcagctgatatatttggataccagttgactatttttaggaaaaaaacacaaatggcttttaaacatcacagtgtgatacagtctaactcagaattagagacaggcaaaacagaactccaggagtctcatttttcacctatcagaatgaatgacagtgatctagaagtttgatgtcacattgtgctggcaagggagaagggaaacagtgttctacattgtctgggagagtataaaatggtacaagctctgaaatggtatccatgaaaattgcacacactgtttaagccaaaatcttccacttctaggaatttatctttctgacacatatataaatgggcaaagataacatatacgaagtatattagttggaataatctggaaataatctaaatgtctgccagtatagaagtgattaaataaattatgacacatctgctgtaatcgagcaggggtcaataacctttgtttttttttttgagacggagtctccctgagtcatccaggctggagtgcaatggtgcaatcttggctcactgcaacctccgcctctccgcttcaaacgattctccttgcctccgcctcctgagtagctgggattacacgcacccgccaccacgcccggctaattttttttggtgtttttagtagagacagggttttgccatgttggccaggctagtcttgaactactgacctcaagtgatctgcccgctcagcctcccaaagcgctgggattacaggcatgagccaccgcacccgatccaataagcattttatacaatgggccagatagtatacagtctaggtttttcggaccataaggcctctctagtaactgctcctctgccttgtagcctggaggcagccatggacaatttgtaaaggaacacacaaccagagggtgggccgaatttgtggacccctgcagcacacattagacacccacaaccgaaggcagtagtgccctctgtattgatacaggatacagtgatgagccagtggtgctaagatgccaccatttatgaggtttttttgctttctgttttttcaaagctcctctgcttctccgtatcagatgtcccccaaagggtaggcaaatcattcttaccaatgcttgccattagggagggggaggagagttgagggtgggtggggagccaggtcaggtcattgctgggagggaaacagggtcaggaatgcgcagggaggcttaacttttgtactatggggatttctgctgtgggcatgtgtaggtcttccaaaggtaaccaaggaaacaataaaagccaggctatttattgagatcctgttgcatgccagacattggcaaaggcgcaggatctaacagaagaaaacaggcaggtccctgacttcatgggagtggtccggcagctccagaggagtgagggaaagggtcactcagccttcagtgcttacacacatggctgctttggggagtcaccgtgccccctagtctgatgtggaccctttcatgagctgccccagcctctgtttgtccccactcttcccacactcatccagtggcctgtgtcttccacacctgcggttgtgggtgtcttaaggacagagaccatgtctcagttatcttggttccccagcacccagcatagaacctggttcctgacctcggaggccccttggaactgttttttttttttttttggagacggagtctcactctgtcgcccacactggagtgcagtggcacaatctcggctcactgcaagctccgcctcctgggttcacgccattctcctgcctcagcctcctgagtagctgggactacaggcgcccgccaccatgcccggctaattttttgtatttttagtagaaacggggtttcaccgtgttagccaggatagtctcgatctcctgacctcatgatccatctgcctcggcctcccaaagtgctgggattacaggcatgagccaccgtgcctggccagaactgtttaatgaatggaggagcagccttggcttcaagggctcccagagctgtgagaatcgggcatcagtggacactggggaccctcaggaacatggtaggactcaagcagggaggaggattgtgacccaggggccaaagtcttctctgttggaggtgggcagagctggagggaagagggggccatcgtcaggaggcagcagtgctgagtgaggaagctcccgcctcgtggcagtctgaggcgtggaagagaacagcttctgcgcaggagggtttccagggagaccgaattgggggagccaggcgggtggtcaggctgtgagcaagggatgctgcaaaccagtgggctccttgtcgaacctgagccagactgcacccaccccatgagcgctgtctctggctgtgtgcccctagggagactgcttaaattctctaagaatcactatgctcattcaacagcattcgtttctcaaacatttatggaatgccagctctattccagccagatctcaacagctagatcaggaatgatagctagctcattattgcactccaggcatggggttgagtgccttccacttggtattaatatctcattatcctcacaaggcccattttacagataaggaaactgagctcaaagaagttaagtaactagcccggggtcatcactactggcgaatgccagagctgagaagcaaacctagattggactggtaaagtcctaggtcccatcacaccccctccaaagaggggaattggactcaggcgtgcttctgtcaagcacagaatgggacctggcccctggccccttgcacttggagacattcaacccttgttggtttttttctctccaaccctaatctttgttttccaggacattatcccctttggcaacaaccccatcttccgctacctctttggctggatggtgcctcccaagatctccctcctgaagctgacccagggtgagaccctgcgcaagctgtacgagcagcaccacgtggtgcaggacatgctggtgcccatgaagtgcctgcagcaggccctgcacaccttccaaaacgacatccacgtgagtggggcagggcagggagggcgcaccaggtgcattcccttggaatccatggtctcctcccctgaaccgtgtgaccgaccttgggcacactgccctctgggtgttttcccaactttaagatgaggtccttgtccctatgtctgctgaggcctcaacccactcagtgatggcccccctgggagaggagtcatagggtctggcatcgagcactcccatgacctgctccgattgtgtcctccaaggtggtggagtcagggtgttctcagccagggctggggggcggggcagtgaagctgagagcacctgagggggtcttgagaatgctgcaaagccttcatttgggtgggtatgagcgggccagccatgagcctgtcacctgttggagaaaaagcaccaatacccacctccctggtctacccaggtctaccccatctggctgtgtccgttcatcctgcccagccagccaggcctagtgcaccccaaaggaaatgaggcagagctctacatcgacattggagcatatggggagccgcgtgtgaaacactttgaagccaggtcctgcatgaggcagctggagaagtttgtccgcagcgtgcatgggtgagtggcccagagtatagtatgttgcctctagctgacagccccagggtactgctccaggggaatgaggccagctctatggagaaccaggagccccaagcctatcaactggttccttagggcccctgcagctgtggcagcctctgggtcaggaggtaagctgtgaaagatgggcagggggtgggcttgcaggactacttgccctcttctccctgcaccccctcctccagtgaacatgtcacacccccccagcagccccagccagaaacctgggagtcaccccactcctccccacggaacagatgatgggtgtgggcttagctgggtccaggggcaactgctccagatggaaaggccaaagctaaggagagagggattcctgtctatgaaaaccacggagaggcccaggacagaggattgctcagaaaacagcctggataaactattgagtggaacatggacaaagccaggaaaaaacaatgccatatgattcctttcatataaaattcccaaaaacacacatgaatccatactgatagcgcatcagtagttgcctggggatggcagagggcaacggataactaaggggcatggggaaagtttggggctgatggttatagccacgatctggactgcagtgattggagtccttggttgcatgcatgtgtcaagcttatccaattgtgtactttaaattatgtctagtttattgaaagtcaataacagattaaaggaaaacaaccccactgctccattagggaaggcagctgtgcctctggccaagcagaggggcagaagcccagcagtctgagctctactcctgactctacctccactgctaagctacctaacccccaagccccaattccctacctgcaaaagggggataagaatacctgcaccatcttcttcaccaggttaacggggttaaacaagagaaatcctccaaaagccttttctgggctgcagaatgagcagttg

SEQ ID NO: 1516 - DNA, 6000 bp, Homo sapiens
ggatttttttgaaagtttttaaattataaaagtaatgtaacaatgctgaaatatataaagaaaaagttaaagtgcatctctttacgccagggtgtaaccacttacgtataacagttttgtgtgcattcttcgagacctatttatttttatttatttattttcttattgtttttttttttgagacagggtctctgtagcccagactggagtacagtggtacgatcacagctcactgtagccttgaactccagggctcaagcaatcctcctgccttagcctcctaagtagctgggactacaggcgtgtgccaccatgtccagttaaaaattttttttttttttttgagatggagtctcactccgtcgctcaggctggagtgcagcgcgtgatctcagctcactgcaacctctgtctcccaggttcacacgattctcatgcctcagcctcgtaagtagctgggattacaggcatgcaccaccatgcctgcctaatttttgtatttttagtagaaatggagttcaccgtgttggctaggctggtctcgaactcctgacctcaggtgatctgcctgccttggcctcccaagccaagtgctgggattacaggtgcgagccactgtgcccggcctggttaattttttaatttttaaaatttttttgtagggatggggtcttgctatgttgccaaggctagtcttgaactcctggcctcaagcagtcttcccacctcagcctcccaaagtactgggattacaggtgtgagccaccacacccagccgagacctatttctctgtgtgtgtgtgtgtgtatatgtatgtgtgcatgtcttcatttcattctgtaatatcccatttttgcatgtaaataattggcctaatttagcccttactgacatttatgttgcataaactgttttgctcttacaaataagattgcattgaagatttaagactcacatttatcctgtccttctgtacaaatatttgtgtaggattgagtcagaaaaatggactttgttacacaaaggtttgagcacattaaatattaatagatatgaccaaacagccctcgagaagagctgtgtttatgcctacttgtagtaatggtctgtgagaacacctttttccctacattcttgccaacactaaataggatcactctttcatttttgccaatctgatagcgttaaaaatagtatctcgttttattttgcagttcttggatcacttgtgagggtgagcctctctttgcagcattttgcagtttgtttgtcttcagcagtgatcacttggttcacatttgtcttttcttgtttattgttttttgttttgagacaaggtctcactctgtcacccagactggagtgcaatggtgcgatcttggctcactgcaacctccacctcccaggctcaagcaattctcctgtctcagcctcccgagtagctgggaatacaggcgcatgccactgcacctggctgattttggtatttttagtagagacggggtttcgccatgttgcccaggttggtcttgaacttctgagctcaggtgatcgcctgcctcggcctcccaaaatgctgggattacaggcgtgacccactgcacccagcctttttcttgtttattgtgataagcatttccccctgttgttacattgccttcataaccgtcattgttaatatccatcttttattagaactattacattgccttcataaccatcactgttaatgtccattcttattagaattaaagaatcccaattagaatggccaaccttgcattgcaccttgcactgaggaaatgaatgccctattgctgcccatagttggaaatttaagttgcttccaatttttttattactttaattaatggagcaatgaacatcttttgtctgtaatttgagtaatatcttttgtttttttttgagacagagtctcgctctgtcacccaggctggagtgcagtggcgggatctcggctcactgcaagctccacctcccaggttcacgccattctcctgcctcagcctcccaagtagctgggactacaggcgcccaccaccacgcccggctaattttttgtatttttagtagagatggggtttcactgtgttagccaggattgtctcgatctcctgacctcgtgatccacccacctcggcctcccaaagtgttgggattacgggcgtgagccactgcgcccggccaattggagtaatatcttaacataaaatcgcagatcaaaggataggcatcccttaagactcttaatctatacctatatacatacttaaaacattttaaagttgtgaagggctataaaatcatccggtacaatcctctctacaaataaggaaatgaggcccagaaagggaaagagacttctctgaagacacacagctagcacagaacagatttaaattccagcttctgactcctggttcagtgtcggttccctgacatatcagcctgcagactttagcactatgcaaacattgctccctgtgggacactgcggtaagtgctggaggtcctggaacagcggtggcaataccggacattgagctgaagtgctctggccctcctgggcccctggatctgcctgaggccaaagctcagacagtgtgtgtcacctagcaccaagtcacctagcaaggacatctagaccagagctttccagctgctctgaggtgttcccttgaggctctcaggggtaggaaagctgaggagggatgggaccaaggggagtcaccacccccactgtacccaaagtggctctgctgccatccatttgatgtattagatgctccctaagattatgatttggcagaggggtttgcccagcttttgaaatatttggagacctgatctgattcccttatttcccaaggagaagactgtgaggcacagagagccttacccaaaggccctcccagaatcagcagcagagggatatttgccaagtgccccagtgagcaagaccctgatacctgagggaacagggctggggcagagtggtggatgccattagacatctgggcatttcattttagaagcattgcttccaaacatttctgtttctaagcattcaggaatttgtccctgtgtgccaggccctgtgatgggccctctgcaggcactgccccgtgtaaacattgctgcaatcctgtgagaagcagcctacccccatttcacagaggaggcccagagataggaagtggcttgcagtcaagggctggggtggactggagctcatgcagccacctggcctcctcagctggtgtgtgcctggaaaagacagactatctgggttctttcccatgtcctgggcttctctgcatggctcctgatgcatcagtgagcaccaggagcgcctgtatccaggtggccctaagtctcactttcattatgcagctgctgccactgccaggtatgtgacacacctcacctggggttagatcaggttgctctgtttcctgctgggttcccctgttcacattagcaggcagaggccagcgtgagtgttttttgcgctgccccataccatccacaccaaaactaatttgggcaaagaggctctttagccccagtttcctccctgcagagtggcctcaccagcagggtggccttaccagcagggtgggcctgcacaagcgggtggcacacagataagctgcaagtgctggaggccagagatccacggcaaagggttgcctggctgtagggtagagcaggtcaacaagggaatgggtggggactgatacttcagccacctgtggaccaggcaccgtgcttggcactttctacatcatctcttttagtcttccagaaatgctaagtaacctgcctaggctctgctaagtgtgttgtaaatggaaaaagcaaattggcaaacagtacgtgtaagatggtcccatttttcaggaggctgaggcaggagaatggcgtgaaccagggaggtggagcttgcagtgagccaagatcgtgccactgaactccagcctgggcgacagagcgagactctgtctcaaaaaaaaaaaaaagatggtcctattttttaaaaacagtgggcatatgtatgtaatttctaatagacaaataactcccacaaagtatgtatttttattgtcatgttacatgtgaagaaacaggctcagagatgacctgcctgggtgtgtccccagctgcccaccctaaagcttgtgcttttccaggatcccccctgcctctccccgagagcatctgccagaattcatttatggatgaggaagctgaggccaggagaagctcagccatcccaaggcacacagcacattgagtcatgaccatttagggctgcaggagacatcagctcaatagaagatttgggtgtgggagcccccagggccagggaggtatgagccttattcatgtgagcatcctccagacgatggtggctgcctggggagtgctgtacccggaggactgtggagcttggtccagggacagcagggaaagtgccatgaccagttggtgccatgagccctgggttgcactgaggggctgacccattcccagagttcgtgcttccctggccttggggaaggtgggaagggagggagggagggaattcccctgcatggggcactgcatcagggcagttaaatgtttaactctgttaaacacttgcaccaggctaggcggggtcgctgagttctctagactgtcggggactcactgtttggccctgggcacacaccacttaacctctttgagctcctgctctctctgctagaggatacccgctgtgcctaacctcaccagctttcaagagtctcaaaggcagtaatagacatgaaagagctttgaaaaggccaggagtgctgaacagaagccgggtgtcgctgttacaccccgatggtgctgggcgcttgtctgcaggctgatcacaatgccctctgtcatttcagctgaatagcattggcaattactacaagccgtggttctttaagcatgtggagaactatctgaagacaaaccgagagggcctggagtacattcccttgagacactactaccaccgccacacgcgcagcatcttctgggagctccaggtgaggcttaggtttctgtagccctggctcctccaggccagctgggcagggagcccggacagttaacactgtagccatactctctcccttcagggtaaagagtggctttgtcctaaggaactgcaatgccttcttaagcagcaacacagtcgtttccttctgaaggaaccaactaccttcagttcaagcagcaggctcttagcaagcatctgcttggtgctggggagtaagcccctgggccggtactttggggaacacagacctgttccgcccttgaggaagggttagcctctagccacggtgagcagacagatccctgcactgtaaagggccgcaggaacattagtaggaagtggctagttctgcctagggctcgaggtaacagccaagcctggctgtgaaaggtgagtgagaatttgctgttgcatgtgtagatgggtgggtggatgaggagcagtgacactttaagtgggggaaggtcaggaagaacccctcaggagatgactttgtgagcagggacctgaacatagggaaggcagaccaggaacaactctggggaggactctggaactctgttcacaggcagagggacagccagagcccagggcttgagctgggctaacaggaaattaaacattataaaatggacagttcagggtagtttagtacattcacagtgttgtgcaaccactacctctgtgtagttccaaacattttcatctctgaaaaggaaaccctatacccattaagcagccactccctattctctcccctttccccagcctgtggcaaccaccaattcatcttctgtctctgcagatttacttattctggatatttcacatatatggaatcattcagtatgtgccttttgtgactggcttcttttacatagcataatgtttt

SEQ ID NO: 1517 - DNA, 6000 bp, Homo sapiens
atgagtcaccacgaccagccaggatgggtgatttttgttttcttcttcacttttgctgtatcttctaagtgaatgagtatttctcctgtaatttagaaaaggttaagtcaaatatttagtataaagatacttgaagggcgaggttgaacactagctaaccgagagccagaaatcacattccctgtaattaaaggcaatgttctagaaagagcctgtaaaggctatataggaatccctgcagtgagtgtttgggaaggtttgagatgacaccttctgtgtgcagcagctccccttgggcctggcagcctccttttgacccagggtctcttttcttgtgtcaacagattgtccgtgtggagcccttggtgaccatgggccaggtgactgccctgctgacctccattggctggactctccccgtgttgcctgagcttgatgacctcacagtgggtgaggaccctatattaacgggcaagaagagacacacggtcctaggaccggagctgatgggccttggccaccctccatctagtcctggaattgccgctattccatctgtgacagaagtcattcagtctcttacttgcctgctccaatgacagggtgttcactgcctgctgttccatttctgagcagctcaagttatcagaaggcacttttaatttctggtttgaatctgcttccctgtgacttgttcccattgctccaattcccccccatggaacacacagaataagtatagtctctcttctcctcccataggattcatagcccccaaagcctcttcttcttcagggaaaacaccttcagttcttttaactattcccatgggacagggcttcctgtcaccccttcaaccccccttttcattaaagtccctctcaagatgaatgcacacagatttctaggttgagtctggccagaggtgaggtgtgagtacacttgacaaggtctgctcgccactcccttcctctaaggacaccctcatgctcccatctgagcccctccttccctctcctgctctctagattgacaggtgggaaatctcccctaagtcaacagccccatttctgctagcctgccaaacctccctcatgctaggaggccccccagctccaacccacccccaaccctgtacccacagctctccctgctgacactgtgtgtgatgtctctgcagggggcttgatcatgggcacaggcatcgagtcatcatcccacaagtacggcctgttccaacacatctgcactgcttacgagctggtcctggctgatggcagctttgtgcgatgcactccggtgagttcagcaatgggagatgtccatgccagcctgctctgggcattaaggatcctgaggtcagggaggtggctcctctaggtgtgcttcattcccagtacctgttcagtctgggtctatatctgtaaacaaaaatttgtgtagccccttatatgagcttaggcaatgttgtaaatccattatatatattaaggcatgcatgttatccttcaacaacctaatgagggaggtttattatccctattttatagattattattaaataatagaaggattattatccctattttatagataggaaactaaagctcagagagattatttgccataggtcacacagctgggactcacaccccagtaatcaggctcccaggtcccttagccgttcattatgccatcctgcctctctggagaggaagtcaggccttggcatcaaagctgtgtgtcttaacactgtgaggtacagtcatgtgtcacagaacagtagggatatgttataagaaacaagttgtaggcaattttgtcattgtgcaaacatcataagagtgtaattacataaacctagatgagatagcctacttcacacgtaggctatttggatagcctactactccttgactacagacctatacagcatggtactgtgctcaatactgtaggcagctgtaacacaatggtatttatgtatctaaacatacctatacttggaaaaggtacagtaaaaatacagtataaaagatgaatggtacacctatgtagcgtacttaccatgcatggagcttgcaggactggaagttgctctgggtgagtcagtgagtgagtggtgagtgaatgtgaagtcctgggacattactgtacaccactgtagactttataaacactgtacacttaggctacactaaatttattttttgaaattttctttcttcaataataaatactgttagcttactataacatttttactttataaactttttaaaaacttttgactcttgtaataacacttagcttaaaatgcaaacacattgtacaggtgtacagaaatagtttccttctttatatccttattctataagcttgtttctatttaaactttttttttaacttgttaaagtttttttgttaaaaacttagacacaaggctgggtgcagtggctcactcctgtaataccagcactttgggaggccaaggcaggtggactgcttgagcttagcagtttgagaccagcctgggcaacatggcctacaacatggtctacaaacaatacaaaaattagctgggcatggtgatgtgttcctgtatttccagctactgtggaggctgcagcaggaggatcacttgagcctgggaggcagagattgcagtgagccgtgattacgccactgcactctagcctgggtgacagagcaagaccctgtctcaaagaaaaaaggtcaagacataaacgcatgttagtttaggcctacacagagtcaagattatcaataacgcttccacttccgcatcttgtcccactggaaagtcttcaggggcaataacacacatggagctgtcatctctgacaacaatgccttcttctggaatacctcctgaaggacctgcctgatgctgtttacagttaacttttttttaataagcagaaagagtacactctaaaataacaattaaaagtgtagtgtagtgaatacataaaccaatgacagagtcatttatcattatcaagtattatgtagtgtacataattatatgtgctatacttttatacaactggcagtacagtaggtttgcttacaccagtgttaccataaacacatgagtatgacattaggatagctgtgatagcagtgataccactaggcaacaggactttttcagctccattataatcttatgagaccaccattttatctgtggcccattgttgactgcaacgtctttatgtagcacgtaatcgtgtaagtaaaagtgattagagaggatgttttagaaaaataagaaacacttctaccacccaaactgggattcaaacatttaaagcgttttacctaaggggtgggataggagtgacactttaaataaccttggatctgtcctggcaggtgtgagggacccctgggatgggagggacagttggtcctgttgaagtgggtatttcagggagccacccgactccttcacttcacagaagagggcccaaggaaagactcccagcttggcagcactggtcttggatgagagatacccctagcaagattcacatcaattcatcctgctttcctgaacgcttgcggggccctgtcttttgacctatttattatcggcagagaaaggagactgacatttgtgaattctttcccttctctgaggcccaggttcctcactgacaaatatgtggttgagaggaataagtaggtcctgtatgggaagctccttgcatagagctcagcatgcagcaagtgtgtcatcttcactgccatggccaggagaatgtgattagctgtgggcccaagggggaattggtgagcgtagtgctgctgttcctgaggtttctgccagcctgctgcagagcctccttgctccagctctcctgccctgctgcattcactgtgcccaccaccaagagcattcaggttttgtggagactgcacagggctgtcctcttagtaaaggcaagacatggctggactttttcaaaagagctttctttactagaactgaagaatcccaatcagaatggccaaggaaaagtcagttgtctgtgtccaagacaaatgtcaaaacaataaaatgatgaggttggacattgatttatggaagcagatgaggtgttgtaggaaaaacgctggccggggagttaggtggtcttgcctgagccctggcattgctgcagctgacttttctgggaagactttggtgagtcatggcagctctgagagactcagtttctttacttgtcataagggggtgctagcgctctccctgggctctgtcgggggtggatcccacaagccgatggactgggaaaggccttgtaaattttagtaatggttcagaagggaggcattttaatgttccccagctacactgcctgacacccactaaagggtgtcaaggcctggccttggactcctgcccttgtgcaatgcccctgccattgtgggtcgttgggcagcagtgccagtcccagctttttcctgaatagcctctgggtcaggggctgtacctagatgggagaaggaggatgctctctcagtgagggtccctgagacagagggcagtattaggttccatgtcatgtcgaagctgcagggaggaaactaaagcccagcaagcacagtttgtaaagctcattgtttgggtttatacaagagagtgagagaatagggactctcccaggctttgctcccccactgactgcatgccacaatgtggggcccaaggtttcagctcacaacacatcaattctgtctcacagtccgaaaactcagacctgttctatgccgtaccctggtcctgtgggacgctgggtttcctggtggccgctgagatccgcatcatccctgccaagaagtacgtcaagctgcgtttcgagccagtgcggggcctggaggctatctgtgccaagttcacccacgagtcccagcggcaggagaaccacttcgtggaagggctgctctactccctggatgaggctgtcattatgacaggggtcatgacagatgaggcagagcccagcaaggtaagccagggtgtcagctgctgctgaccaagactggggaggcatgagtgtgctaggactgagccggttcccgtatcctgaccctggcagccacctcttcaaggctgctgcctgggtcaacccacctggggtacaggcaacaggatctatcatcagaaatgtattagacagtgatggaagctttcatctactctgcccctaccacctgcctgggatgtgcttgtctcttagtggatgtaatctttggtccttatagcaaacccattttatagatgaggaaactgagtcttcaagaggtaatgtaggctgggcacagtggctcacacctgtaatcccaacacttaaaagaggtaatgtaaacttccacaagattcgagtaatcgatttgatgccttggaatctagattgacattccttccacatataccatgcaatttttattagcagttttttctccatttagaaaggatttgtgcttattgtaagagacttggaaaggatttgtgcttattgtaagagacttggaaggtacaaacaagtaaaaaggaaagaaaagactccacctgtaaatatgtcccaaagccagtgttgctaatgtgtttggtacacagttggccccttgtatctgtgggttccacaacagtggattcaaccaactgcagattgaaagcgttcaggggccaaaaaacggatggtttcatctgaaatgaacatggacagactttttttcttgtcattattccttaactgttacatagcatttacattgtattaagtattgtgagaaatctagagatgatttaaagtatacaggaggatgtgcatagggttatatgcaaatactaaatcattttatgtaagggacttgagcattcatggattttgggggatcctggaacaaatcccccatggatactgagagacaactgtatttatttcctctttctctgtatggatt

SEQ ID NO: 1518 - DNA, 6000 bp, Homo sapiens
tatttatttttgaagtccagtgcaaacaacctctcattctttgcactttgataacttgaatatttgagcctacaatcttcattcattcattggtcaacagccgctggagtgtttactgtgcacaaagcaccgtgctagaagctggaaggacaaaagtgaacaagacattgtttgccctaaggctcagtctgtgggggtgagagacacataaagagacaattataaaataacatgaaagaacggtgacagagatgcacactatttaatgagcatctggatgggcaggggagtgctctaaatgtttcagaggtggccctgagctggcttcggaatgtgtgaggtgaactctgagaaggggatgggaaagggcattcagaggtactagcttgaccagaggcgcgcaaatgaggaatgctgaggcccagggagcctcctgagtgcatgtcagggcagagatgaatggagagggaactggataggtatgcaaggccagacagagaagaacctggtatgtcatgtttagcttctaaactaaaacatctcgaaaacttcctaaaattccatatgaaatgcaaatggcgctggatttcagcttttgctggtaaccgtggcagctcccctacactggttgctgagtgagggcagggccatctgctttgctcaccaccctacccgaggcttgcaacactgcctggcacagagcgggcctggggagtttactcgggctgaaatgccttccttcattctttctcctccgggcctcccatctgcctcagtgaactggaaaaagaggaagagtgccagccatagccttccatgcttccaatggcctctggagttcacgaacaggtcttcacctttctgggctgcttccaagtgtacacaatggagctcaccactccccactgcccaggactgctgtgtagctcaaatgaattcgtggaaagtgccccctaaaaatgaaaagatgcctctggagaccttgcgcacaccgagtggcacgacctgcagaggttaccgccaggtttccatcctccgcgcccgggaaccgcctgtccggccaaagggtgactgactcagggccggggcgcctcccagccctccggcggaaagccactgcaaaaccgcttaaggcgcgtttggaagaggcggccccgcagccccgagggcctggggccctgagtcccaactgcccacccccagtattcgcagcggaccccaccggcacccagtccctggcacccccgcctcgcgcggcggcggggagaaaagggtggagcggtccgactcccgcagccaatgaaagctgcgggttcctggtccgatccccggcgcggctcgccattggtcgccgcccgggtctcggcccaccgaacctcggcgacccgagccaatcgcgaggcggcgggcgatcccgggctccccgggctgtgggctacaggcgcagagcgggccaggcgcggagctggcggcagtgacaggaggcgcgaacccgcagcgcttaccgcgcggcgccgcaccatggagcccgccgtgtcgctggccgtgtgcgcgctgctcttcctgctgtgggtgcgcctgaaggggctggagttcgtgctcatccaccagcgctgggtgttcgtgtgcctcttcctcctgccgctctcgcttatcttcgatatctactactacgtgcgcgcctgggtggtgttcaagctcagcagcgctccgcgcctgcacgagcagcgcgtgcgggacatccagaagcaggtgagcggcgccgggtgcggccgggactcagggccggaggcggcgtgcgcggggatagcgggacgcgaggtggcgacgggagctgcggtgcgggggcggccaggacttcctgggggggtggggagctggcgttggagaggggttggaacgaaacaaaaatgtgatgggggcgggggaacagaacaggcaaagtgcccactgtgtgcagggcatatgcgggtacctggagggagatgaagaaggggaagagggggaggtgcgaagcactcaggtaactctcacccggcccaagcatttcagagaaggaaaggcttccgggaggtggagctgggtctagagattgggaagtatgggaaatgattgggggaaggtgtgtgggtggagggactggtgtgagcaaatgctgggaagccgacaagtgcagggcaggggcgggagaacgtcggaaaagtccgtttggtgctaggctggagaggggccttgatgccaaggccgagtttggactttattttgtacagcaagacgcttttgattgggtttaggatagaagactaaagcaagaaggtagaacccagcccagaagcgggagggaagaacctcacagcctctgctgacggagggctcactccttgacaaaggcagtcggtccatctctcagttcctcaggcacccacggagcctgtgacctgctgtggctcacagtggagcctcctctgcatccagggacttgggcagtttcttgactccctctgcttctctttatgttcctctcttgttggcatcaggttgcagagagcttctgtttcctgctgccacccttccgtaggtgtagcagcctccatattctgcttgctccgcgctgggtgcttcaggcaagagcatgaagatggatgcggagagacgttcccatgaggcataagacctggggcctggtgggagaacgcagtgtctggaagtgctttgccctgtagctctggattttgctggtcacagtcatggctccagagcctctgcgtgtcctccctccccacctgcaccctgtttcctagctcttttctcgagttcaaattctccatttacctgcttgtctcccctgtcagactgtgagctcctagaatgcagggactgttatgtgactcgcctgtggcccatagggcctggctcaaaacagcctagcgagtgcctattaatcttggctaagccacaagattcactgtgagcaggaaaacaggggcccagctggactagcctctaccccagacctgccatgtgccattgccatcctcacagcaaccctggtagatcttgtgcctatcttacaaacagggaaaattgagtttcagagtgtgagtcatgtgctcaggaagactagtcagtaaatggggctagaacctaggttagctcgatttcagagcctgaactctgacatttcttctttcccaggctttcccttcccccctataggtctggttcagttgcctcacacctggcttgtaatagctgtctgacctagttgcccttttttctgggctctctgtttggcctccagcttcagtgcagcacccctaatcactccctcccatctctgggcttgtgtcaaactccgtggctgcagattcaggcagggacgagacctggttggtcgtggaatcctacctatcatcccttttcccccaaatcacaggaatctcttccttaatacctgccctggcctctgatcaaagaaaagtccttccccgtgttgagctgtttgcctagccagctccagtgcagccttctccaggagacctgaccagtatttgaccagacttttggttgcaagtgaaagaagctcaattcaaactgacttgagcaaaaagggattttattggctcaggtcctgaaaagtctgggagtacaactggatcaggcatggctggatccaggatcctctgtcccccatctccatctgtccatccctctgccatctgttggccctgcttttctaggttgacttcattctctggagcctctctccctgcagaggccccaacagtttctggctcatatccaaccggcttagcgaccccagtaaagagagagtggctgtcctggaactggtctcattggcttgacttaatgagatgtcattaatctgtctctggccagaagtatagaatcagtcctcagtcatgtacccacctcctggggtaggggagtagaatcagtctcacttggaccaaaggaagatggggattgttagaagtggatgaagaggaaatggatggtcacaggtcaaaatgacaaatatccaccccccctgcacttgtctatctcagcagaaaagaaacacttcctcctgcatttctgatgggcttgtcatccatgggccatttgttctgtgttttgtgctctggtcacttaccttagaggttttgtaaaacctcttccttccattggcttggtggtccttccctgctcctcctcttcccctcaaagtgatgcatgagttaacatatacaaatgtttaaacaggccttggcatgtgataagcctccatacgtgttagctattaccctgtgaactgttaccacaactccatctatctttcctgtcctgaagtcaaacagtcctggctatgaatctcagctctgccatttaccaattgtgtgactttggacaagttattttgcttttgagtttccttatcctcgaaaaaagggtgtcatcgtaacttcctgggactgttgtaggaattacacaagacagtgtgcagtagatgcctagtgtgttgggaatacccagtaaatggtcctcatttttatacttgctattatcaccattacaaaaccttttctgaacttcccagctagagttaatgttttcagaacacttcgatcctctcttctagctctttcatcattctgccttgtggtgtagcaatatgttggcttttctgtcagccttgctggccagggaggtgccagagggtagggccagcaggccttttcattgttctgtttctccagtgcctgatggaggcatcattcccagctcgcccttgaagaaagcagggctgcaggctgctctggggattcccagtggggccagctcaccctctgtcctgtggttgcaggtgcgggaatggaaggagcagggtagcaagaccttcatgtgcacggggcgccctggctggctcactgtctcactacgtgtcgggaagtacaagaagacacacaaaaacatcatgatcaacctgatggacattctggaagtggacaccaagaaacaggtgagagtagcacttttccgggctctgggagcaggtggggcactgcccctggtgcaagtgactcatagggagatgattttagccaagggcattgcagagtggacaggaccaatgcccacagtcatagaagatactccctgccattgctgtcctcaagcctcacagccaccaggggagagatgggtcataataggtcaggggaaccctttgcgtttccacaggaagtcaggaatggggaattcgtgagcaaaaatgagaggcaaaaaggaatctacttaccccttcctgataaggaagtgtgctggtaaaaaatgggctacagaagtgactgagagacatgggtcttgttacaagcttcctggaaaccctcttgtttaatagccttcgaaatgtacatactttttggcccatctagtaattttacttctcgaaacctggcttaaggaaaaaggaaataggcttcagtataaagatacccaacacagagtgattatatcacagctttatttctaattgacaacaacacaatatccaataatagggtagtcattaaatatggtatgtctacttgatggcattttgttattattgtgagaccttggccaagttacttaatctctctgtgccattttttttaatagctttattgacgtatttaaagtgtggtaaaactcttaccacaatcaagacaacaaacatacccatcacaccccaaaatctcctcatgctccttggtaatcccttcctctagcccctagccctgcctcttcccctacccgccccccacagccttaggcaaacaatgacctttctgccactataaattagtttgattctagagtttatataaatggaatcatacagtactttttgtttgtctagcctctttcactcaacatctttatttggagattcatccatgttgaaaggtgtgtcaatagttcattctctttcactgctgagtcatattcccacac

SEQ ID NO: 1519 - DNA, 6000 bp, Homo sapiens
gagaatggtggcactctctcttcaaaaatctcccagtagttctctattgtttgtactgtacaggataaactttcagttcccctaaatatcacatccactcacctgcttctgagctttttgggcatggcatccctcttctggaatgctcttattccttagacccaatacttcacctggctaacttccacttatcctgtggtatctctgcttagtcatcacttcctctcagaagcccttcgggactgcatatatctatctacctatcaatggattgattgatagatagatatcttcatgtgcttccataatacccttatcatagtacttatgatgttgatttataattaattcttgattgcctagatccacacatgatctgtcaggaaaagaattgtgtctaattcactactgtgtccccagcattttgcacaattcccgcacatttaaaatcattgaatgaatgtgctgcagaaatggttaatttccatctgaaattggttccccttattttgctagatgttgctgtatatgatgtagcacctggaacatggctgctctgccctcatcaggggagttaacctgagaagacagagtaggcaaaagataaaaagaactgggtctttcaaattgtcactgaaccaatgaattaaccaactcttggtcaatctgcattcggacttcttttttgttttggacagggtcagtctatcacccaggctggagtacagtggtgctatccatagatcactgcagcctcaaccttccggattcaaacgattctcctgcctcagcctcccaagtagctgggattataggtatgcaccaccatgccaggctaatttttggattttcagtagagacggggtttcaccatgttggccaggctggtctcgaactcctgacctcaagtgacccacctcccccaggcctcccaaagtgctgggattacaggcatgagccaccaaccttggcctgttagggctttactttaaaacaaagaaaacaaaggtaatactatatatatttttttttttcttttttcttttttgagacagagtcttgctctgctgcccaggctggagtgcagtggcatgatctcagctcattgcaagctctgcctcctgggttcacgccattctcctgtctcagcctcctgagtagctgggactacaggcacccgccaccacacccagctaattttttgtatttttagtagagatggggtttcaccacattagccaggatggtcttgatctcctgaccttgtgatcttcccgcctcagcctcccaaagtgctgggattacaggcgtgagccaccgcacctggccaaacaaaggtaatattcttaaagaagttccaggattaatactcagtccaatctcctaaattttagcatgcataagaataacgtagctgacttcttaaaaagtagatttctggccccacttctggagatttagcttcagtgggatatggtagagtctaggactctgcattttagcaagcattctgatgtagttggtctacaaaccacacttcaacaaaccctgttctaaaacttctacttcatatctatggaacggaaccacatgaatggctcccaacttctggatctttccatcatttgaatctgctcccttgattattgtgtgaagtgtagtttgcagaccaactgcattagaattctctattcaccagaataagacattgatcaggtaagtcacttaacctgagtctaaatgtccccatttatttaaaaaaaaatacatattaattccctgcattgccactcctgagactggttgcaaagatcaaatgatctcagtagctgcactgtacaaatataagaaaatgcaatttgttaggactctggtatttatcatgctcctttactgaagaaaaaaaaaactgttctttacactctatttattaagaaagaaatagaggctcacattgtagaaagattgctacgtggtcaaactataaaaggggtttacctagttaacctgaaaagttcttgcccagaacatcctattcctaagcattctgactgtctgcatgctccatcaactctgtaagtaatgtataatatgaatagattccctgacaaaggaagctgctttgactccagcaaaaattagtaggtccaaggttatatatcatatgattccattcatatgaccttctggaaaaaaaacaaaactatagtgacagaacagggcaatgattgccaggggctaggaggtaggggagagtatgactacaaaggggcagcagagggagttttttggggtggtggaactattctgtatcctcattgtggtagtagttacaggaatcctcatcatgctaaaattcatcagctgtacaaagattaagcagttttactatatgttaacttaaaaaattaattaattgattggctcaactcaagtgactgctttccttacctggataaaagcaacccaaaggattagagtttggggagacagaaaagaagaatcagaaatatgaggagggtaggcaggaagagagaatgagaaacgtgcacactgaataaacaattgttctgagtactttttcacttttttgttgttgagacagcctgttgctaacactagtatgcagtggcgtgatcatggctcactgcagccttgacctcccaggctcaagtgatcggtcctcccacctcaacctcctgagtagttgagactacaagtgcatgccacaatgcccagcttttttttttattcttttttttttttttttagagacagggtcttgctatgttgcccaggcttgtcttgaattcttgggctcaagcaatctgcccctcttggcctctcaaagtgctgagattacaggcatgaaccaccacacccagcctgagtacttttttattcctttccttttttgggagttgtttcctaaagatcagttgtatctactttctgggactccatccttctcttcccaagtataaaactattctgattaaccagtaatttccactgtttctcctacacaacactcttcagttaatttttaggtaaattttactttccagattacctcacacccccaaaataatcagaatggttaagcttctaaagcaaagccctctttaacagagtcagacagaatcggggagaggcatttttcacattggctttcctcttcatacttcactgtccccctgttggttggagcttctagagatgtaatacaagacaaatctgtaattttaaattttctagtagccaccttaaaaaagtaaataaaacaggtgaaattaattctaatactatattttacttaatatatcaaaatgttatttcaacatgtcattaacataaaaattactaatgagctattttgcattttttctttgtactaagtctttgaaatccagtgtgtgttttactcttaaagggcatttcagtttggactagccacataccagtagctcatagctgttgtgtaagacagtacaggtccaggctatttatttttgaagtccagtgcaaacaacctctcattctttgcactttgataacttgaatatttgagcctacaatcttcattcattcattggtcaacagccgctggagtgtttactgtgcacaaagcaccgtgctagaagctggaaggacaaaagtgaacaagacattgtttgccctaaggctcagtctgtgggggtgagagacacataaagagacaattataaaataacatgaaagaacggtgacagagatgcacactatttaatgagcatctggatgggcaggggagtgctctaaatgtttcagaggtggccctgagctggcttcggaatgtgtgaggtgaactctgagaaggggatgggaaagggcattcagaggtactagcttgaccagaggcgcgcaaatgaggaatgctgaggcccagggagcctcctgagtgcatgtcagggcagagatgaatggagagggaactggataggtatgcaaggccagacagagaagaacctggtatgtcatgtttagcttctaaactaaaacatctcgaaaacttcctaaaattccatatgaaatgcaaatggcgctggatttcagcttttgctggtaaccgtggcagctcccctacactggttgctgagtgagggcagggccatctgctttgctcaccaccctacccgaggcttgcaacactgcctggcacagagcgggcctggggagtttactcgggctgaaatgccttccttcattctttctcctccgggcctcccatctgcctcagtgaactggaaaaagaggaagagtgccagccatagccttccatgcttccaatggcctctggagttcacgaacaggtcttcacctttctgggctgcttccaagtgtacacaatggagctcaccactccccactgcccaggactgctgtgtagctcaaatgaattcgtggaaagtgccccctaaaaatgaaaagatgcctctggagaccttgcgcacaccgagtggcacgacctgcagaggttaccgccaggtttccatcctccgcgcccgggaaccgcctgtccggccaaagggtgactgactcagggccggggcgcctcccagccctccggcggaaagccactgcaaaaccgcttaaggcgcgtttggaagaggcggccccgcagccccgagggcctggggccctgagtcccaactgcccacccccagtattcgcagcggaccccaccggcacccagtccctggcacccccgcctcgcgcggcggcggggagaaaagggtggagcggtccgactcccgcagccaatgaaagctgcgggttcctggtccgatccccggcgcggctcgccattggtcgccgcccgggtctcggcccaccgaacctcggcgacccgagccaatcgcgaggcggcgggcgatcccgggctccccgggctgtgggctacaggcgcagagcgggccaggcgcggagctggcggcagtgacaggaggcgcgaacccgcagcgcttaccgcgcggcgccgcaccatggagcccgccgtgtcgctggccgtgtgcgcgctgctcttcctgctgtgggtgcgcctgaaggggctggagttcgtgctcatccaccagcgctgggtgttcgtgtgcctcttcctcctgccgctctcgcttatcttcgatatctactactacgtgcgcgcctgggtggtgttcaagctcagcagcgctccgcgcctgcacgagcagcgcgtgcgggacatccagaagcaggtgagcggcgccgggtgcggccgggactcagggccggaggcggcgtgcgcggggatagcgggacgcgaggtggcgacgggagctgcggtgcgggggcggccaggacttcctgggggggtggggagctggcgttggagaggggttggaacgaaacaaaaatgtgatgggggcgggggaacagaacaggcaaagtgcccactgtgtgcagggcatatgcgggtacctggagggagatgaagaaggggaagagggggaggtgcgaagcactcaggtaactctcacccggcccaagcatttcagagaaggaaaggcttccgggaggtggagctgggtctagagattgggaagtatgggaaatgattgggggaaggtgtgtgggtggagggactggtgtgagcaaatgctgggaagccgacaagtgcagggcaggggcgggagaacgtcggaaaagtccgtttggtgctaggctggagaggggccttgatgccaaggccgagtttggactttattttgtacagcaagacgcttttgattgggtttaggatagaagactaaagcaagaaggtagaacccagcccagaagcgggagggaagaacctcacagcctctgctgacggagggctcactccttgacaaaggcagtcggtccatctctcagttcctcaggcacccacggagcctgtgacctgctgtggctcacagtggagcctcctctgcatccagggacttgggcagtttcttgact

SEQ ID NO: 1520 - DNA, 6000 bp, Homo sapiens
gaactgtgagagactaaatatctgttaagctaccttgtttttggtaatttggtatgatggccctaggaaactaatacactgtctgtcagatatcagacatcctcattcttaatgatatctcatctgtaccatgatgttatgcagccttatgattgtagcacctaaaccgtatccctcatggcacatttctcaggtgccttctatttcacagtaggaggcagatggagcacctggaagttaagggggtatggaggctgtgttaagggatgaggaagaagtaggattattgcaaggtagtggatgggtggggctgttttcttgaaactatgcccaaacttcattgttagccagaccctgtgatttagcagaaagaggaaaattagtttactaatgaaagaattatgatgcattagaaagcaagaaggactgggagttgcaaagcctgccacaaacgagctctgtgattaagcacgtggtattcagatgtggctttttaagctaggcaattcatcttgggaacattgacacatggtctgaaaagcaaaatattactctttcagctataaaaaaactcccggaatcctcattcagtcccgcccaatccctgatccttattctgtaactcccaattctaacatagggcagacacttaactttttagttgactaaataaataagggaatgaatactgaggatagaaaagggttggaggtgtcagaaatgaaatgatggtcaaggaaagagaaagactcagatgtatagggcatggaagaatgttcaagaatcaaagatgtctgccactaacatttggtaatcaaaagccatgacaagcaaatgtggcaatatatcagtatctgctcaatcttggtagtgagcgtagggtgtttgtaatattctttatagtttggtgggtttaaaatgtttcctttaaaaagaacaacagtgcagtagcaatctcaaaatggccaaatcaaaatgagtgcattaaattggcagcattcaattcacttgctttgatgggtgaatcctccccttcatcagcagaactgatttgactgtggtaaaaacagttcattcccacacacagatagaccaacacagcccttttggagagcacccatatataagaaaagccataaaatattcatttccttgggctttgtactcctggttctgggaatttatgcaaaggcaatgataatttgaaaggaaaaaggatgaaaatatgtaaattctatgacaattttttaataacaatgaacacttgggaaggatttaaggtgtcagtggggagtgctcaccactgcccccaccctggtcaagccatcctaagctgtgcctggatggctgtgtgtaaggaacatggctgtgctttggtcaaggataggacgaggtaaacatccacagggactcagcgagtttagagcgcaggcatataactccacttgttatcacagctatgtagccataacatgggaaggccatcccttggctctaagccactattgtctgtaaaaggtataattgccctgttgacatcgtgcaggcgtgctgacacccagagagagagagagagagccagagttgaccctcttggagactgacagtggggagccaggacacagctcggcttgctcatgcccagagagaggaagagttaagctgctgaccccgaaggcaagggagagtcggccatgcagctgtgtgggggagccgccagactaagcacctgagacagggcagacagtgtagagagctagtgtaagaaagctgttgatgagagctgctgctgagtaaaatcatcttttacctgcctacggtcccctgagtgttctttctgctcatccacccactccccttggacctcagcatgggctagaacctgaccccaagcatgacatttggctcagtcgtgaacctgacattgtggtagcctccacgtagtctctgcttcttgcccttgcccctgccatctactctccacttagcagccagagtgatcctttcaaaatgaaatcaaactgcttccttgcttcatttcaaaatgctcccaccaccctcactgctccaccctggtctgaaccacaacctcctggggcctggatatagcaatacctccctaaatggttttccctcttccatcttctttccccttagcacagaagtgaaagtgcttcttttcaaatcacaaatcagatcatgtcactctgctcagaaccttccagtggcttcccgtctgactcagcacacccatatgactcaacacacaaggagatcatctccttccagttacactgagcatttttattggttgctgactgtactcataatgctctctccttatatccacacggttcactccctcacttcctttaagcataaatcaaatcccttatcttggtattgacaagacaaggacagactcctccaaagtgagcagggaggtcatgaccaccctagcttaaattttaccaatccatacagcctcatcctacttccctgttttattttttcctcttagtatttatcatcttctaataaattaaataacttagatatagccaggcgtgggggatcatgcctgtaatcccagcactttgggaggttgaggtgggcagatcacctgaggtcaggagttcgaaaccaacctggccaatgtggtgaaaccttgtctctactaaaagtacaaaaattagctgggcgtggtggtgtgtgcctgtagtcccagctactcaggaggctgaagcaggagaatcgctcgaacccgggaggcagaagttgcagtaagctgagatggtgccattgcactccagcctgggaaacagagtgagactccgtctcaaaaaaataaattaattaattatttttttaaaataacttagatatagccgggtgtggtggcatgcgcctgtaatcccagctactggggaggctgaggcaggagaatcacttgaacctgggaggaggaggttgcagtgagcagagatcgtgccactgcactccagcctgcgtgacagagcgagattctgtctccaaataaataaataaataaacttagataaaatttttcaagtgcctacctcgtctgccccaaacacaaataaactagaatataaattccatgaggaaagagatttttattggttttgttcacagctgttttcctagcacctagaacagtgtctggcacatagtggacattcaaaacacatttgttaaatgaaaggattcatcctaaagttaaggatggttcagtaaatcggatggaagatgatgaaaaattaagcaattagaaaaaaactgtccttgtgtaatgtgtcaacatggaaacaggacataatgtaaacatcagaatcccttgctgtgattctggtttttgtggctctggttacattgtttttttgtgtgtgtttttttttttttttgctttcccgtttcttaaacattggcgttcccaagtttctccttggtcctcctgtcatttttatctactctcgtagcttcaaataccatctagtttatagtttatttagcatgttgtccaagccaccgtcttgggcccagggctctacctgtagcttttcatccacacttctcaggttgcttcttacacagcgccatagtagttaaaatacggtctggggatagtcgtctcttcatcagtctccccctataaaatggaggactcatagtataagttgcctagaacatattagtaaggactcaataaatgtttgagtaggatgagctgggtggctcatgcctgtagtccctgcactttgggaagccgaggcgggtggatggcttgagcccaggagtttgagaccagcctgggcaacatggcgaaactccatctctataaaaaatacaaaaaaactagctggactcccagctgcttggtggctgaggtggaaggatcgcctgagccctggaggtggaagctgcagtgagccgagaatcgcaccactgcactccagcctgggcgacagagtgagatcctgtctcaataaataaataaataatcagttgagtgcatactgtgtgcccaactacctttaagaactttacatatgatcccggcagccctaaaaggtaagcatatctatctccattacacagattaactaatgaggaaaagctatgtttataatgaacagtgaccaaaaagtatgcaaacgttaaatgaggtgttaaagtggtgggattgtaggtggtttctttttttctttcaaaaatttgtttagtattgtagttaggctgtttgtgtgtatgcatgtgtatgtgtgtatgagtgcgtttgtgtgtgaccaaaacagtaactggcaaacgtaacaacaggaaattgtagggcagggtctgggaaaaggggaggaacccaaggtactgacaagcccagaccggactcccccgaagtgagcaggcagcaaaggctgagagtgccagctgcctgggcactgacggaccccacccacggaaacgatgccttatgaggaagctaacccgggccacttaccgacgacctgcgcaggcgtggcttgaggaaacgcccgctgtgggcggagccacccgaaaggctccggtcgggggcgggaacaggatcggcccgcgggctggcgtcgataggctgccgcagagacagggcgggctctgctaagcgacgcgcctcgccgtggggcggtgcctgcgcctgagcctctacgagagggaaggaacgctgctccgagctccgcgtcgcgtcgcgtagattcgcgtcgccgtcgacctcagaggcggggccggaagcgctacggtttgacccccgagtccctctgttcccgaaggggcggccgtctttctcccgacccgctccgcctcctctccttcttccccattacccggaggccgaagcccccagccagggcggggcggcgcagcccgagctcccggacccggaagaagcgccatctcccgcctccaccatggagcccaccgcaccgtccctcaccgaggaggacctcactgaagtgaagaaggacgtgagtaacgcagctgtgcccagggcgggcgggggcgggctgcagcccagcgggagacgaaagcggaagcctggagtccgaggacaaggaggatcctccaggtcggaggagcggaaagtcctagcacaggaggactgtggcgagccctgcatccgagggaccttggtggcagtgatcctccagtgatctgtcaatccaggttttacatcgctaaacgcagagcttgggctttgttgccaagtggtgttttgattcttgcccactcctcacccatctcctcatgctttccccccaactgggttcttggagatgcttcgttagggactggcggctcagattcatccttaagtcaggctgcctaggctgctcactcagcctagagcgaaggctgtaccaggtgaaggatcccaagcagtggaccaaaaatgtgaagctcttttgcataagggggcttgaggaagctcaacagctgaaagcacaacctggaattcccctagtaagcagacgcccacatatttaaattggggttgggggagtgaatacacgtagctgagaattaatgtacaggtaaacgtcgaaaatattcagtagctaaattatgctcttctcggatggtgcagaaccacataaaccttcatatttattcgtaacgaatggctttgttgagatatgacattctttttcctttgcgtttacttgttttgtcagatgagacctatatgagtatcactaaaatactttatctgaagtcaaatgaaaaacagaaactcaacatgaaacgtgttcttattgaacactgcagtacttttacaaagtcattttgatgaactggacaggatggcaactttttaaatgttcatccacttcaaatcccttcctcttccctgtaaggtttattacactgtactcacaattggtgtgactcaccagcagaaggaaactggatatgactgggagttgtgcttagtttcctcattcaacagag

SEQ ID NO: 1521 - DNA, 6000 bp, Homo sapiens
catagtaagtgatcaatatatgttagtaataatgacaaaggtaatggcaggaaagtaggctaggtgaagggttcctgtggttcttggtctacgaagttccacatttacttgtttattcacatgacaagtattttacaaatctaaattcctaatatgccgagtgctgagcactgagtatacaaagatgaacaagatttgaatcctacatgcaaagggctcatggtctagctgggaatacatatcacaggtaataattataaaacaatgtgatcgggcccagaaaaaaaagattataggtcaaatacaggaaaagcacagagtgagcaaataactatgtccaggacctggtccttatcatatctggcatggactattaacaatagaaacctagctgcacttactacttccttccccctcctcaacatttctccttcaggagaaaatggaaatctggagtattatatgaattttactaaattttttttaaggatctcactctgtcacctaggctggagtgcagtggcttgatcatagctcactgcagcctggaatccctagactcaagtgatccccatcttagcctcttgagtagctaggactacaggtgtgagccaccatgcccggctaatttttaattttttttttttttttttgtagagaagggatctttgctacattacctaggctggtcttgaactcctggccttaagtgatcctcccaccttatcctcctgagttgttgggattataggtgtgggccactgtgcccagcaaattctaatattgaaattttgttaatttagaaaaaaaattaaaaacaatgttctgccctgtcttaaaggataaagttcctttacgtggcagaagagtagaaaagttaagggcatggctctaaagttggatcaacctcagtgcaaatcttgaatctagtactcacccttgtgagagctgggccaagttacttcaccactccaagctccaggtatgttattgataaaataaggattaaaaacttaactcacaggacatcaaggaggactaaatgggaatactatatatgaaggccacgcatagtctctgtacacagtaagtactcaataataactaattatggaagacaaggttcattgataatatggctcctacctacctctccagcttaatctatcactacctttgtcctgaaaatttatgctctacctaaaactatctgtctctctacatttccttacgtattttttgtctgcttttatcagaccctaaagcccctattcgtcctttaagatttaggtcagtggtcatcttctttggaaaggtttacctaactccccagaatgagttaggcaccccgtcctctgtccttgtagcaccttgtgtatacacttcatctttctatacaccaggactccacttctttcacctcatttcccaattcattcccagacatttccatcctgccccagtattcttctcgaagtcaccaatgacccccttattgccaaatattttcagtcttcatttcatttttcagctgcataaacacagttgactactccctccctgaaacaagaaaattgttacatgaataccacactctcctggttttcttcccatccctgtggatacaacttttcaatcattttcttgttgttgttgttaccctactttcaagctaacaattcactttttaaaattcttctctttaaagggttttacaccatttttctcttctagctcacagctttctaggtaaaatcattcaattccacacttacatttctagctcagatctctcttctgatctttgactttgcagatgtaattgctgatctgacatttccatgtactaatctaattacatcctcttcctcaactcccatgttcaatccatcaccaggtcatatcatttctatttcaaaaactgcatctggaattctgctccattcatctccactgccttcaccctgatccaaatcaccatcctcattcatctctatagattccaagagcctgctcactggcttccctgttcttattcttgttctcctcagtccatgaaacaggcagagggatctttaaactatacaattcttcaacaagtccctactatacttggggggaaaaaaaccccagatactttactaaaaggctcttcatgaaaatggctctagcccaccttcctaacttcacttcagattaccctctgccttcctccgatttccccaagtcaccagggtcttgcctattttaggtccttgacaaattctattctgcccagaatgctcttccctcagttctgtcaaatctttcaggaatcagtttaaatataacctctcctgaccatcctatctcaagtcgatttcccctattattgtcttggcactgtttgattccttcatagtaattgcaataatgaaaacaaaatttatttatttgttttaaactaacgtctctgtttgaagcaggcagctacgaggtatgttttagccaacactgtatatcctgcacttactagggcaccaagtagttaatgtttcagttgaatgcaaaactcactgcacttattttgtgatttaaaacaatccccctcaagaaattgagctcttttcaagttaggattgtgttttcatttttaatttttgaactgttagaaccaaccacagtatcagcctcacagtagcatgtaatccatatttattaaactgtactaaatccaactaacacaatgaggcaaataactagataggaggagggggagacactaaagaagtgggaggtcccaagacaaagggtggtagcacaccattcatcaagaaaggcaatacagcagcaacagtaagcaactttgggaaaaggatagtaaaagttcaatatttgacaaggtgagcaatctgtaggatataaaagtagatttccagtagacatttggaaataaggacctagagtggagagaaaagtccaaatatgtggataattttaaaactctctaagatcagaagacattttgaaaatatcatgaaaaaaacctctaagaaaaaagcatgcacatagtttctttcatagaccttttgaaacccatccatggtttcctcaaggttatttatttctgatataggcgtaaaatgaaatcctgaagacagataacatcaatgaattgacagagaagaacaaagacctggaagccactcttcacatctgtacttgtatacagatcttatttccttccacttgtaatttctcagttcctgttttattagctgtaaaatgggaatggcaattatcttctttagaggttgttgcgaaggttaagtgggaacattgtaaactgtgtgacacagcatctggaacataggaggcctagctcttggaagttcaaggttttactggcactcaccatgaataagacaacatttattctacagtagttatttatgttccattcttatctcaactagaatgtaaagcaggaaactgatcttcatttttttgtatccttccagacccaaggccagtgctttccatatagcaagtgctccataaatctctgttgaatgaggaaactaagcacaactcccagtcatatccagtttccttctgctggtgagtcacaccaattgtgagtacagtgtaataaaccttacagggaagaggaagggatttgaagtggatgaacatttaaaaagttgccatcctgtccagttcatcaaaatgactttgtaaaagtactgcagtgttcaataagaacacgtttcatgttgagtttctgtttttcatttgacttcagataaagtattttagtgatactcatataggtctcatctgacaaaacaagtaaacgcaaaggaaaaagaatgtcatatctcaacaaagccattcgttacgaataaatatgaaggtttatgtggttctgcaccatccgagaagagcataatttagctactgaatattttcgacgtttacctgtacattaattctcagctacgtgtattcactcccccaaccccaatttaaatatgtgggcgtctgcttactaggggaattccaggttgtgctttcagctgttgagcttcctcaagcccccttatgcaaaagagcttcacatttttggtccactgcttgggatccttcacctggtacagccttcgctctaggctgagtgagcagcctaggcagcctgacttaaggatgaatctgagccgccagtccctaacgaagcatctccaagaacccagttggggggaaagcatgaggagatgggtgaggagtgggcaagaatcaaaacaccacttggcaacaaagcccaagctctgcgtttagcgatgtaaaacctggattgacagatcactggaggatcactgccaccaaggtccctcggatgcagggctcgccacagtcctcctgtgctaggactttccgctcctccgacctggaggatcctccttgtcctcggactccaggcttccgctttcgtctcccgctgggctgcagcccgcccccgcccgccctgggcacagctgcgttactcacgtccttcttcacttcagtgaggtcctcctcggtgagggacggtgcggtgggctccatggtggaggcgggagatggcgcttcttccgggtccgggagctcgggctgcgccgccccgccctggctgggggcttcggcctccgggtaatggggaagaaggagaggaggcggagcgggtcgggagaaagacggccgccccttcgggaacagagggactcgggggtcaaaccgtagcgcttccggccccgcctctgaggtcgacggcgacgcgaatctacgcgacgcgacgcggagctcggagcagcgttccttccctctcgtagaggctcaggcgcaggcaccgccccacggcgaggcgcgtcgcttagcagagcccgccctgtctctgcggcagcctatcgacgccagcccgcgggccgatcctgttcccgcccccgaccggagcctttcgggtggctccgcccacagcgggcgtttcctcaagccacgcctgcgcaggtcgtcggtaagtggcccgggttagcttcctcataaggcatcgtttccgtgggtggggtccgtcagtgcccaggcagctggcactctcagcctttgctgcctgctcacttcgggggagtccggtctgggcttgtcagtaccttgggttcctccccttttcccagaccctgccctacaatttcctgttgttacgtttgccagttactgttttggtcacacacaaacgcactcatacacacatacacatgcatacacacaaacagcctaactacaatactaaacaaatttttgaaagaaaaaaagaaaccacctacaatcccaccactttaacacctcatttaacgtttgcatactttttggtcactgttcattataaacatagcttttcctcattagttaatctgtgtaatggagatagatatgcttaccttttagggctgccgggatcatatgtaaagttcttaaaggtagttgggcacacagtatgcactcaactgattatttatttatttattgagacaggatctcactctgtcgcccaggctggagtgcagtggtgcgattctcggctcactgcagcttccacctccagggctcaggcgatccttccacctcagccaccaagcagctgggagtccagctagtttttttgtattttttatagagatggagtttcgccatgttgcccaggctggtctcaaactcctgggctcaagccatccacccgcctcggcttcccaaagtgcagggactacaggcatgagccacccagctcatcctactcaaacatttattgagtccttactaatatgttctaggcaacttatactatgagtcctccattttatagggggagactgatgaagagacgactatccccagaccgtattttaactactatggcgctgtgtaagaagcaacctgagaagtgtggatgaaaagctacaggtagagccctgggcccaagacggtggcttg

SEQ ID NO: 1522 - DNA, 6000 bp, Homo sapiens
aatgaccttgagcaaatcatgtttctaagcctcggatttctcatctctaaagtgaggataataaagcctacctgtaaggactgttataggcattaaattcccaccacagatgtaaagtgcttggctcagagtgaatgtgaaataaactgctagtgattatttcttcccagggagttgtaagactgggagatctagcccctcctccaatatccccctgctggcatataggtatgcaacctccaaacattcaggactcatagcaggtgcctgcctgcactcttcaaaccagtcctctagggggaagacaaagggaatgatcccttatctctggttccctcatcagccccagcaatgtcctagtcttggggtacactagcaaatattgtcagagcattttctcaggtccacgcccaccaccctacactttcctggtctttccttcctaagccaagagccattcctagagacaggacccccaggagtcttcacaaagtccctgtgctgaaacatctgaatttcaccacatagtatcttgtcattaaaacctaagagtgtctgtctcagaattggccagttttttcttccaaccatttacagagaatgtataatccacaatttataattccacaaccacctggaatagtatttgttgctcaatacacatctgacatctgacaggaagtatggaataaataaccaagaagcagttaaagctccccattaaaatcctcccacccagcttaaatactgggtgaactcctctttcatgttgttttatcgatcagaatggtttcctcttccctacctctgaattcttattatcactatctttattgcatacttactaattgatccaagatcctacagctaataattggcaaatctagaattcagctgtactgacttgaatagcatctccccaaaattcacatctactggaacttggaatgtgaacttatttcaaaatagtgtctttggctggcatggtggcttatgcctgtaatcccagtaatttgggaggctgaggcaggaggatcatttgagcccaggagttggaaaccagcctggtcaacataacaagacactgtctctacaaaagtaaaaaataaaaaaataaaaaaatagctgagcgtggtggcacatgtctgtattctcagctacttgggaggctaaggaggaaaattgcttgagcccaggaatttgaggctgccataagccatgactgtgccattgtactccagcgtgggtgacagagaaagaccctgtctcaaaagaaaaaaaaaatgtgtctttacagatgtaatcaagttaagataaagtcatactgaattagggtgggccctaaatccagtgactggtgtccttaaaaagaaggaaatgtggacacagaaacacaggaggagacacagagaggaaggtcatgtgaagatggaggctggggtgggagtgatgccgccacaagctgaggaatgccaaggattgccagaagtcaccagaaccaagcaagaggcaatgaaagaatcctccctcgcggcttcagagagagcatggcactgccaattttggacttctaccctccagaactgtgagagactaaatatctgttaagctaccttgtttttggtaatttggtatgatggccctaggaaactaatacactgtctgtcagatatcagacatcctcattcttaatgatatctcatctgtaccatgatgttatgcagccttatgattgtagcacctaaaccgtatccctcatggcacatttctcaggtgccttctatttcacagtaggaggcagatggagcacctggaagttaagggggtatggaggctgtgttaagggatgaggaagaagtaggattattgcaaggtagtggatgggtggggctgttttcttgaaactatgcccaaacttcattgttagccagaccctgtgatttagcagaaagaggaaaattagtttactaatgaaagaattatgatgcattagaaagcaagaaggactgggagttgcaaagcctgccacaaacgagctctgtgattaagcacgtggtattcagatgtggctttttaagctaggcaattcatcttgggaacattgacacatggtctgaaaagcaaaatattactctttcagctataaaaaaactcccggaatcctcattcagtcccgcccaatccctgatccttattctgtaactcccaattctaacatagggcagacacttaactttttagttgactaaataaataagggaatgaatactgaggatagaaaagggttggaggtgtcagaaatgaaatgatggtcaaggaaagagaaagactcagatgtatagggcatggaagaatgttcaagaatcaaagatgtctgccactaacatttggtaatcaaaagccatgacaagcaaatgtggcaatatatcagtatctgctcaatcttggtagtgagcgtagggtgtttgtaatattctttatagtttggtgggtttaaaatgtttcctttaaaaagaacaacagtgcagtagcaatctcaaaatggccaaatcaaaatgagtgcattaaattggcagcattcaattcacttgctttgatgggtgaatcctccccttcatcagcagaactgatttgactgtggtaaaaacagttcattcccacacacagatagaccaacacagcccttttggagagcacccatatataagaaaagccataaaatattcatttccttgggctttgtactcctggttctgggaatttatgcaaaggcaatgataatttgaaaggaaaaaggatgaaaatatgtaaattctatgacaattttttaataacaatgaacacttgggaaggatttaaggtgtcagtggggagtgctcaccactgcccccaccctggtcaagccatcctaagctgtgcctggatggctgtgtgtaaggaacatggctgtgctttggtcaaggataggacgaggtaaacatccacagggactcagcgagtttagagcgcaggcatataactccacttgttatcacagctatgtagccataacatgggaaggccatcccttggctctaagccactattgtctgtaaaaggtataattgccctgttgacatcgtgcaggcgtgctgacacccagagagagagagagagagccagagttgaccctcttggagactgacagtggggagccaggacacagctcggcttgctcatgcccagagagaggaagagttaagctgctgaccccgaaggcaagggagagtcggccatgcagctgtgtgggggagccgccagactaagcacctgagacagggcagacagtgtagagagctagtgtaagaaagctgttgatgagagctgctgctgagtaaaatcatcttttacctgcctacggtcccctgagtgttctttctgctcatccacccactccccttggacctcagcatgggctagaacctgaccccaagcatgacatttggctcagtcgtgaacctgacattgtggtagcctccacgtagtctctgcttcttgcccttgcccctgccatctactctccacttagcagccagagtgatcctttcaaaatgaaatcaaactgcttccttgcttcatttcaaaatgctcccaccaccctcactgctccaccctggtctgaaccacaacctcctggggcctggatatagcaatacctccctaaatggttttccctcttccatcttctttccccttagcacagaagtgaaagtgcttcttttcaaatcacaaatcagatcatgtcactctgctcagaaccttccagtggcttcccgtctgactcagcacacccatatgactcaacacacaaggagatcatctccttccagttacactgagcatttttattggttgctgactgtactcataatgctctctccttatatccacacggttcactccctcacttcctttaagcataaatcaaatcccttatcttggtattgacaagacaaggacagactcctccaaagtgagcagggaggtcatgaccaccctagcttaaattttaccaatccatacagcctcatcctacttccctgttttattttttcctcttagtatttatcatcttctaataaattaaataacttagatatagccaggcgtgggggatcatgcctgtaatcccagcactttgggaggttgaggtgggcagatcacctgaggtcaggagttcgaaaccaacctggccaatgtggtgaaaccttgtctctactaaaagtacaaaaattagctgggcgtggtggtgtgtgcctgtagtcccagctactcaggaggctgaagcaggagaatcgctcgaacccgggaggcagaagttgcagtaagctgagatggtgccattgcactccagcctgggaaacagagtgagactccgtctcaaaaaaataaattaattaattatttttttaaaataacttagatatagccgggtgtggtggcatgcgcctgtaatcccagctactggggaggctgaggcaggagaatcacttgaacctgggaggaggaggttgcagtgagcagagatcgtgccactgcactccagcctgcgtgacagagcgagattctgtctccaaataaataaataaataaacttagataaaatttttcaagtgcctacctcgtctgccccaaacacaaataaactagaatataaattccatgaggaaagagatttttattggttttgttcacagctgttttcctagcacctagaacagtgtctggcacatagtggacattcaaaacacatttgttaaatgaaaggattcatcctaaagttaaggatggttcagtaaatcggatggaagatgatgaaaaattaagcaattagaaaaaaactgtccttgtgtaatgtgtcaacatggaaacaggacataatgtaaacatcagaatcccttgctgtgattctggtttttgtggctctggttacattgtttttttgtgtgtgtttttttttttttttgctttcccgtttcttaaacattggcgttcccaagtttctccttggtcctcctgtcatttttatctactctcgtagcttcaaataccatctagtttatagtttatttagcatgttgtccaagccaccgtcttgggcccagggctctacctgtagcttttcatccacacttctcaggttgcttcttacacagcgccatagtagttaaaatacggtctggggatagtcgtctcttcatcagtctccccctataaaatggaggactcatagtataagttgcctagaacatattagtaaggactcaataaatgtttgagtaggatgagctgggtggctcatgcctgtagtccctgcactttgggaagccgaggcgggtggatggcttgagcccaggagtttgagaccagcctgggcaacatggcgaaactccatctctataaaaaatacaaaaaaactagctggactcccagctgcttggtggctgaggtggaaggatcgcctgagccctggaggtggaagctgcagtgagccgagaatcgcaccactgcactccagcctgggcgacagagtgagatcctgtctcaataaataaataaataatcagttgagtgcatactgtgtgcccaactacctttaagaactttacatatgatcccggcagccctaaaaggtaagcatatctatctccattacacagattaactaatgaggaaaagctatgtttataatgaacagtgaccaaaaagtatgcaaacgttaaatgaggtgttaaagtggtgggattgtaggtggtttctttttttctttcaaaaatttgtttagtattgtagttaggctgtttgtgtgtatgcatgtgtatgtgtgtatgagtgcgtttgtgtgtgaccaaaacagtaactggcaaacgtaacaacaggaaattgtagggcagggtctgggaaaaggggaggaacccaaggtactgacaagcccagaccggactcccccgaagtgagcag

SEQ ID NO: 1523 - DNA, 6000 bp, Homo sapiens
ccatgctgggtcataaaagataaatatgaaaactgtccacttcagccattagatatatatcaagctacttaagagtggagtcctctttttagtcatttgcatattacaagtacctattgtgttgctgggcacagcaagtgtgagaaggcattcattgaatgaaaaaataaattcaaatgttaggtgtcttccatgagctctcctagaagctttaaatattatttggtttgtgtaacaatcctgtaggcagtttttttctgtcctacattactaattgagaaatcaaactttggtaaatttgtggacctttgagtatttcaaattttcttgctgtttcattgtagtttcagaattgattcataccttttagatttttaaataatttgcaattttgtttttgaaataaaaattttccccattaaattctaagtgtttcgtcctggtatactttataatgcctggctagaatttcattttataacctaggaatttcttcatttacttggcattgccctaagaaataatttctgttcagtttcaaaagctgtgtatttcctttactttatctctttttttttttttttttaagactaggtcttgctttgtcaccgaggctagagtgcagtggtgccatcacagctcactgcagactaaacccccaaggctcaagcaatcctcccacctcagcctcccaattagctgggactacaggtatgtgccaccatgctgagctaatcctttttacttttatttttattttttggtatttttttgtagagacagtatttcaccatgttgcccaagctggtctcaaactcctggacttaagctatctgcccgcctcaacctcccaaagtgctgggattacaggcatgagccaccacacccggtctgctttatttctatcctaggttaataaattccttaaagataggaggttctaagacagtgtgtcagctatttatatatataatagtggaaagggggataagacttccactaacttttcctttgtcatttctttctttcctagtcatttttttttttttttttttttttttggtgtgtgtgtgggggggcggggtgtgtcctttagtagggacattcatggagagagagatgagcaaaattatttgaaagttgttctgggaacctattctgagttcaccgtacaactgaccagagactccccatttctcccagagtgagaagttgcacccaactcaaatttccacaggcctcaaggtctccagtagctgggcatctggttttcccagacaactcttagaatcacttggcttctaaatgcagattacctggtgcctaagtagtttgaagtctactaataagattgttctcatgtgctccctctaagacaagaggacacttaggagggcaggatccctttgcaatagcacagatccacaatctcactggcacaaacaggtccatggcttttcttgctaactctgagttagtaacttcttccagcccataatgggtcagccgtgagttagggaagggacagatcctgggctaggctatctaaagaaaacttcactgactttggaggatgcagagatagaaacaaaagacaaaaagacacacacacacacacacacacacacacacacacacacacacatgcacatgcagcacaaacagacctggaggcagaataaacatgttatgaaggaaaaatggtaaaggcactggtctgaccctaaagaaaactgtgtgtatgtagttatcaacatctctaaataataatttttattaaacaatctatctccacctccaatctgcttacaggagacataagtgcaaccaaccatttgaaacctaatgtctagctgagcatggtgacatacagctgtaatccttgctacttgggacgctgtggcaggagaattgcttgagcctcggagctatagtgattcatgatcatgccactgcattttagcctgggcaacagagcgagactctgtctctactaagtaaatacataaatgaatgaataataaaaataaataaataaaacctaacttctcattgtacattaattccatagccatttattaaatccatactatgtgaacagccatgtgctaggtattagggatgggatcattgacaaagggggaaaaagtacccattataaattaactaatacaagctaacaatgtccaggcctatgggaccaagcactttacatgtattatgtcactttatctaatttaatccctatagcaaaaccaagcaagtattttatccatgttacatttttgaaataggagtgtcacagatattgaataacttgcccaagttacacggctagtataaagtttataaacaatttgacactgtagccactattctatttgtgcgccctaccccccaataaagacaagaaaccaaactaagaaacaaaccaaacctcaagagttgtctccatttgtagatcttttgttcgtcaataaattcaatatagtctttctgtctcactccaaagctgctctttctgaaggctctaatgactatctctgatcaattctgtatcctcactacttctgtgaagcatttgctatagctgaccactttcttctaattgtaaaactttctgctcttgacttctatgacatcaccttcttacctcacagactactacttctcagtctcttgctggttcttcctcctcctctgctcaactatgaaatgttggaagttatcatagcccaactctccatctacaatctttgcttagataatatcgtatagtccaagactaggtttcatctataaattcataactgccaagtttatttcttcaccctgaactataccccagaccaatatattcatctgtttctttgacatcatcacttgcatatcttggacttgattattgttaacgacctcccgataatgaccaccaggaacacaactatagctgagcaacttggatgtattgcttgtttcagtacgtgagaatgcacaccatggggaaccatgggatgtcttaggaagagggtgttaaaaaggacttgttatagaatttgagtttgtgttaggagatttacggaagggtgcaagaaagagggactttggcctggattggaagctgtaaggaagcaaggataattctataattgggtattttaataagtattatgtagaaggaaggaagactagactgaggttaaaactataattggtaaagaagcagcaggcactcatattagctaggataaggagatatttgatcatttttatggcttgggcaatgttgatgttgtgtctgtgttcacatatgattatagagtgatcttacttttgtcttgatctatcacggtcacaactctgtcttgtctgatgttctgtgaaattgtttatgttcaacagaagaataccaatgcttggctgtgattgccaggccagctcaaagcaacagcaaaccaagctggtagtaccaggccatctcctggatgtcaaggtctgcttttctctttctcggtatccacactagaatccttgatttactctcttccacctcactcaatcaaaaaccattacctcacagacttcccttctatgtggcactaccacccacacatatgctagcccaaaacctaagattcactgttgatgatgcccttttcttcattttccatagccaatcaccaaatcccattgtcttctttcttttatttcttccgccattgttctggtccaaactaccattatgtttctcctaaacataaagtgcatcctatttcctctgcttccacacttgcccctctacaatccattctcttcataacagatagatcatattactcccttgctttaaaactttcaaatagcttccaattgtactcagaacaaacactaaacttcttaccctggctttcaaggaccctggtctggcttctgcctaactctccaccttcatctatctgggactatcttgcggctcactcactatgcttcccccacactggcctttcctgccctgcccctgcaacataccaagttcctctttctctctgcatttgccctatcctttctttgccaggacaacagtctccctaccagctctttctcatccaggtctctttgagagggcttccctgaccatctagatgccaccttcctggtcagtatttccctcaagtagtaatcaatgccggaaagaatactgttcatttattcatccgttattgtcatcgcttcattggaatttagcttcctacagggatggtgtttatcttgctcactatgattccagcccctagaaaaacccacctacctcatagccaagggctcagtaaatagtatacactgccttcctgccactgtgctaatttctactaacacagccacaaacaatcagcaattacattttctgcttgtttttaacggggaagtagggcactcaacgaaaaggaaataaaagcagagtcaagaaagtgccttttatccatggagtgcccaatgtgttgtgcggccggccacgtatatagggatgtgtcagcacctgagatttttccttctctgagctagcttctttcctggaaatcatgctgggcccttagccttatggttcaccctgttttttaagatcatccacgggcttcattcccgtaaccgctcttctagctggccaaggcggcgggaagaaaccccaccctcttgcgcaaacgcccagtagcggaatccgcggggtcgagggctttagtgtgcgcatgtgcaaccagagcggcggcgggaagtgttgcgcaggcgcatccgatcgactcggtaggtggggatctcttggagacggcgacccaggcatctggggagccacagaagtcgtactcccttaaaccgtgagtttccgacggtttgttccatggcgcgggattgtgagggattaggaacgaattctggatcgtgacttcggttttctcgccgtgcagttccttttcccgccccccttcggatccctccgacctgcggcgggaaagtcgcgcgcctgcgcactaagcatctggttcggtctctggcccgagggaagccggtccttcccggctgagctcgcggccagcgctggccggcggattcccattcattcacccttctcctcctccgcccagtactcgtggccagggtcgtatcagttctccgtcaacttgcttggggccttggacgagcctcctggcgcttcctgtcagtggcgaaaaggttttctccctcagttcttttcctgacttcaaaccgcccccggcgctcggcccctcccccacgcggtcccgctggctgtgccggactggcagcctcgccgtttcccactgcgcctgctgctgcgcgggtgcccaagccgggaaattctccctgcagccccctgccggtgtttctgataggtgaaaataaagcacatggaattccttagacaaggccacagtatgccctactgtggaggtttggacacatcgtgcgtttgaaaatgtttgcccctttggggggcagtagcatgtttttagtgcgtggtttagcgagtgatctaaatttctctagtgttctaattttcacagctgctttgctccccctgtggatgtaaccccttagctggcattttgcatctcaattggcttgtgatggaggcgtctttggggattcagatggatgagccaatggctttttctccccagcgtgaccggtttcaggctgaaggctctttaaaaaaaaacgagcagaattttaaacttgcaggtacgtgtttaaatccaaagatgtacagttataaagatttttcaggcaacaattctgtgttttcaattcctctcaaaaaataagattgaatcttataaagtgaattgtatgtttctataggacagtgttaaaacagagcttcgtatgatctaaatgtaggactgaattgcgatttggaagactgtaatacaacctgttttacggttgaagttgctatggtctcagtattggtaattaagaatgcag

SEQ ID NO: 1524 - DNA, 6000 bp, Homo sapiens
ccctcccacctgctcctttctgcgtgtccctgttccagttctcagttttctttttcaaactcagaaatcccaagagtctgtgaagggcaaatgaaaagcaaaatgactagactaaatctgaatgaaagggatttattctaaggtgatactgctcactgctcaaggtgcttatctgcccccttcatgggctccctcaagttttctgagacttcaaacagcaacactcaactaaactataaaatagtcacagcaccttttcgagaaattttgactttgaacttgctaatatgcaaaggaaatagtccaaccatttctctagaacttggttgataagaaattttattttgtcccatttataattttattctaaaaatttgtttttttctgctatcgagtaggagagaagggaataagggaaagatttgtttttgcactactgtgagatttttataccttaggccaggacaaagcacacaagaaataaaatattaacaaaatgtccttaattttcctttctgaccaaaattgcttgcctctgcatttatatataaagaagggatgtgttgagcaaatgaaggaggacagctaggcagacaagatttgcccagcgcctggcatacaataggggcacaggtcattgcttaacaaaacgtataatttattaatacatgctcgaagcactgctatactaaccaaatattccctgcaaaattttaaatttacagtgcaaaataagaataatttaaaaactgtttctagaaaaagagctttaagggcttccccccccataacaatttaagattaacctagaacatggtagttattttgcaagaactggggagcaccactctcttctccttgtgcatgtctgacattggaggcctattgtgcacgaagttgtgatcaaaatccaagtcaattcattttgaaaagtaacatgactacaacatccatccactccaatgagcaaagggtgtaggctttgagtatacacagcaggccacacactatgggtcatggcatacagtctagcgttggaggttgctgcatttgttcatgtatctatgagttaggttttaagttttttccccctgttctattaatataattaattagttaattaaccccactcattcatttactcagtccacagccttttgttaagagcccgcctaggacataaagatgaagatccagtgcctaccctcatgaaacatagaatccgagcgaagaaggcttactttgcaatagtcatccaagtggtgcttttatggcgctttactgctcccgccaacacccagtgcctgggtatgacctcaggcggtggcagagcccgcgtgcgaggtcccgctctccctggcttgccccggcagggcggagtcagcctagcagccgccggcgctgcccccgcgcggcctttaattttgcagctccgaccaccggaaattagtcgaaggctgagcggacccggtcgagagccggcgagctccgcgcagggagggtgcgcccaccggtcccgccgggcgcccgcgggacgcgccgccagggccctctccgccgggggctcggcgctcgcccacctcttccaaatttaaccattacctaaatccgaagggaaatgagcaaacctctcggattgggtgtcaaggtattttcagcctcgttgggcgtatttatccccaagtgtttccacaacaagctatttcggggcctgcggggcaggtttcgctctgcggacgccgtggccactcgccgggctccaggccggcggcaccgcgggccggtgattcacggtcccgacccgggggtggtgcagccctaggaggcggcggggtcgggggtggggggggcgggtgaccgaggcctgaggggcggggagggtcctcggagcggggcgccccccacccctctctcgccagtcaatctgtgtcctcaatctgtggcttctctcgctgcggaagtctccctggagccaagaatagttcattttctttcaagtcatttctagtgcctaagtgtccggacctccaatttcccccatcccctgccgacccacagggagagaactgggaggactactaaggggcgcgcgggacgggctggaaaggccaggccccccaccgcctggccacttgcgcaaaggagcgcgcccggccgcccgacgggggttgggagcaggtctgggagggctatgcgagcgactcagtaacgctcaggaagtgaagcttgtggttttgggggctgagctcggaaggagaattttttttttttttaagtcagagagatagagcggtctctcccgaaagcaagattccgtttgaaaactctcctagcgcggtgcccgcgccgtgactccgcaggtaggtccgccgagcctgttctgcgcctcctgccctggtgggggcggccgcggggactcgcagagcactggcactgcgggggcgatcagagggcgcgggcggtttcccacctgctgcggaccgccgtgcgggagcccagagagctccggcagctgggttagggcgcgacccgcgcagtgtgactggaaatctggagctgggggcgcgcagcaggcggtctggtggttcggcaggggagccaaatccaccagggaaggaaacatctggtggggaggcggcggcagctgcgctcgggaggacgcccccttagcgccctcggctccctccttcctgggcccggacggtgaggagaggcctgagcgcgcggaggggccgccccacctcccgcgccagctgcagcgcggggttgccttcccacgcgctcggcccaggccccggggcccctatctcctccaaactctgtcgctccccacaggaaccagcaaagcgggccggggtgcgagagaggcgtgggcttacagcccgggtggggaggcggcctccgcgtccgcctggtctctggtggcgccagcccagacccagctccggcgctgacagttaccccgcccccatctgtcccgctcccagccaacgtgggtccaagctgcagcgggaccctcgggacaacgccactccgtttttcttttcttccgagtttcgtggctgtttaaagaattgggtttggggtttgtggcgtctaattgtacggacgagaagtgcaggaagcgacaaagctctagccctaggagccaccccggagggaggcggatggcactctcacccctaggggcattctggcgcttgggtagcgggaaacttcgcgggagccccgcgacacgtcccaggcgtcttttctcccaggtctattcccattcctccggagaaggggacacaatggggctggggatctggagcagggggcctgcaccctacagggaccaaggcctgtaggactcgtttgagctgagagcgccaacggacagacgtagactgtgtggcctgcatcttgcctaggaagccgaggggctcctagtccggcagtggaaacagcgcgaagccggaggactgcaggtcctgccccggcccagagttcccagcaccctcgtttctgaaccagccgaggccacggagaactgctgtactgcagctcacgtgtgaacccggtcaccatcgccttcaccccgggaggaaggcagattcgtttactccagaccacctcgactgtggggtaccgcccccggagccggctggagcctagcggcaggcgcagccacgccctcccgctgcgctcagatttcgacctggtattaggtgaactgattgggggttaatgagagcgacgccccgggcagctagttccctcccgggcccgggcccgacccccgctctctgctaatgcagcctgcgcgctctggcgtcctgtcttttttgtctgctaaattgtcggtgcactaccgactcgggacacctagcatttcccagtcaacgttcgtggatcgggctccacctccctaggacaagattttttggtgagcagaacggaaagtgcttttttcccgggacctgattcccgaggttaggtctccatggtctgggatggctcgccgcagcctcgaccggtgcccgccgcagccgggagtccaagggcaaagtttctcctacgtggggcactagtgaggggcgagtgggatcacccagatgcgagtttctcctggggcgggggttggtcgtctgttgttcccctcactttcctgtccctttgctctcccacctcctttctctggcctctgctgtccccaatccctctgctgctgtcctcccgccgccccacagttttatcttgtgttctgttcccccctccccccggtcctttcactccagttggtagctggctcttggaggtcttggctccttgccccttccgggtcctcgaccactgggcatccccggcccctaaaccgatccgcgtgtccccgccctccctcgccagccgtaaagcacagccaggcaggcgatgagtagctgagttggggtaacccacccgatgggaactacagctctccagggagtttgattgccggagcgagcttcgctaggaaaggggaggagctggggggcgtgggcagggaggaggaaaggggcctgagacagggccccgggacaggttttaccgctgagctgtgtcagtggcggcggcggcaacgacggcgggttcgcgccacctgtccaagtgccacctggtaagcgcggcgcagcagggtcaagcccctcctcccgtgggccctctgcgcgcctccctggcccgcgctctccctccgcctgggtgcccagtccgccgcaccggagagtactgacccacgtctccacctggttttctttccctctcaggtctcctccgggctggggctgagcaagccctcggagtgaccgtgggtgacagcggctccagggactcttggggcgcagtggggaaagtgccggaccaccatgccgcgctcatttctcgtcaaaagcaagaaggctcacagctaccaccagccgcgctccccaggaccagactattccctccgtttagagaatgtaccggcgcctagccgagcaggtgcgaggcgcgcgcgggccaggcggggctgctcccccggatgcctactgcacctcggcacaccattagtccggagctgggaggggctgccccaacgtcccttttgctgctgtttttgtttcctactgtcctggttcctccgggtttgtctcctaggtgccatggcctctctgcgcctgccctcggatccgagagggttcccggccggggtctgggtggagaggggaagacgctcggctgccctggtcgggggattgggggagccttcagcaccctcagactcaaccggtcccagcctgagcccctcacctgcctcctctttgcagacagcacttcaaatgcaggcggggcgaaggcggagccccgggaccgtttgtcccccgaatcgcagctgaccgaagccccagacagagcctccgcatccccagacagctgcgaaggcagcgtctgcgaacggagctcggagtttgaggacttctggaggcccccgtcaccctccgcgtctccaggtaggaacccactgggaacctcttgggcgggagctgcagggacccggcagtgctgggggggaattggcgcgaccttgggcgtagaaatgctaacggggagttggagagtctttccgggagaagggagctgattcgtaggggaaggaggcatccggcttctctgggacttggacagcttgcccgctggggctgctgcctccatcccaggcggcaggaccctagctgcttgtcgcttagattcgtttgcgcggagctggccagtgacggaaaacaaaccagtcgtttcgactggcggcaacgctgacctttcattttctgaccagacctgactgttttataaagtgctaggatcctgcaatctagacccccaaacctcaaacagagaacagggcagaacgggccaggcagaggagctaggcgctgggcggcagggagggggcaggacgaaaatctcagcccgcggcttggtcttcacaggcgcagattgggg

SEQ ID NO: 1525 - DNA, 6000 bp, Homo sapiens
ctgtcattcaagttaaggcatcacacagttatcagtttgcatttattttctttgaattaatacaattaaaatatatgtaattcttatttcagtttgactacacctatcatgacacctaatccaaagacaaaaattaaatagtttgttagtatacatgaggataaaaccatggcaatatgacagggtgtggttctaacaagtacttcctgtacataaaataaagaccagttctatatctggtctttaatccaagtcaaacttttccttagtttatttttgtagtcttttaactgttaagtggtatgaattcttttggcttatgcattacataagcgccatccataaaacttgttctggtatgtatcaaggaccgtacaaataatcattgttggatctagaaatttcacccctaaaaatatatcctaaggaaataattccaaatgtagggaaagctatattcaaaaatcttttcattgtattacttaaaatagtaaaaactcgaaacaagctaaatagtaagatgagagtgattgagtaaattatagtaaactagctgatagaacttttttatagcaattgaaaatgaaagattgtatataaaaagcaaggaagatgattgtcatgatttttatttaaataatttttactataaaaagtttatattccatttaagaaaacaggaaaataaagagaatagaaaaaagaaaaataattataatattcgggaagaaaagcagactactcagttgtatctgtaatacgattataatttttgttaaataatagagcaagaatacttgaaagttgttttacagagttttattcttttcttatcagatatatgtagcataatttgtaatatagtcttatttatattattatttataatatacaaataatatagcataatttcttatacgtttatatttaaaactcagaaaccctcatttggagcattctcccattcttgctgcccaaatgaacaggtaaagagtgcaaattaaaagattgttccagctgggcattgtggctcatgcctgtaatcccagcactttgggaggctgaggcaagtggatcacgaggtcaagagttcaataccagcctagccaacatggtaaaaccccgtctctactaaaaatacaaaaattagctgggcgtggtggtgcatgcctgtaatcccagctactcggcaggctgaggcaggagaatcgcttgaacccggtaggtggaggttgcagtgagcagagatcacgccactgcactccaacctgagcaaaagagcaatacttcatctcaaaaaaaaaaaaaaaaaaaaggttgctccacagtcttgcgtggtaggtaccagtattccgactttacaggtgagaaacaggctgagagttgagctaacttatccaaggtctcaaagctggtactagcagaacagagattgacaatcacatcttactagcttttgaatgcctgaactcttttttcccttcctggtatcatcatggtgagaatcaaatgaggcaaacatagaaatgtattctggaaatgggggtattgcccctccctggggtttcaggatcacccacttttcccatgccgtcccacaaaggacagagatcataattgtaaagctttgtgaaaaaataaacaagatactggtaatatcctgttacaattttctttttgaaaatgtctcagccaggcacagtggttcacgcctgtaatcccagcattttgggaggctgaggcaggaggatcatttgaggccaggagtttgagaccagcctaggcaacataacgagactccatctccacttttttttttttaatgtctcaaatcttctgttgtagggaaattctgatctatgagaggctgcttgaaataaatgggctactggccaaggcttggaaatgtttgtggtatgagaaggtcagttgttatttggcatcgacagatacattattattgctatttagaaacaattagtttctaaatatttgaaacaattagtttcaaattattgaaaaggcagtaaatgtaaaattattcctttggaaagaccctatttatagaaaattgtgcctcaggtatacattttgcttaccattagatctatttcaattccaaaggaatatatggagggagagggagtatttgtagcttctaaaaatgttcatggaggggtggcttattctctttgcccttagtttaatagaagcaagaggtagtttggagtagcaggaagtcagagatgggttcattgtatcgttatttctagtcctagctcttcactgtccttggcaaggttcttaacctctctgggttcccctcttcttacctttctcctattcttccccaagtgtgggagtcacacttcaacactatacacccgggagtgttgtgttgttaaaaagtattgttaaatactttttaaacgtgttgaatacttgttaaatactttttaaatgtgtatttatttatttgagttagtactacatacacatggttcaacatgtaaaagacataaagggaaattcagtgccatctccctcccacctgctcctttctgcgtgtccctgttccagttctcagttttctttttcaaactcagaaatcccaagagtctgtgaagggcaaatgaaaagcaaaatgactagactaaatctgaatgaaagggatttattctaaggtgatactgctcactgctcaaggtgcttatctgcccccttcatgggctccctcaagttttctgagacttcaaacagcaacactcaactaaactataaaatagtcacagcaccttttcgagaaattttgactttgaacttgctaatatgcaaaggaaatagtccaaccatttctctagaacttggttgataagaaattttattttgtcccatttataattttattctaaaaatttgtttttttctgctatcgagtaggagagaagggaataagggaaagatttgtttttgcactactgtgagatttttataccttaggccaggacaaagcacacaagaaataaaatattaacaaaatgtccttaattttcctttctgaccaaaattgcttgcctctgcatttatatataaagaagggatgtgttgagcaaatgaaggaggacagctaggcagacaagatttgcccagcgcctggcatacaataggggcacaggtcattgcttaacaaaacgtataatttattaatacatgctcgaagcactgctatactaaccaaatattccctgcaaaattttaaatttacagtgcaaaataagaataatttaaaaactgtttctagaaaaagagctttaagggcttccccccccataacaatttaagattaacctagaacatggtagttattttgcaagaactggggagcaccactctcttctccttgtgcatgtctgacattggaggcctattgtgcacgaagttgtgatcaaaatccaagtcaattcattttgaaaagtaacatgactacaacatccatccactccaatgagcaaagggtgtaggctttgagtatacacagcaggccacacactatgggtcatggcatacagtctagcgttggaggttgctgcatttgttcatgtatctatgagttaggttttaagttttttccccctgttctattaatataattaattagttaattaaccccactcattcatttactcagtccacagccttttgttaagagcccgcctaggacataaagatgaagatccagtgcctaccctcatgaaacatagaatccgagcgaagaaggcttactttgcaatagtcatccaagtggtgcttttatggcgctttactgctcccgccaacacccagtgcctgggtatgacctcaggcggtggcagagcccgcgtgcgaggtcccgctctccctggcttgccccggcagggcggagtcagcctagcagccgccggcgctgcccccgcgcggcctttaattttgcagctccgaccaccggaaattagtcgaaggctgagcggacccggtcgagagccggcgagctccgcgcagggagggtgcgcccaccggtcccgccgggcgcccgcgggacgcgccgccagggccctctccgccgggggctcggcgctcgcccacctcttccaaatttaaccattacctaaatccgaagggaaatgagcaaacctctcggattgggtgtcaaggtattttcagcctcgttgggcgtatttatccccaagtgtttccacaacaagctatttcggggcctgcggggcaggtttcgctctgcggacgccgtggccactcgccgggctccaggccggcggcaccgcgggccggtgattcacggtcccgacccgggggtggtgcagccctaggaggcggcggggtcgggggtggggggggcgggtgaccgaggcctgaggggcggggagggtcctcggagcggggcgccccccacccctctctcgccagtcaatctgtgtcctcaatctgtggcttctctcgctgcggaagtctccctggagccaagaatagttcattttctttcaagtcatttctagtgcctaagtgtccggacctccaatttcccccatcccctgccgacccacagggagagaactgggaggactactaaggggcgcgcgggacgggctggaaaggccaggccccccaccgcctggccacttgcgcaaaggagcgcgcccggccgcccgacgggggttgggagcaggtctgggagggctatgcgagcgactcagtaacgctcaggaagtgaagcttgtggttttgggggctgagctcggaaggagaattttttttttttttaagtcagagagatagagcggtctctcccgaaagcaagattccgtttgaaaactctcctagcgcggtgcccgcgccgtgactccgcaggtaggtccgccgagcctgttctgcgcctcctgccctggtgggggcggccgcggggactcgcagagcactggcactgcgggggcgatcagagggcgcgggcggtttcccacctgctgcggaccgccgtgcgggagcccagagagctccggcagctgggttagggcgcgacccgcgcagtgtgactggaaatctggagctgggggcgcgcagcaggcggtctggtggttcggcaggggagccaaatccaccagggaaggaaacatctggtggggaggcggcggcagctgcgctcgggaggacgcccccttagcgccctcggctccctccttcctgggcccggacggtgaggagaggcctgagcgcgcggaggggccgccccacctcccgcgccagctgcagcgcggggttgccttcccacgcgctcggcccaggccccggggcccctatctcctccaaactctgtcgctccccacaggaaccagcaaagcgggccggggtgcgagagaggcgtgggcttacagcccgggtggggaggcggcctccgcgtccgcctggtctctggtggcgccagcccagacccagctccggcgctgacagttaccccgcccccatctgtcccgctcccagccaacgtgggtccaagctgcagcgggaccctcgggacaacgccactccgtttttcttttcttccgagtttcgtggctgtttaaagaattgggtttggggtttgtggcgtctaattgtacggacgagaagtgcaggaagcgacaaagctctagccctaggagccaccccggagggaggcggatggcactctcacccctaggggcattctggcgcttgggtagcgggaaacttcgcgggagccccgcgacacgtcccaggcgtcttttctcccaggtctattcccattcctccggagaaggggacacaatggggctggggatctggagcagggggcctgcaccctacagggaccaaggcctgtaggactcgtttgagctgagagcgccaacggacagacgtagactgtgtggcctgcatcttgcctaggaagccgaggggctcctagtccggcagtggaaacagcgcgaagcc

SEQ ID NO: 1526 - DNA, 6000 bp, Homo sapiens
ccaggatagcagctgaggtggaacatccagtgggctgcatctacctatcatcagttcatgctgtccttctgtctgtctctttgggcgagcctgaggttgttcatgtgggatgatcctccaagccccgcctcatgcagacagcagcggccagagattttcagaagcctcaactcccaccttacctccagatatggggtcatatatttcctttaagggagttgtgttttgtgagtaatttttaaaatttacaatatataggctgtactattttaaagtgaagtgtttcatctggggtagggtgaactaatcaccaaacatactggaggaaatggtgaaaaactcaaaagaaagataatttttgcattttctctcgtttgattttccattcacaaagcaaactatactccttttttttcctataaaagttcacactggctgtgtttctatgaggagtcatatcacatagctcacagtaagatgacacttcgttcaatctattcttaggaacaatgtaaaaatacgtatgtggtgagattaacaattttcttatttgaactctgaacaccaaagctgacagtctcctccctcttcagatgtttgaaatcctttatgtaaaagcctaatttaaactttatagtaatagataatatttttaaatgtaatgagatttaaatatatcagtcccaaaatgtttattaaaagcaaatgtttttcttcatgtttgaaaagtaaaaaatattaatacaaagttggttcttataccttaagtcttctattaacttatctccatgtttctcctttacttaatttcccaatttttgcatgagctggtacaaaaaacattacccacttcccacaaatgatggtaccattaaatcgtattctgacttatggtgtcagtggaattctattttgatagcctgcttcttataagattagaaggggataattatattacctgtcattcaagttaaggcatcacacagttatcagtttgcatttattttctttgaattaatacaattaaaatatatgtaattcttatttcagtttgactacacctatcatgacacctaatccaaagacaaaaattaaatagtttgttagtatacatgaggataaaaccatggcaatatgacagggtgtggttctaacaagtacttcctgtacataaaataaagaccagttctatatctggtctttaatccaagtcaaacttttccttagtttatttttgtagtcttttaactgttaagtggtatgaattcttttggcttatgcattacataagcgccatccataaaacttgttctggtatgtatcaaggaccgtacaaataatcattgttggatctagaaatttcacccctaaaaatatatcctaaggaaataattccaaatgtagggaaagctatattcaaaaatcttttcattgtattacttaaaatagtaaaaactcgaaacaagctaaatagtaagatgagagtgattgagtaaattatagtaaactagctgatagaacttttttatagcaattgaaaatgaaagattgtatataaaaagcaaggaagatgattgtcatgatttttatttaaataatttttactataaaaagtttatattccatttaagaaaacaggaaaataaagagaatagaaaaaagaaaaataattataatattcgggaagaaaagcagactactcagttgtatctgtaatacgattataatttttgttaaataatagagcaagaatacttgaaagttgttttacagagttttattcttttcttatcagatatatgtagcataatttgtaatatagtcttatttatattattatttataatatacaaataatatagcataatttcttatacgtttatatttaaaactcagaaaccctcatttggagcattctcccattcttgctgcccaaatgaacaggtaaagagtgcaaattaaaagattgttccagctgggcattgtggctcatgcctgtaatcccagcactttgggaggctgaggcaagtggatcacgaggtcaagagttcaataccagcctagccaacatggtaaaaccccgtctctactaaaaatacaaaaattagctgggcgtggtggtgcatgcctgtaatcccagctactcggcaggctgaggcaggagaatcgcttgaacccggtaggtggaggttgcagtgagcagagatcacgccactgcactccaacctgagcaaaagagcaatacttcatctcaaaaaaaaaaaaaaaaaaaaggttgctccacagtcttgcgtggtaggtaccagtattccgactttacaggtgagaaacaggctgagagttgagctaacttatccaaggtctcaaagctggtactagcagaacagagattgacaatcacatcttactagcttttgaatgcctgaactcttttttcccttcctggtatcatcatggtgagaatcaaatgaggcaaacatagaaatgtattctggaaatgggggtattgcccctccctggggtttcaggatcacccacttttcccatgccgtcccacaaaggacagagatcataattgtaaagctttgtgaaaaaataaacaagatactggtaatatcctgttacaattttctttttgaaaatgtctcagccaggcacagtggttcacgcctgtaatcccagcattttgggaggctgaggcaggaggatcatttgaggccaggagtttgagaccagcctaggcaacataacgagactccatctccacttttttttttttaatgtctcaaatcttctgttgtagggaaattctgatctatgagaggctgcttgaaataaatgggctactggccaaggcttggaaatgtttgtggtatgagaaggtcagttgttatttggcatcgacagatacattattattgctatttagaaacaattagtttctaaatatttgaaacaattagtttcaaattattgaaaaggcagtaaatgtaaaattattcctttggaaagaccctatttatagaaaattgtgcctcaggtatacattttgcttaccattagatctatttcaattccaaaggaatatatggagggagagggagtatttgtagcttctaaaaatgttcatggaggggtggcttattctctttgcccttagtttaatagaagcaagaggtagtttggagtagcaggaagtcagagatgggttcattgtatcgttatttctagtcctagctcttcactgtccttggcaaggttcttaacctctctgggttcccctcttcttacctttctcctattcttccccaagtgtgggagtcacacttcaacactatacacccgggagtgttgtgttgttaaaaagtattgttaaatactttttaaacgtgttgaatacttgttaaatactttttaaatgtgtatttatttatttgagttagtactacatacacatggttcaacatgtaaaagacataaagggaaattcagtgccatctccctcccacctgctcctttctgcgtgtccctgttccagttctcagttttctttttcaaactcagaaatcccaagagtctgtgaagggcaaatgaaaagcaaaatgactagactaaatctgaatgaaagggatttattctaaggtgatactgctcactgctcaaggtgcttatctgcccccttcatgggctccctcaagttttctgagacttcaaacagcaacactcaactaaactataaaatagtcacagcaccttttcgagaaattttgactttgaacttgctaatatgcaaaggaaatagtccaaccatttctctagaacttggttgataagaaattttattttgtcccatttataattttattctaaaaatttgtttttttctgctatcgagtaggagagaagggaataagggaaagatttgtttttgcactactgtgagatttttataccttaggccaggacaaagcacacaagaaataaaatattaacaaaatgtccttaattttcctttctgaccaaaattgcttgcctctgcatttatatataaagaagggatgtgttgagcaaatgaaggaggacagctaggcagacaagatttgcccagcgcctggcatacaataggggcacaggtcattgcttaacaaaacgtataatttattaatacatgctcgaagcactgctatactaaccaaatattccctgcaaaattttaaatttacagtgcaaaataagaataatttaaaaactgtttctagaaaaagagctttaagggcttccccccccataacaatttaagattaacctagaacatggtagttattttgcaagaactggggagcaccactctcttctccttgtgcatgtctgacattggaggcctattgtgcacgaagttgtgatcaaaatccaagtcaattcattttgaaaagtaacatgactacaacatccatccactccaatgagcaaagggtgtaggctttgagtatacacagcaggccacacactatgggtcatggcatacagtctagcgttggaggttgctgcatttgttcatgtatctatgagttaggttttaagttttttccccctgttctattaatataattaattagttaattaaccccactcattcatttactcagtccacagccttttgttaagagcccgcctaggacataaagatgaagatccagtgcctaccctcatgaaacatagaatccgagcgaagaaggcttactttgcaatagtcatccaagtggtgcttttatggcgctttactgctcccgccaacacccagtgcctgggtatgacctcaggcggtggcagagcccgcgtgcgaggtcccgctctccctggcttgccccggcagggcggagtcagcctagcagccgccggcgctgcccccgcgcggcctttaattttgcagctccgaccaccggaaattagtcgaaggctgagcggacccggtcgagagccggcgagctccgcgcagggagggtgcgcccaccggtcccgccgggcgcccgcgggacgcgccgccagggccctctccgccgggggctcggcgctcgcccacctcttccaaatttaaccattacctaaatccgaagggaaatgagcaaacctctcggattgggtgtcaaggtattttcagcctcgttgggcgtatttatccccaagtgtttccacaacaagctatttcggggcctgcggggcaggtttcgctctgcggacgccgtggccactcgccgggctccaggccggcggcaccgcgggccggtgattcacggtcccgacccgggggtggtgcagccctaggaggcggcggggtcgggggtggggggggcgggtgaccgaggcctgaggggcggggagggtcctcggagcggggcgccccccacccctctctcgccagtcaatctgtgtcctcaatctgtggcttctctcgctgcggaagtctccctggagccaagaatagttcattttctttcaagtcatttctagtgcctaagtgtccggacctccaatttcccccatcccctgccgacccacagggagagaactgggaggactactaaggggcgcgcgggacgggctggaaaggccaggccccccaccgcctggccacttgcgcaaaggagcgcgcccggccgcccgacgggggttgggagcaggtctgggagggctatgcgagcgactcagtaacgctcaggaagtgaagcttgtggttttgggggctgagctcggaaggagaattttttttttttttaagtcagagagatagagcggtctctcccgaaagcaagattccgtttgaaaactctcctagcgcggtgcccgcgccgtgactccgcaggtaggtccgccgagcctgttctgcgcctcctgccctggtgggggcggccgcggggactcgcagagcactggcactgcgggggcgatcagagggcgcgggcggtttcccacctgctgcggaccgccgtgcgggagcccaga

SEQ ID NO: 1527 - DNA, 6000 bp, Homo sapiens
taccccagtcctgcatgtggactcctcctccccactggccaggcctggagaggggcatcttaggagagggcccctaggatgacttctagacaccaacaaatacccttctttctcttcactccacttgttggggagggaaaatcaggcctgccaggcacacattttctcatttcttatttcctgtttcattacatcattcaggtctgtataaacgtcatgttcttgtgacacctccccaaccaccctattttactggacagccctcatcccctccccggcacttcctgcctcctttcctggtttacttcttccctgaccttacagctgacataccatagccactggttatttatcctcactaaaacagaagctccccaccaaaaacaggagctccataaggtgggctcttgtgtgccactgtcaccactgcatcccctgagcctgcagtggtgcttggcacgagtaggtggtcagtgaatagttcttgaatgaatgattggctcttctatgaatttgatctttgaaaaactaaagagctgacccaagaagagacatagtagcattgtcttctgttggcccagagaagtgggtagccataagcttttagaaggaatgtgaatttgcctttcctactcctcactcacctttttgtcccaaaggtgtctgaaaaccttgtgcagcgagatggtgacttcctagttcgtgactctctgtccagccctgggaactttgtcctgacctgtcagtggaagaacctcgctcagcacttcaaaatcaaccggacagttctgcgactcagcgaggcctacagccgcgtgcagtaccagttcgagatggagagcttcgactccatccccggcctggtgcgctgctacgtgggcaaccgccggcccatctcccagcagagtggcgccatcatcttccagcccatcaacaggacggtgcctctgcggtgcctggaggagcattatggcacctccccaggccaggcccgggagggcagcctcaccaagggaaggccggatgtggccaagaggctgagcctcaccatgggtggcgtccaggcccgagagcagaatttgcccaggggaaacctcctcaggtaggtcagggcctcctctgcaggactatgaggggcgccggggtgcccaaggttagttaggcaggtgaagaattcatcatggaacaaagaaataaaagatgttaataggaatgccgactgttcgcagaatagctgtcacgaggcagtgaacaattagctcccagctgagcagtgtcagcaatgaatggtacaggagctgaggaagaatttcggggggtgctgatggggataccttgtgaagggggtagacttaggctggtctgatggctgggggaaatttggatagatgctgcaaagggctgggggtgttccaggtgggaggcatagcatgggcataagtgtggggacagaaaatggtatgaagagcttgaagtgaatgtgctggtagggctggaacaaagggtctgtgcaagggacccgtagcagtgggcttagggagatagccccagccagatcatgggggccttaatgccaggtgcagggctttaagggagctgtacagactcagcatagcgaacacggtgtcctaagaatagaaatggacagtgatgtaccgggggtgaggagagagacaggaacaggaaacccagttagtgagtcatggagggccccggctgcaggagtggagtggagggagagtcaagagatgtaggagcctggcctcccaggactcttcttcacgtggtagagtcagaggagggcacattggagaccacaggagtgaccaggagggaggggactttggaggataaaacacactttttcatctgagctggaagactatgggcttgttgagtgccacagtccagcagcagttttggggtccaggaggggagttagagctgaaaacttaaattagggcttggtccacctggaaagggtggttcacttggtgagaacagatgagatttctaagataggagatgcagagaacatggggtctgtagtctgaatctcagggaatgggggaagagaaagattcagggcacttggtggaaaatcaaggcttcaaaacctcactgatcctaagcacccagctgtcaaatgtcagcgacgttggcctgcatttgtatagggcccgtctttcacagagctcagagtctttgtgcatattatctaaaagcactgggaaaggaaaggagggaaaaggcaggcatcggggacatagatccagtccagcccctcagtcacacagcagccctgacccggctcccagcttctaatcttatgcacgtaaaccaacatattttattctactcactggtttttttttttggcgggggggtccatgaggaaatgtcataaactgtcatttctatactgcaaaacttagggaggaaaatacaggactctgtgtggaatgtaaatgacagctgtgtgctgcctggaggctccggcacatgctagtcagcatctggctggggacccagtagccaggcacaaatgccggctccacattgggcaacttttcaaccatgggcaagcgacttgaccttcctgggcctcaccttcttcatctagaaagatggagcttgtgaggtgtacatgatttaatatatgcaaagtgctcagaacagtgcaggcacagaggaggtgctagggaagtgctcatgataattattatctggaggagagtagaatgtcagactcagacccagcacagtggctcacagctgtaatcccagcactttgggaggctaaggtgggcagattgcctgagcttcagagttcaagaccagcttgggcaacatggcacaaccctgtctctacaaaaaatatgaaaattaatataaggagctcaaacaactctataggaaaaactctaataatctgatttttaaaatgggcaaaagatttgctcttttgagaaatgagtatttctcaaaagaagacatacaaatgggctgggcatggtggctcacgcctgtaatcccaacaatttgggaggccgaggcaggtggattacctgagttcaggagttcaagaccaacctggccaacatggcaaaaccccatctctactaaaaatgcaaaaattaaccaggtgtggtggtgcacgcctgtagtcccagctactagggaggctaaggcaggagaattgcttgaacccaggaggcagtgagccgagatcatgccactgcagtggcaaacaggcatatgaaaaggtgttcaacatgattggtcatcagagaaatgcaaatcaaaactataatggatatcaccttaccccagttaaaaaggcctatatccaaaagacaggtaataacaaatgctggtgaggattgtggggaaaagggaaccctcctacactgttgaggggaatgtaaattagtacaaccactatggagaacagtttcgaggttcctcagaaaactaaaaattgagctactatatgatccagcaatcccactgctgggtatatacccagaagagtggaaatcagtatatcaaagagatacctgcaccaatgtttgttgcagcactgtttacaatagctaagatttggaagcagcctaagtgtccatcaacagctgaatagataagggaaatgtgtatatacacagtggagtactattcagccataaaaacaatgagatcctgttatttgcaaccacgtggatggaattggagatcattatgttaagtgaaataagccagacacagaaagacaaatgttctcacttatttgtgggatcaaaaagtcaaaacaactgaattcttggacacagagagtagaaggatggttagcagagcctgggaagggtagtagtgggtggggagtaggggatgggagggaggtggggatggttaatgggtacaaaaaatttagaaagaatgaataagacttatttgataacacaatagggtgactgtagtcaaaacaattatatattttaaaataaagagtgtaattggactgtttgtaactcaaaggataaatgctagagggcatggataccccattctccatgatacacttatttcacattgcatgcctgtatcaaaacatctcatgtaccccataaatatatacacctactatgtatgcacaaaattttttaaatataaaaattagctgggcatggtggtgtgtgcctgtggtcccagctactcgagaggctgaggtgggaggattgcttgagcctgggaggttgaagctgcagtgagccatgaccatgccacttcactccagcctgggcaacagagcgagagcctgtctcaaaacaaacaaaaaaactcagggcaattgcaaggagggaggcaagacctgatatttagaaatcctccttttcatagtaataggattggacttgagatgccttacagtgttagaaggggtaccttttcttctgtttcctttgggaaggataggctgctgaatggtcgaagcagggaattaatgtcatgcacagagtgggagtgtattcggcaggataacagaaccactgctgcagggaaggcctcctagttggccctgaatgatcctggtttaaaaactttttaagataagaaatgaaaaaaagactaagtctcttaagtcaacaagtcaggcctaatagagccacttttctgtttgccctttggaatgcagatcctcctagaacttgtcaccactttgtacacgcagcacgcccagaaatgtttaagtgggaggaggggaaaagatggctcatggcctgctgccctgccccagtgtccttcagtggctcccttatgcagctctggccaggtgccacctgccctgacgtcgggcctgctagttggctggctggtggcctgccctgggcgaaggtgtgtgctcacaggcaggttgcattccacaccctgccgttctggcccctggagtccagccgcagtggtcactgcttaaatatcacttctcgggagatatttccttttgtaatttgccctcggtcttgtcttatcttcgaaaggttgctggaatttctctgttccttggagtttgggggttttttgatttgttttttctttggtgcttgtaaaggtaggaaagaacttcgtgatttctgtaacataacaatgttttatgcttatgggaaggccaattaaagttcataacaacttggctggtgcagtgcctctgtctctagctagggagattctggtgcttggtgctggagaaattcccagtctgaattggaaagggacagaaggaataacagcgagtgtgttgaaagttaccttccaccttttccttgtgtggttacacagtgtgcctcccaactgctgcttggtgaccgtgccggtgccttttcccagctcagcaggaggaggctgtgtgggggtcccccgagagcagccaggaggttggggatggcagcctccccaggcagtcctgcaggttatttgggggatgctgagatttgcaccaaaatggaagtttccccacagcttccttcctaactgcaacactatggagcatgtggaaaatgcatgttagttaggcaagccattccctctgggcctgtaagtaattttaggctctgttaaaagtacacattccagttcatcagattttcccgggagtatcgtaaaacttttaccctactctgttcaacaggatggaacagcccagaggaggcatcctaggactcagctgctgcattggtcatggggacagggggatggagtacacaacacagtcatatattaatcgtcccatcagtaatttgtttctccagcggtcattcctttacttttagggtatgctgtagcactctcgttctgagcagttttctttttttttgtttttgtttaagttcccatggcattgcctaaaagttttattttacacgttagtaacacatttccatcctatgtgtcttttacttcagaaacaaagaaaagagtggtagccagcccgcctgcctggatcac

SEQ ID NO: 1528 - DNA, 6000 bp, Homo sapiens
gcgtggtggcatgtgcctgtagtcccagctactcgggaggctgaggcaggagaattgctcgaacctgggaggcagaggttgcagtgagccaagatcgcgccactgcactccagcctggcgacagagcgagattccgtctcagattaaaaaaaaaaaaacaaaaaaaaaaaaaacccacggcttcaggctggtaaatgcctaaaacagagcaaaacggaacaacatagtaaagcggattggacaagttctaattgtaaagcattgcaagtatgtgtcttttgctctagaaggagggcccatgactttcatagaatctcagagaaggccaagatcatcagatagtgagtctgccatttgagagcttgggattatgtcctgtatgtattctttctttttcttttctttctttttgcctgaacgctaaaaacagaaaattgagcttgtgtaatataagatttctggggtgacaccaggaactaggtggtagtggtagagaggtgaatggggcagaattgtgtgtgatagcgtaagaaagcaaaacagggcacagtgcctaattttgcttcgcattactcagttatacaattttaatagctagttagagaaacagaaattggtaagggaagacagaaggcccagcagagagaaatctgctgtgaagactgtactttagtctctttgtttatgtgctaggcagatcaatattgcttccggatagagaccatttaacagccatactctttcatccccttgaggaatctggggaaactgttagaccaggatatgtacagcacgcactcctaaatgtactgtctgtgttcaccagggcaggcgaacgtcttgtccacagcaatacacaaagggggccagagggcgcaggcattgttgcctgccctcctcccactaagtcttgtttgcattccctttcggagcaagaaatcaatcagatttgcatatagggaaatgtgtagaactgtctttggcagcttctgtagctactgagcctggctggaagaggagctgaccttttgcacaaagtcctttcctcctgtcctccctggtttcccagctctcctccctcaggccctctggctctttgtgggaaggtgtgtgagctgctggcttatttgttcagaatcaggcagagatagggtgggtgctggggaagtcttgagaagcaaggctgcggatcaacttgcccctttatctgcctagggcttcccaggcacctgccacactgctctccacagagccgagtctgcagaggctgtcctcaccgtgacgccaggctggtgctgagtggggcaaggtccaggctaatcattgcctacttcccagggcaccaggaaagatggagctggttgcatcagcctcatgccctggctcattaaagctgtctttgttcagcaagagccagatcacctgggtttaggggaagcaaaaagccagaaagcattgatctttaggggagagggagtaggataaagggtcttagtagttgccacaagatgttttgagctgttctgatcacgattactggtgttcacccctgaccgatgtccctttgggcaggaacaagccaggccttgaagcctggggtgagtcactgtcctctagccatgggcagagtcactgtccatggggccgcttgacaaagcccaagagtgcctcagtgtaaggcttgatgccctgattctgggctgctttggggagggtttggggctatgggcagtattacgttccagatgtgctgaaacagtgaaaagcaggtacctagcaggcatatctttctcctgccatctccctccatgccctgttggagagagggcctacctcactgggagcctgatcttctagcagggaccgtggtgctttgggaaaaggactctgcactcactctcttggcccttctcagctgaggggctgctgccaacaggaagcatgtgtctgctgaatatggctggcaggcagctcctgtttccatggttactaaatagggcaggttagtattagggctgcccaaggaaaaactggcattgagggcagtgcttatgcaggggtcttcctccggcctgccttaaccccctttttgaattagagggtgggcaacatttggcctgaggtaatagaggtttccttcaaggacccacctggcttcccagccatggctttaatcacaagtgtttccctcggtgcaaaggagtgagccttccaggcagccagagaagggcggtggatgggagttcaccctgtaggaccttttccagagctcagagctgcctgactgggcccctcccttcctcagtccctgggagttccttagaaatgccctcccctatcccgaaaggggcatggtgtttagaaagccctgtatccaaatttgatgagtcccaaatcccacacaccagatcatcagaaagtggcccactgccccaggtcacagccctttcacggggctgtgtgagtaacaggtttaattataagacattaaaaaatctatttgtgtttctatgtgatcagataccagattctgcagtctgaggttggagtccctagccctttgttctctgctgagtggtacacaggtctggtcctctatttctttgtaactagaataatcattgtggggagaatgggaggaattgatcagcgtaaataggcagcgtttaaaagcttaacaagtcagtgaagggcactttgagaatgtatgcaattatcatctttagttacaaaaacaacacgttattttagtctctctccttgaccgtttcaggagaaaattgattaaaacctttgagtgctgcttcagaaattatttttggtgtgaaataaaaataaaagatgcttaggaaacagttacctaataagattagtcattatttaatcccggtggaacaaattctttgggtattttggagatattcttagaataaacagagaaaacctcaggtaacaagagctgtgataccacagtgacctaagtgtctttggttttgtttttaccctggctgtggagcactttattcgtaattctatgtgatttacatgtctgagttatttgcatattactttcaggaatgcatttcattcacgatttctgggggaagggtgtctgggcttcggagtctcttggctgactaatctcacgaatttctgtgcaggatttcagtcactgcccccctcccttttctcaggcctgggatggtgcctgtctagcctcttggggaggtttttagcttgaaggaatcgttatttgctctccaaggagaataccaggtgaaaatggcccattctgtggtggctaatggcctgattgatgagtcatgctcacagaactgctggggcctgggcctggctgctcacacggacttaccctttgaactccatctaacggaaatgagggcaagccagaaaacgcttcctcacaggtgcggtactggaccttcgaggacagtggggacccactgaccagacagtcttcaagggctcttccagctcagaaaacccttctgagttctgccaccttggtgcttccttctaggttctctggtggactttctgtggcctgggagccgtcaagactgcagaccagacctccagagtcagagaggagaatgagtgagggaggaaagcagaaaggaagtcatcgcccacactcgctgtggcaatagcgcctcacttagcagctccatccccatgttgacacgttgatgaggccgggcccttgcccttgcgtgggtgtgagactgtggctctccatacctgctcactgggcccagagcaatttcctatttttgtgggcagacttgacctagtccaaaggccaaggtctcccgaggatttgacgctaatcccgttggatatttctcatacctccctcatgcctcatctggtattgttcctttctggactgaatagatcttgtttcttcctcattacaagtttctgcctgtgtgaagttttagaaagcttcaggacacattccatatttgaggccgaagccacaaaaagttaatatttggagcggtaggataggagaggaagagctacaggcagaaatctggatttgattaaaaaaaaaaaaaaaaaaaaagaactcgttgagcatccgctataactggaatgaagggaaaagcagttagttttccctaaaggtgttatgtggctcttggtaggggtagaggcctcaggtcgcagggaatccaggagggccttgcttggctgcgttggatgcgaggtttgtgtgcaggatctaggttacgcaaagtgggtaatcagagtggcgatgagtaattaaagtgaaggatttaaaggaaggtataggacaaacagttgagtcagaagtgggtacacagtccccatcctcccaacaggttgcacagccaggtgggagggcatagggcgctcagggtgtttgctgacagacttgctaattaaacaccaaaaggcaatattgctttgccagtagtgatggctgtgccaacgttatcagctgcaaactggctgccaggagcatcttaattaaaaataaacagctctggaggtgggcttgggagagtgaggacagggatcctgcctgggttacttagtacatctagtatttctcctagggaaagtcacttttaggccacctcctttcctcaaaggagcctctgttcataacaaggtggtgtgaatgtacaacttaccctgcttccttaaacctctgggtgctggagtgacaagcagacagaaccactaggagcaggtcgcatggtacagttcagccccagaaggaaattctgggtcgggggagaggggctgctaatgatttctgcctggtctctaaattgaggggacagctaaagcccaaggcctcttctaagaggggttagaatttcatcagaaagcaagtctggtcacatgagaatttctggcactgtgtgcatggcaggctggacaccagcctgcgagaattgagcgagtggatcgtattggcttcagcagaggggaaaagtcccagactagcctgggagaaggagccgactcactcccccggctgccgacttccctgacttctgggcagaaacagcacagctgctgtggtgggctagggctttaacgtccgaagccccctttcttttaaccctaaagaaagtgtgtggtccccgggactgaagaccgaaagatgcctaaggaatgcagtgctttccacgccctctcagcagctctgtgctgcttctatcaccgcaagtctttcattggagtcaaggtaggtttggtttggaaataaagtacatctgtcaatcttttgggggaccctgaaagcatgagtttcctaaagggcaatagataaaagtttgcagcttgctgattgtgaaaacagaggtgctttctttgactgatgggtcttcaagagcccctagtggtgtacctcccctggaagcagaacccagtggcacagaacagggctccttgtctgttttgggctgaagctgtttttcaggacactttcagttctctgtaggctgaaattttatactaaagtagctcaataggacagagctatttttcttctttctctctttgtctctcttccttcatttctaacgaacacaaggtagctgagcccttttctctgtttatcctgctggtccattacttatcaataatgtacataatgtacagaagccacacaatatttcctttcaaattgcagccaggtttcaaaacatctcagggttcagaactgttgttgtctttactgctcacattttaacatttgttataagacaccggtgccaagagctttgtataatatgtcaatacactattttgatgaaaatattcagagaacctcctttggctaattcaagatgaggcctgtgttctatttgcctgcctgtgacgcactaggaattaagattaatataggctttcgtggatcttggggtttgtctgccttggaaaaagcctgtcggccccagcctgactgcggacctcgtttattcctgggaaatt

SEQ ID NO: 1529 - DNA, 6000 bp, Homo sapiens
gctgcagaggaaagccactggggtgggggctgcatgtacatggcccccacagaggggtcaggatctgcctgccaccagcagggttaggtaatgcccatgggtgcctgtacagtcggggaagaagagacaggagaagggaagaagaaaagaaaaaaaatggtggggggcaaaggaagcatggaaagggaaaggagaatggcacgtcaggctgtgtgcagcaagtagccccgacactctctcctatctaggaccatgagtagaagcatttaccctgagcagagtcagtgcctccagctccaaagcaaactatggttttggcctaagacaaattatataatacatttttaaggccaacacacagaggaaaagaaataggagacaaaaaaaaaaaaaaaaaaaaaaaaaggctggcccctggagatagaggctccaggatctgtcttatactagtcatgatatcagactctggtctggacagcactgcagggtggccaagcccaacatacagcccttcccacgggctggtgaggagagctgccccttagtctgttctccaacccagcagccctctttcctcacaaaccaccctttccactgcattactcagggaagagctttgcatgaaaatcctcacttaatagcactactgcagagtcagttctacaaaggaactgcggacttgggacgtggtttgaagacaaccaagaagaatgcaaccctccacaagctgatagaagtggagccgagacaatgacattagagtgtgtaaagaaaacgcatgtgtttgtatgtgtgtgtacaacaaaacacacacgttccactgcttccacatgagataggggaaagtacagaagtcctgggggtgagatggaaggagcatctttactgaaggtgtacaatcttaactctgtcctcggttcattgtcaaatccagtaattctgggggctgcctgctccacgtccaactgggaccacacagaaggtctgctcacagtgggtgcagaacaataggacagagtcctgtgcagcccctcccagctctggccagtacctggcacactgtcagcacttgctcaatgctaaccatccttattagaaaggaaaccaaactccctagccccaccgcctgaacacaagtgacgtaaaccgactaggattcttccaccctacacacacacatacacaccacagttgtgacttctcacagacaggactgggtcatttcaaagaacctcgtggggaggcctgcagcaccctacagaacttcttcatgtgcatagggccacactgttgatcaaatctatttccaatagcatgatgggcaaaagtcaccctagcaccactgcctttggcagcctgtttcctctctgcttccccaagatctacttagacttcaagattgtcctaaagtgttctaaaatgtccttcaagttaccaacacctcaatttattctccaataacaagggatgttaatacttccccttcttaccttcaattcaacaaacatttaagtgcctatttcatacaagacacctggagaaacaaagatgcctaaggcccaatacctgactatgaactctaagagagaataattcatagaggcccttatgctgaaaggaacaattaattttgacaaaaggacttgagaaggctcagagagggcaacaatagagacaaagcattttgaaaagttaacatgtggggaaaagcctcccgggaggatggcagatgcataaaggcatggaagtgaccccacaggctcaggacattcccagttgtgtgctgtggctcgagtgaagccgagaagcatttcccagaagcaacttaggttagcatcagaccatggagtcttgaaggccctgccaaggtgtctggacttgactggaagtgctagggaagatctggaagggaaggaccgaacccagtctgtacccaagtaggtgactctggttgttctggaggggagagaaaaaggaggcagggaggttactgaggctgatggtgaaacccatggaggaacaatgaagaattctgacctggggcagcagctgggtaaagggagagaaaggagagagtgatgagacatcagagcttgaggcatctggctggaaggaaggagcctacagccacagaaggtggtgcgatgctgtaacatgccaactagtttcagaaggggacccacccctgcaggaaccaagcacagcactggagctgctgcatgtgaggtatcagcaaacaatttggtctaagaggaggttagatactggtatgcacaattagaagtgagggcagatggagatttttaggaatcatcaacataaaggcaatatttaaaccagagagtagatcccttaacttgttattatcagatgtgataacagctgtgaagtacctcttaaactgtcaggaatcatacaatacccatgaattatacccctgctctctcttaccatggcttcttcaagcctataaggaccaaagcaaggaatgagttctactataaaaacgtaaaccattggttctcaacctggctacacataagaatcctctgggaagcttttaaaatcctgatgcccaagcctcagcccagaacaataaaatgagaatctctgtgggcgggacattagcatcagtctccagtattgaccaatgtgaagccaggattgagaaccactggattagtgagtctttttggtacacagcaattgagtcataattgtttacctgcaaaacagaattcaatgatgatgaaggagtatcattcaatcaatagaaacattgattcttcaatgcatacattcatggagggtctcctttatggctggcactatgctaggtgttggggacagcattaaacaagacagaagtggtctgtcctcatgaagctaataatactctggaggaagcagacaataaattatgaccataagtactggtaattcccagtccatttttctagataagggaaataaatgttcatttgatatatattctctgagggcttatggtgtaccaaggctaaggatataataaattagacaagctcctgctctcatggaggaatccaacctatacaaacaagaaaatgagttaacatccaagttgtaagcacgctaaggaatataaacaggatgaactgacaaaggatgactgttgcgggtggagagctactttacattagggtggactgggaaggcctctctgaaaaggtaacaatgacatgagacctgaaaaaaggcaagggaaggagccagtcaaaaaaaggtctgaagggggttccaggcaagggatctggcaaatgcaaaggtcttgccataggaacaagcggttggaatgacagctgatggagactaaacccaagtctccagcctctggctcccatgttttctccacttggaaatatttctgtctcaatgtccctagtcattatatacttcttatgtaccatttgattttttaaaaataaaatggtatgactcagaacctaggctttggaggcagatatctacaggttcaaatctctactctgccactgacttaccagctgtatggcctgggacaagttactcaacctgacggtttctcattttaaaaaatgacttaacagctatttcataagattgttgtaaagattaaaagtgattgtgtatacaaagttcttgaaatactgcaaacacttagtaaatagcaggtcccctctaagcaggacaggggctgctcttatctatcttgtcagataagagtcactgtatctctgttatactgagggttcacaaaggaagtaactctgagagttcacaaatgaagactgcaactgggaaggatggggagggaaacgttttaacctagaacaatagatgcaaagacaccaagccaagtaggacatggacacggacacagacacagacacacgtacaggcaaaccaagtgagcctacatgcagtctttagaaaaaagcccaggtgagactctggccatctgacttctctctactgtgcaggaaaacaaacacaatgtcctgactcagtctaatgccagattttgaaatattatacaaaagtcaaagactctgcatcttgatatgaaaatctgagactcatgtgaacatcaggaacaagagcgaggctgacaaactttaccacatgtgctgccttcctgggcctggtcagtcgctgggctttgaaatgtttgtgaactgaggcccaactcacttgctttacaatgatgtctcaaagaaactgatgatcttgcaagctgaggcagagataagcagcccacttgtttggattttactcttttatttctgaaacgggatattttcaagtttaactcataatggttatctgatgtgagctttaagaacttttcattatattttaaactctggaaatgtaaccgtctcggctgccccatgacagagaatttacaacttggatctgtagttttataacttctctggagagtcagatggagagaggagatgaaacaaccacacatattcaattggcttatccacttaaaatgaagttttgcttgggtttaggaattaagagtatctctttatttttgaagtaaacttatgaagtctagccaaatgattcaagtatgaataattcctccatggattgtatttcaagcaacacagtacaggatttacccgataaggttcttaagattagcatccatttgacaagcagttctgcctatatgaacaggagatttagaccttggttagtcatcctggaaatgccagccttctcagcagcactttagagaaagttggagttggagtggtgtgggatcccctggcttggcaaggtctttacgttatcctcaataccccctggcacgcccgcagacaagcgctttgcctgtgggcttcccattgttacccgggtagccccttcccacttggacctgtgttgagctgggccccacccccagcactgaggcctctcccagcctccaggatctcaactcagtcccaggcaacacaagggaggctatcagctcccaaaatgaccttccctcggccagcgtactttccttggggaggtctgtgtagccttgggagataaagtcaaggtttaaaacaatctgaatgcacggctctactttccatctcagctaacagctttaagcgaaaacagatatgaggttaggaaaatggtttttctcctttgcaccttgcttcaagcgagttaaccccaaccatgacccgacccgccgccccacggaacacgccgccttgccagatgcttcggagtccgctcaacctcctcctcgacgagtgtctacacctgattacaccgttttaaagcggcggcgccctcagcggcctaagtgggtaaggacagttgggctgtacgatctatcggaacctccttcccaccgtccctcccttcctttgccttccctcgcctctccccaccgcgacgcagagggagcaacacaaccaactattcattctttctcaacaaagggagagagggagggagatgttgtcaacagttacagggcaggctccttcgctttctttgcaaacttcccaagagattaccggagaaactcgcctcctcggagccttgggcttccaccagagcgctctgggccctcgcatctgcccgaccccggccggcttctgcgaagaggggacgggcgggacagggcggggtggccggcagagcagctccgacgggcagggggtcgggcgaggccagcgcccgggaagatgccgctcgagtgccaccgagcaagatgcctggccgccaatcgctgagcgctccccgccgtgggccacgtctcggggagtcccagcgcgctcggagggcctggagagcgcaagccccagccccacttcagtcacccccgcccccaacgccaaatccgctggcgggggtgggtagggaccaacaaacgccggctctactttccccagagcctaactttgtccaacaaacttcctagcgtgtcctcaccggggtgggggaggcccaggc

SEQ ID NO: 1530 - DNA, 6000 bp, Homo sapiens
ggtactacaggcatgcaccacagtgcctggagctaattaataactcttgtcaattatttctttgtaataactttggccttttacctctattcccaccagcctagagaaagcccttgtcatttggcaagaagtgattccatagccttctgatcagtgcccccaacttgtctctcacttctctaattcattctacttgcttcctaaaataacagtattttgcatatgtcaccccttttaatattatcattgaaaaatatgtgaagctcatagcacaaagagctaaacttcctaatgtggaaagaggtcctagataattggtaagaaaaagacctacaaatgggtagaaaaacaggaatacaaattccaaaaaagaaaaaaaagtctactaaacatgaaaatataagcatcctcacttattataaaagaaatgtaaattaaaattacactgaaattcatattttacttatcaagttgacaaaaattgaaggggttattaataacaccttctggccaagctgtggggaaataggcattttcttacattgctggggagtagaaattggtacaatccttatagaaggcaatttggcattatttatcaaaattacaaatgcatatacccttggactcagcaattttacctctggaaatttattttacagaatacttgcacattttatttattgccatatggtttgtaataagaaaggattggaaacaagctaaatgtttggtaaattatggttcatctcttcaaagaaatgctatgcaaaaaagaatgaagagagtccctctgtactaatatatgaaaatctccaagatatattaagtggtttttaaaaagcaaagtgtagaacaatgggtatagtatgttactttttgtgtagggagggggtaataacactcgcacacacacatacacacacacacacacacatagaaactctggtaggcacatacaatattaatagcagtactaatagcagtacttatttctagtgggagggggtctgggcagatgggagacagaggtaagaggggaacttttcacaggataccttattatatagttttaacttgtgaaccatactgcaatggttctgtgaatactacctagtcaaaaaattatatttaaattactcccactattaaaccattaacatatattgagcatctaccatgtgccaggcccaggggatacaaatgtgaatgtggttgtggtttgatggaaagatccactgaacttaaaatacctgattcaggtcgggcacagtggctcacgcctataatcccagcactttgggaggctgaggcaggcagatcacttgatgtcaggagttcaagaccagctgggccaacatggagaacccctgtttctactcaaaatacaaaaattagctgggcatgctggcacgtgcatgtaatcccagctacttgggaggctgaggcaggaggattgcttgaacccaggaggcggaggttgcagtgagctgagatcacaccattgcactccagcctgggcaaagaagcgagactgtctcaaaaacaaaaaacaaaaaacaaaaaacacctgattcaaattcagattctgcttctcactagctatgcatcttggcacacagtaggcatacgacaagtatttattgaatgaatttatggttgaagttacttaaccttcctgagtctgtttcctcccatgtaagatgaggatagagatgcctcctatctctcagggatattgtgaagacaaatgatagaatgtgtcatcaattctagtgataattaatgaaacctgctatgtgctaggcagtttcacatccattatttccttgacttctcatggaaacctgtgaggtgggcatatattcacttactcatgaggaaatggagggactgaggggaagaatggcttgcccaaggttttcttctggtctttctttattgctacctcccccatgctctgcactagaaactttgtaggttatgcagtagatactgtatagtaggtactcagggaactttgaaaatcaagaaaaactaatgtttttccactgttctcagtgacacctcagagcaacagaaaatcagtaaatgaatttcggatacttcgatttagaaatatactagctggtctgtttgacattcactgcactaaacacttgggggaaaatacaacaaaaatcaaatattcatgcttctaatgaagtaggaaggataaagactaacccacaaaaacactcataagcgaaaggtactcattctaaaggatgctgcacttagaatcttgtagacttaccaacaactgtttctaagagggattaaaatggtacacccaatacagtacaattaaaaaaaatttctttggagtaaaacatacaagcagagtcatgcacaaatcaattgatttttataaactgaaggacaggtgatttttataaaatgacatggattaataaatagaatattatcagcatgcagaagtcacctctgggatccctttctgtcataatccacagctcaatataaccactgtcttcacttttaacatcacagatatgctttgactatttttgaagtttatgtaaatggaatcatatagtatgtacccatttgcggccagcttctttcactcaatatcctatttgtaagattcactcatcttgttgagtgtaaatgagttcatgcattcttattactatgttgtatgttacacagtttatctctcttctgctgatggacatttgggttgttttctttttggccgtcataaagagatacattataaacatttttcaacatcttttggtgaatatgtgtatacatctctgttgggtgcacacttaggggtggaattgctgggtcataggatacatgttaatttagcttttctagataatgccaagcaggtttttaaagtggttgtaaaaagttcattttgacgagcagtatggtcaggccctttaattttagtcattctgggtggtatgaagttagatcacattgaaatatcaatttgcatttttgggatggttaataaattgagatattttccatatgtttattggcttttttgagaaatgcctgtttgtcctctcttgaggacagttgaaatattctgcctgtttttaattggattttctgccttattctggctgatccgtaggtgttctttatatatctgtaaacaaaccttttttggatgtatgtgttgcaattatgttttctcactctgcggtttgccttttcactcgtggtgtcttttcatgaacagaagctcttaattttaatcttgtccaatgatgagttttttttctttatattagtactacatgtgtttaagacatcgtctttgtctaccccaaggtaatgaagatttttttggacattttctttggatcgtgttattggtttactttttacctttaaaatccatctggaggccgggcgcggtggctcacacctgtaatcccagcactttgggaggccgaggtgggtggatcacctgaggtcaggagttcgagaccagcctgaccaaaatggtgaacccgtctctactaaaaatacaaaaattagccgggcatagtggcgtgcgcctgtaatcccagctacttgggaagctgaggcaagataattgcttgaacccgggaggcggaggttgcagtgagccaagatcatgccgttgcacaacagcttgggcaacaagaccgaaactctgtctcgaaaagaaaaattccatctggaattgactggggatggggggattcagttgatccagcatcatttactggaaagagagagctaatctgacccccaatacagcacagcagcacctgacataaatcaagtgaccacatattgtaaatctgtttttggactttattccattggtcagtttgtctatccttctactatttctatgactttataatggatcttgatataagatagtgttaagtcttttccagtgggctccaatttttcaccccaccaaatcatctagtgctgaagtgccaccgccaactcgcactttgctttcaatacgtccatacgagtgcaattgatttgcctgttcccgtggatggttcatttgtggttacctggggctttgtctcatcaaagcccttcacattgaaagccagccaggtgtctgcagacgagcaaagcagatctgttgggtaattaaataacgcggggaaggggaaggagtggattcgacgaggctgtctctggagagagcttcagaaaggaagtgatcgagctatacttgaggactggctccttggggagatacgaagagagccaaactctaaaatccgggcagaggagggcctggctaggtcaccgaatgtaaatgtctcggggggttccgcaaggcagcgcgaatcggctcgccggggtggggccgcggagccgcaaatcaccagttgagggccggagtgcgcgccgccggctcagagctgcgcctgctgctggccgggcgggggacggggccgggaccggagccggagctgcggggcgcaccggctagacgcgcgcgggattctcggcgggcacgccccgcggaccatgagcgtccccagctccgggagcagccgcggcgcgggcggtgcgaggccggccgcgcggcgcctttgagccccagccggaggtccagagatcctgagagcccgagcgcccagcgccgcgccgggaggtgagtctccgccgcgcgcccagcgtcctcggggtgctgttcctcccggggcgcctgggcctcccccaccccggtgaggacacgctaggaagtttgttggacaaagttaggctctggggaaagtagagccggcgtttgttggtccctacccacccccgccagcggatttggcgttgggggcgggggtgactgaagtggggctggggcttgcgctctccaggccctccgagcgcgctgggactccccgagacgtggcccacggcggggagcgctcagcgattggcggccaggcatcttgctcggtggcactcgagcggcatcttcccgggcgctggcctcgcccgaccccctgcccgtcggagctgctctgccggccaccccgccctgtcccgcccgtcccctcttcgcagaagccggccggggtcgggcagatgcgagggcccagagcgctctggtggaagcccaaggctccgaggaggcgagtttctccggtaatctcttgggaagtttgcaaagaaagcgaaggagcctgccctgtaactgttgacaacatctccctccctctctccctttgttgagaaagaatgaatagttggttgtgttgctccctctgcgtcgcggtggggagaggcgagggaaggcaaaggaagggagggacggtgggaaggaggttccgatagatcgtacagcccaactgtccttacccacttaggccgctgagggcgccgccgctttaaaacggtgtaatcaggtgtagacactcgtcgaggaggaggttgagcggactccgaagcatctggcaaggcggcgtgttccgtggggcggcgggtcgggtcatggttggggttaactcgcttgaagcaaggtgcaaaggagaaaaaccattttcctaacctcatatctgttttcgcttaaagctgttagctgagatggaaagtagagccgtgcattcagattgttttaaaccttgactttatctcccaaggctacacagacctccccaaggaaagtacgctggccgagggaaggtcattttgggagctgatagcctcccttgtgttgcctgggactgagttgagatcctggaggctgggagaggcctcagtgctgggggtggggcccagctcaacacaggtccaagtgggaaggggctacccgggtaacaatgggaagcccacaggcaaagcgcttgtctgcgggcgtgccagggggtattgaggataacgtaaagaccttgccaagccaggggatcccacaccactccaactccaactttctctaaagtgctgctgagaaggctggcattt

SEQ ID NO: 1531 - DNA, 6000 bp, Homo sapiens
aagccaggcagttactcaggcactctgactgaagacctttgataattctcctccactctgccaagcagcaggggtcagacagacctggggttagctttggttctgccatttaaatctcatttgaacttgagtaagtttcttaattggtaaagtcacttttctcatttgtgaaatggggcaagtatcgattaatggcttaaagcttgtaaagcacttagcatagtagttggcatgtagttacttctaaaccaagtacagctaatgttatcgtaattgttatcattgctaattattaactttttttttgtaatggggctcactgtattgcccaggctggagtgcagtggctatgcacaggcacaatcatagcatactatagcctcaagttcctggctgaagtgatcctctacctcagcctcccgagtagctggtactacaggcatgcaccacagtgcctggagctaattaataactcttgtcaattatttctttgtaataactttggccttttacctctattcccaccagcctagagaaagcccttgtcatttggcaagaagtgattccatagccttctgatcagtgcccccaacttgtctctcacttctctaattcattctacttgcttcctaaaataacagtattttgcatatgtcaccccttttaatattatcattgaaaaatatgtgaagctcatagcacaaagagctaaacttcctaatgtggaaagaggtcctagataattggtaagaaaaagacctacaaatgggtagaaaaacaggaatacaaattccaaaaaagaaaaaaaagtctactaaacatgaaaatataagcatcctcacttattataaaagaaatgtaaattaaaattacactgaaattcatattttacttatcaagttgacaaaaattgaaggggttattaataacaccttctggccaagctgtggggaaataggcattttcttacattgctggggagtagaaattggtacaatccttatagaaggcaatttggcattatttatcaaaattacaaatgcatatacccttggactcagcaattttacctctggaaatttattttacagaatacttgcacattttatttattgccatatggtttgtaataagaaaggattggaaacaagctaaatgtttggtaaattatggttcatctcttcaaagaaatgctatgcaaaaaagaatgaagagagtccctctgtactaatatatgaaaatctccaagatatattaagtggtttttaaaaagcaaagtgtagaacaatgggtatagtatgttactttttgtgtagggagggggtaataacactcgcacacacacatacacacacacacacacacatagaaactctggtaggcacatacaatattaatagcagtactaatagcagtacttatttctagtgggagggggtctgggcagatgggagacagaggtaagaggggaacttttcacaggataccttattatatagttttaacttgtgaaccatactgcaatggttctgtgaatactacctagtcaaaaaattatatttaaattactcccactattaaaccattaacatatattgagcatctaccatgtgccaggcccaggggatacaaatgtgaatgtggttgtggtttgatggaaagatccactgaacttaaaatacctgattcaggtcgggcacagtggctcacgcctataatcccagcactttgggaggctgaggcaggcagatcacttgatgtcaggagttcaagaccagctgggccaacatggagaacccctgtttctactcaaaatacaaaaattagctgggcatgctggcacgtgcatgtaatcccagctacttgggaggctgaggcaggaggattgcttgaacccaggaggcggaggttgcagtgagctgagatcacaccattgcactccagcctgggcaaagaagcgagactgtctcaaaaacaaaaaacaaaaaacaaaaaacacctgattcaaattcagattctgcttctcactagctatgcatcttggcacacagtaggcatacgacaagtatttattgaatgaatttatggttgaagttacttaaccttcctgagtctgtttcctcccatgtaagatgaggatagagatgcctcctatctctcagggatattgtgaagacaaatgatagaatgtgtcatcaattctagtgataattaatgaaacctgctatgtgctaggcagtttcacatccattatttccttgacttctcatggaaacctgtgaggtgggcatatattcacttactcatgaggaaatggagggactgaggggaagaatggcttgcccaaggttttcttctggtctttctttattgctacctcccccatgctctgcactagaaactttgtaggttatgcagtagatactgtatagtaggtactcagggaactttgaaaatcaagaaaaactaatgtttttccactgttctcagtgacacctcagagcaacagaaaatcagtaaatgaatttcggatacttcgatttagaaatatactagctggtctgtttgacattcactgcactaaacacttgggggaaaatacaacaaaaatcaaatattcatgcttctaatgaagtaggaaggataaagactaacccacaaaaacactcataagcgaaaggtactcattctaaaggatgctgcacttagaatcttgtagacttaccaacaactgtttctaagagggattaaaatggtacacccaatacagtacaattaaaaaaaatttctttggagtaaaacatacaagcagagtcatgcacaaatcaattgatttttataaactgaaggacaggtgatttttataaaatgacatggattaataaatagaatattatcagcatgcagaagtcacctctgggatccctttctgtcataatccacagctcaatataaccactgtcttcacttttaacatcacagatatgctttgactatttttgaagtttatgtaaatggaatcatatagtatgtacccatttgcggccagcttctttcactcaatatcctatttgtaagattcactcatcttgttgagtgtaaatgagttcatgcattcttattactatgttgtatgttacacagtttatctctcttctgctgatggacatttgggttgttttctttttggccgtcataaagagatacattataaacatttttcaacatcttttggtgaatatgtgtatacatctctgttgggtgcacacttaggggtggaattgctgggtcataggatacatgttaatttagcttttctagataatgccaagcaggtttttaaagtggttgtaaaaagttcattttgacgagcagtatggtcaggccctttaattttagtcattctgggtggtatgaagttagatcacattgaaatatcaatttgcatttttgggatggttaataaattgagatattttccatatgtttattggcttttttgagaaatgcctgtttgtcctctcttgaggacagttgaaatattctgcctgtttttaattggattttctgccttattctggctgatccgtaggtgttctttatatatctgtaaacaaaccttttttggatgtatgtgttgcaattatgttttctcactctgcggtttgccttttcactcgtggtgtcttttcatgaacagaagctcttaattttaatcttgtccaatgatgagttttttttctttatattagtactacatgtgtttaagacatcgtctttgtctaccccaaggtaatgaagatttttttggacattttctttggatcgtgttattggtttactttttacctttaaaatccatctggaggccgggcgcggtggctcacacctgtaatcccagcactttgggaggccgaggtgggtggatcacctgaggtcaggagttcgagaccagcctgaccaaaatggtgaacccgtctctactaaaaatacaaaaattagccgggcatagtggcgtgcgcctgtaatcccagctacttgggaagctgaggcaagataattgcttgaacccgggaggcggaggttgcagtgagccaagatcatgccgttgcacaacagcttgggcaacaagaccgaaactctgtctcgaaaagaaaaattccatctggaattgactggggatggggggattcagttgatccagcatcatttactggaaagagagagctaatctgacccccaatacagcacagcagcacctgacataaatcaagtgaccacatattgtaaatctgtttttggactttattccattggtcagtttgtctatccttctactatttctatgactttataatggatcttgatataagatagtgttaagtcttttccagtgggctccaatttttcaccccaccaaatcatctagtgctgaagtgccaccgccaactcgcactttgctttcaatacgtccatacgagtgcaattgatttgcctgttcccgtggatggttcatttgtggttacctggggctttgtctcatcaaagcccttcacattgaaagccagccaggtgtctgcagacgagcaaagcagatctgttgggtaattaaataacgcggggaaggggaaggagtggattcgacgaggctgtctctggagagagcttcagaaaggaagtgatcgagctatacttgaggactggctccttggggagatacgaagagagccaaactctaaaatccgggcagaggagggcctggctaggtcaccgaatgtaaatgtctcggggggttccgcaaggcagcgcgaatcggctcgccggggtggggccgcggagccgcaaatcaccagttgagggccggagtgcgcgccgccggctcagagctgcgcctgctgctggccgggcgggggacggggccgggaccggagccggagctgcggggcgcaccggctagacgcgcgcgggattctcggcgggcacgccccgcggaccatgagcgtccccagctccgggagcagccgcggcgcgggcggtgcgaggccggccgcgcggcgcctttgagccccagccggaggtccagagatcctgagagcccgagcgcccagcgccgcgccgggaggtgagtctccgccgcgcgcccagcgtcctcggggtgctgttcctcccggggcgcctgggcctcccccaccccggtgaggacacgctaggaagtttgttggacaaagttaggctctggggaaagtagagccggcgtttgttggtccctacccacccccgccagcggatttggcgttgggggcgggggtgactgaagtggggctggggcttgcgctctccaggccctccgagcgcgctgggactccccgagacgtggcccacggcggggagcgctcagcgattggcggccaggcatcttgctcggtggcactcgagcggcatcttcccgggcgctggcctcgcccgaccccctgcccgtcggagctgctctgccggccaccccgccctgtcccgcccgtcccctcttcgcagaagccggccggggtcgggcagatgcgagggcccagagcgctctggtggaagcccaaggctccgaggaggcgagtttctccggtaatctcttgggaagtttgcaaagaaagcgaaggagcctgccctgtaactgttgacaacatctccctccctctctccctttgttgagaaagaatgaatagttggttgtgttgctccctctgcgtcgcggtggggagaggcgagggaaggcaaaggaagggagggacggtgggaaggaggttccgatagatcgtacagcccaactgtccttacccacttaggccgctgagggcgccgccgctttaaaacggtgtaatcaggtgtagacactcgtcgaggaggaggttgagcggactccgaagcatctggcaaggcggcgtgttccgtggggcggcgggtcgggtcatggttggggttaactcgcttgaagcaaggtgcaaaggagaa

SEQ ID NO: 1532 - DNA, 6000 bp, Homo sapiens
acacaggaagactcaacatcctaattagttcaattctcattttctctctctctctcctctcttccctccctccctccctctctccctccccctcctccctccctccctctcctccctccctccctccctctctctctctctctcatctggctctgtcacccaggctagagtgcagtggtgcgatctcagctcactgcaacctccacctcccaggttcaagcgattctcgtgcctcagcctcccaagcagctgggattacaggcatgtgccaacatgcccacctaatttttatattttttgtagagacggggtttcgccacgttggccaaactcatctcaaactcctggcctcaagtaatccacctgccttggcctcccaaagtgctggtattacagacatgagccacagcacctggcccaattctattttaatctataaatataacatgactccaacaaaaatacctcctaaaattagagccagactagctgtagctaaagctcatgtgaaaagatgataaggaattgtggttttacccatagacccagcctttctgggttctcatccaggcttgttgcttattagctgtgtatccttgcacaagttacttaacctctctgtctcagatgcctcttccatgaaaggggataatagtatctgcctggtagggctgtcaggaggattaaatgaagatacatagagcactgagaatagtacctgtcatataacaaatgccaaataagtgctattattattcactgaggaaaaataataattcaagaatgagtagaaaaatgtttaaaaaaacaaaagagtaacaagagaggacttgtgggtggcaagccacctaggtgctgaggcaagagaccgagggcatgagctgttccagtataataaaatatataaaataagaatagttatactatagatcatagatattatatatgaatatcattaatcattagtttgtagcaattagtctttattccaatattataataatccttactctataatcataacctaggaaaaaccaggccatacagagataggagctgaggggacatagtgagaagtgaccagaagacaagagtgcaagccttctgttatgcccagacagggccaccagagggctccttggtctagcggtaacaccagcgtctcggaagacgcccgttgccaagcagaccatggtctagcggtagcgtcgctgtccaggaaaaacacctgctacttagcagactgggaaagggagtctccctttccccaggggagtttagagacaactctactcctttacctcttgtggagggcctgactaggcctaaccatctccctgtgatgctgtgcttcactggtcacgctcctagtctgctttcatgttccatcctgtacacctgactctgccttttagatagcagtagcaaattactgagagtactaaaagtctctgatatgcagaaataatggcacaagctgtctcctctctccctctctctctgcctcggcttccaggcagggaagggccccctgtccagtggacacgtgacccatgtgaccttacctatcattggagatggctcacactccttaccctgtccctttgtcttgtatccaataaatatcagcgcagcctggcatttcgggccactactggtctccgcatcttggtggtagtggtcccgcaggcccagctgtcttttatctctttgtcttgtgtctttatttctacaatctctcgtctccacacatggggcgaaaacccactgaccctgtggggctggaccctacaaggactgaccctactaaatggtaaaacagcacagttctggtgaatcaaaattaacagaaaagtcagtggaatagagcagagaatccagaaacccatatgcagcagagaatccagaaacccatatgcatgtgggaatttagaaaattataaatgtgggccggatgtggtggctcttgcctgtaatcccagcactttaggaggcagaggcagatggatcgcctgagctcaggagttccagaccagcctggccaacatagcgaaaccccgtctctactaaaaatacaaaaattagccgggcgtagtggcatgcacctgtaatcccagctactcaggaggctgaggcaagagaattgcttgaacctgggaggtggaggttgcagtgaactgagatttgtgccgctgcactccagcctgggcaacagagcaagactctgtctcaaaaaaaaaaattataaatgtggcatttcaaatgacatcgtgtagaaaagaaggagtgttcattaaaagtgattttgggacaaaacttccacttcactccttatacaaaaacacattccagatgaagcaaagataaacaaaaccataaaaataaagccattaaagaaataacttaataatctgagtgtattatggccccaaacctagaagccataaaagactgataaatccaaatacatgaatcatgaatttctgtaagacagaaaaacaaaacaaaataccataaacaaagtcaaacgacaaaaagactgaaaaagaataagtgtaacatatatcacaaagggctgttttccatcataccacagaaaaatgaacacaactcaagaacagataaatcacaggaaaaaaattacaaattattctctgtatggaaaggtactcatcttgattcataataaaagacacagtccaggcgtagtagctcctgtctgtcatcccagcacttagggaggccaagatgggaggatttcttgagtccaggagttcaagaccagcctagacaacatagagtgacccccatctctacaaaaaattttaaaattagccgggtgtgttggcatgtgcctgtacttccaactatttgggaggctgaggtggaagcactgcttgagcccaggacgttgagggtgcaatgagctgtgatagtgccactgcactccagtctgggcaacagaacaagaccctgtctcaaataataataataataatataaatacaaattttaaaaaatcaatataagagacgaattaaaatcacagctagaaaccaccttttgtgagttgtggggaaacaggcactctcacacattgctaaggagagaaaaatggatacaatctctatggggcaatttgccaatatatattaaaaaatgtacagattaagaacgcacaaacctttgaaccagcaattcaactttctaggaatctatcctacagatagatgtacctgtacttgtgtacaataataaaagaacaaggatgttcactgatgcattgtttgtaataggaaaatactggcaatctaaatgtccagctattagggactgttaaatcattaccatacatacgtacaatggaacgaggcagctctacatatattcataagtaaaacaagccagtatagcatactaccattgtgtttttaaaaggatatgtatcaataacattgttatttacgacatatttatgacaaaagatgttaaaaatgctgatatgggcataaaataaatctgaaaatatttccaagaaaccattaccactaatggcttgtggagagaattgcaaggctggactataggaataacatggatgtttacttttccctgtatcttttttgacaattttggattttgtatcttttgtgtgaattacctttcattgttgttttacgagttttaagattccattcattcctggatttatttgctaaccttgtacaaagttaacagttgtcagaaaaagatatagtaattcctgtcttgaggagctgatgggcactgggcctaggacctctttgcactggaataatgggggaggggagcgggtgaccttatcagaaatgcagattcctgggccccaccccagacggaccgaattaagagtcccagagtgacggcagaaatctccatttttgacgggctcccgctgggattcgggtgtctgctcatctggaagcctccatgctggagaggtagtcagcacagcgcacgcagggcgtaggcgtgttttctcgtccctccctcgcaaccacagtcccgctcaaggcgtgggggtgtcacccgagacccgggcctcccctgcactttcctttaggccgaaaccgcgagccttcgcttcagtgtcgcttttccttcgccgccgccgccgccgccgccgccgctcttctcaggacctacatcgactgcccagtcggctgagctgggccctgggccaccgaggcccggggagctgaggggctcgggaccctgcgagccgcttaagaaaggaccgcaagaaccgaatgcagtgaactgcgagagcagggaatgagagagaagttaaaccgtttagcaaaaaaaaaaaataagagacatgatggaggcagaaaataaattgtaggggggagggaaaaaagcgttacgactccgccgggactcgaacccggaacctttgaatgccttcagcctctagaagtccaatgcgctatccattgcgccacggagccacctgttggagtctcagcgcatctgctatgttaagccagaggcgacggccccgcgctcttccgaccgcgcctcccgtcgtcagtgtcaccgagacccagccgccgcgctcagggcactgccatccgcctcaaacgccagccgcaggctctcggtctccccgcagtggtcgcccctcaacaaggtcggcgacccagttgagccaagggcggccgcagtccgacggtcccacctggtcggtgtgagggcagccgcaacccggtccccttcacggtccgggcccagccgtacgaatcacagtcgcgcttttccctccccggctcccttcctgccccaagcgccccgcctaccaggtctctccggcggccgctccagcccggccgggaccccagagttgcaggcccaggccagccgttgcaccgttaagccgggccggtgacgccgggcctttacgtcgcgcctgtgagcggccgaggccgagcggcctcccctcgggctgcgagacgtaagcggcgacccctctcgggcctgggctcttccctcgcgcccggccgccgcgcccgacccagccgcggctggacctgcgcgcgagcgccgccgcgcgacgtctgtgtgcgtgcttgtgcgtgtttatttgcgcggggttcgaaaaacggggtttgggttgcatttcgctccccacagacccagagccgaatttctgaggtatccgggctctggtggactgaggggggcgacgcgccccgcgccgcagcatcctccgagagctcgtcttgccgccagcacctgcctccaaggacgccgcgcagctgccccgagcccgcgcgcccggggcccgcgactgcgtgggcggaagccgggagggtgtcagcacgcgtgggagcgctgggagcatgcgtatgcgggtgcatgtggtcggagggcgcgcgctcgagcgcggccgcggggtttcctggtggctgcgagcggtggggacggcagcgggcctggcgccgctgcccagaagggtgcggtcgccacgaatctgagaggcggctgggtgggggccggcaggtttccagtgcccgcagtgatccccatccgcaagaccccgaagccctttgaaatagacggtcaaagccgcgtggttgctctgcgactgcagcggcgagaccgaacgcccggcccccgttcctattagctcacagcagtcccggccccgcctacggaggattcgcagggcggccgctgggcgcgctttctcggctcggccacagcccgtttctgcaccaaacccgccagccgcggcccaccctgtgcttcacccatacccgcccctgcccagcatcgccaggcctcaaatgcagaatagtctctggcagagttcaaagagggaaagggaagtcctgggaagagtccagtgtggtagggattttacagtcttacttaaccccaagacgaagctatggggcgggtacatacacaccaccgtcccctttataatataaagaagggaaactgcagctaaga

SEQ ID NO: 1533 - DNA, 6000 bp, Homo sapiens
tgcctcccaggttcaagcagtcctcctgtctcagcctcccgagtagctgggattacaggcatgtgccaccacacctgggtaatttttatatttgtagtagagacagggtttcaccatgttggccaggctggtctcgacctcctgagctcaggcaatccacccgcctcagcctccccaagtgctaggattacagccatgagctacctaccacgcctggactatcatcctttctataaggcttgtaagccaagcacatgtgtttttcatctctgtatgccccaaggtcactactggaccctcagacggttttctgaaaagatgaagaaatcagacaaattaaataggatgcagtagtctccctgaccctctggacccactccattctgcctgcacatcccctcctatagtaatcactctaaacacagcttttctcatgccaaatgctttcccattgccacattccttatcttgaatcaagtctgcccctaccccttttgccgtatctggcctggatcctaccttcccaacctcgtctgttgacacatcttccatcaccccaaactgtacttccataaggacccatccaaccctcatttttgtcttgacgttatgtttttcttcatcctggaaaattttcttttccttcccctgttcctgcctggccacctaatgtggtttggctattggcctggctcagtaatcacactcagcactgagatattttaggatgaaaaagcccttcatttcaatgttgtgagtagattttaggatgaaaaaggccttcatttcaacgttgtgagtagatttttctagcaagaaatgagtcttcttaagtccttaagggtggatggtacccttgtcttgggaaaccatgtggtgggtgggacaaatgaaaataaaaatgtgcctaaggttcttgaactaagaactgtgaggaattgaagctgaaggtagatgtcttcagtctgagaagctaagtgttctgttcggtaacagaaatgaaatgtacagctgagtaggagtggggtagggagctgcagaatgtccctccggttgcaacaaatttagctgatgctgtatctgtactgtcctttgtttctgcaggatgtgggatttctttattaagagctacttactaatataatagcaaatatttgttacacacttaccatgtgccagaactgagacaagtccttgagaggattaactcttgcaattctcataacaattttataatttttcaggcagagaagttaaggatcatgtcctgcaaataaaggctgaaccaagatttgaatgacagggtcctgactccacaggctgtactcttaactgctactaccacagtttttgtttgtttgttttttaaatctcaccctttaaaaattcctttttaggtatgttttattagtagtataatagagcatcctggttccttgggggtccaaactgaaaaatttttaccggtaggaatgcccagtcacattatgccactttttcacatgctaccttgcttcatttgcttattgcttcatattcataaatcgtatttctcctaggaaatttggagtgtccttgaaggtaggaattatgtcttaaactttcacttggttcccacagtaggcctaactgtattgtccctactcattgaattgaataaaactggtactccagcaaccttatacctctggagtaaagcaaagctagtgcaaatatatacagtagaagtatagtccatttccagagcttctgggaaggccgaaatcactaaccacacagtaacttaaaaataatcctgctggccaggcacggtagctcacgcctcactttgggaggccgaagcaggcaggtcacaaggtcaggagttcaagacctgcctggacaacatggtgaaaccccatctccattaaaaatacaaaaattagccgggtgtggtggcacgtgcctgtaatcccagctacttaggaggctgaggcaggagaattgcttcaactcgggaaatggaggttgcagtgagccaagatcatgccattgcactccagcctgggtgatagagtgagactctgtctcaaaataaaaataaaaataaaacaccaacatgaaaccgtatttaatttagggctttgctgtccagcgaactcaaactgcagatgtgctgcaatcagcctaattgaaagtggttataacccatgctttgactccctctgttggcaggaagaggttgctttctcacttgcgggaattcttagctcaggttgtataatggctgtttactacagatacagcctgagaaaattcagccagattagataaggggaagacaacacccactgaatctttctccccagatggcaactaaatactcttttcatttttcttacatgctaacattgctacctataaactgcttagttaattgttcagagaaccaccacacacctgaccttgtttggctgtgactttcttctttttttttttttttttcttttggagatggggtctcattctgtcgcccaggctggagtgcagtggcgcgatcatagctcactgtaacctcaagctcctggcctcaagtgatcctcccgcctcagcctccagaagtgctggaattacaggcgtgagtcactgcacctggccccagtcttctaattgcagggtataagaagtacaaccttgatagctcacagaaggctgcacagggaaagcctggctttcccacactgtctgctaacactgtatctctaatattttccatgatacaggaatttttttggcttcatctagtggaataaaatatctaaaattattcgtttgaatcattaagtggaatcaaacacatacacatctttccttagcacattgtttctttcccaattccccctttccagaatttttatatacgcatctcaactgtcacttaatcacgtcaatgactcctcatcatttgagatttggctccaataccccaggcagaattcctctgtatggttttcccacaggcatacagagcatctcttctcccatttcggctgtgagcaactcctaagaccagtggagaccctgagatgccaccagtgcctggcatatttcagaattcaaaaaagatttgtttaaataaatacaatttaaaaccatattccattttaaaggctaattttatccatatgagaattctccctgcatgcaatgtgaagacatttaattcattaaaggggcataacaattttatatatatatatatatatatatatatatatatatatataaaactttgtttacattagagtataattaaataggcctggcaccaatcagggctctgccacttactgtttggagaagcgattcacaattcgcatccttgcacgttcttcctagatgtgccaagaatgcaagaccctgatcacgctttacttgggccatttctcagcgttgtgtttgcagcgagcaatcttgagggatgaggtaatgtctccctatggaacaaagagcaggcttgcttactgctcactataacatggtgggttccccaagctcagcattcctcttctgtaatgcaacccatcttgtgtgtaagcatgcatctgggcccgtgtgcttcgttcctgtgagaactggggtccagggagccaactcaaaaatggtgatactctggctattgcttttgttgtaatagtcttttatctctgactcagaagtctggtgtgttctgtcagcattcatgaaaccgtgaaagctaacgtgttagtttgcaaacataacaaaatatgattcatcacagttctccacgctcactagctgggcgtccctacacgagttttttaacctctcttagctgcagtttcccttctttatattataaaggggacggtggtgtgtatgtacccgccccatagcttcgtcttggggttaagtaagactgtaaaatccctaccacactggactcttcccaggacttccctttccctctttgaactctgccagagactattctgcatttgaggcctggcgatgctgggcaggggcgggtatgggtgaagcacagggtgggccgcggctggcgggtttggtgcagaaacgggctgtggccgagccgagaaagcgcgcccagcggccgccctgcgaatcctccgtaggcggggccgggactgctgtgagctaataggaacgggggccgggcgttcggtctcgccgctgcagtcgcagagcaaccacgcggctttgaccgtctatttcaaagggcttcggggtcttgcggatggggatcactgcgggcactggaaacctgccggcccccacccagccgcctctcagattcgtggcgaccgcacccttctgggcagcggcgccaggcccgctgccgtccccaccgctcgcagccaccaggaaaccccgcggccgcgctcgagcgcgcgccctccgaccacatgcacccgcatacgcatgctcccagcgctcccacgcgtgctgacaccctcccggcttccgcccacgcagtcgcgggccccgggcgcgcgggctcggggcagctgcgcggcgtccttggaggcaggtgctggcggcaagacgagctctcggaggatgctgcggcgcggggcgcgtcgcccccctcagtccaccagagcccggatacctcagaaattcggctctgggtctgtggggagcgaaatgcaacccaaaccccgtttttcgaaccccgcgcaaataaacacgcacaagcacgcacacagacgtcgcgcggcggcgctcgcgcgcaggtccagccgcggctgggtcgggcgcggcggccgggcgcgagggaagagcccaggcccgagaggggtcgccgcttacgtctcgcagcccgaggggaggccgctcggcctcggccgctcacaggcgcgacgtaaaggcccggcgtcaccggcccggcttaacggtgcaacggctggcctgggcctgcaactctggggtcccggccgggctggagcggccgccggagagacctggtaggcggggcgcttggggcaggaagggagccggggagggaaaagcgcgactgtgattcgtacggctgggcccggaccgtgaaggggaccgggttgcggctgccctcacaccgaccaggtgggaccgtcggactgcggccgcccttggctcaactgggtcgccgaccttgttgaggggcgaccactgcggggagaccgagagcctgcggctggcgtttgaggcggatggcagtgccctgagcgcggcggctgggtctcggtgacactgacgacgggaggcgcggtcggaagagcgcggggccgtcgcctctggcttaacatagcagatgcgctgagactccaacaggtggctccgtggcgcaatggatagcgcattggacttctagaggctgaaggcattcaaaggttccgggttcgagtcccggcggagtcgtaacgcttttttccctcccccctacaatttattttctgcctccatcatgtctcttattttttttttttgctaaacggtttaacttctctctcattccctgctctcgcagttcactgcattcggttcttgcggtcctttcttaagcggctcgcagggtcccgagcccctcagctccccgggcctcggtggcccagggcccagctcagccgactgggcagtcgatgtaggtcctgagaagagcggcggcggcggcggcggcggcggcgaaggaaaagcgacactgaagcgaaggctcgcggtttcggcctaaaggaaagtgcaggggaggcccgggtctcgggtgacacccccacgccttgagcgggactgtggttgcgagggagggacgagaaaacacgcctacgccctgcgtgcgctgtgctgactacctctccagcatggaggcttccagatgagcagacacccgaatcccagcgggagcccgtcaaaaatggagatttctgccgtcactctgggactcttaattcggtccgtctggggtggggcccaggaatctgcatttctgataaggtcacccgc

SEQ ID NO: 1534 - DNA, 6000 bp, Homo sapiens
aaaaatactttctaaacttatgccatctggcccagtggttctcaactgggaggcatttggaaatgaatgggagtattttgttgtcaaagtaactgagcggtgctattgcaagacatcctcccataagtctcgattttctatgagtcttagaagcaaaggcactgattatcttttttcccagactaccttttcaagggagcttgtataccaagcacccttggaagacagaaatggtgtcacctcctggatcgcatggcagcccttattgtacagtgtaataaataaatgtctacttatggaacaaaagtcaggcaggtttgcctactacccaatttaaaaatatttgtatttcctggctggatttggtggctcacgcctataatcctagcactttgggaggctgaggcaggagtactgcttgacaccagcagttcgagaccagcctgggcaacacagcgagaaccccgtctctataaaaaaataaaaaaataagccaggtgtggtgtcgtttgcctacagtcccagctagtcatgaggctgaggtgagaggattgcttgagtccaggagttcaaggctgcagtgagctacgatcacgccactgcactccagcctgagtgacagagtgagaccctatctctttaaaaaaaaattatatttcctgagcttgggttcctcagctatgaaacaagtacattccatgtgcagcatctaccaaggcattacataccacatttcaccattcaattttactgatcaaacacttacaggttttggtttctctcttgagttacattttttcaaatgctttgctagttgatcttcatatactgtgctaaatttaaagagaaaattatttcaaatgagacttgtgccaattactgtttccagcacaaaaaaaaacccgtatctgatccacacttactgttttggatctaaaggacacaggattcttttccgagcatcttcttcctaataaattaagagatacatttatttaaataaaatatcaagtttattgcttacagataccagatataacttcagtgtctctgtaatctcaaaacaaggtaaggaaaccttacaaggacataatgaaaagttggcaaaatcaggtcccaagggtttaacaaaaactctccagtgtactggcttaaatacatatgaacaaatactgctttggacaaacaagggtctatagcttcaaacagggtatagagaaggcctacatatggtgtctgaaatctaagatagcatcaactattatatgtatgactattttatgcacaaccaagaaagaaaaaaatgctgcctatttcatgttaattgacaaatagttgtatatatttatcacatattaggtttgtacaaaagtaattgtgatttttatggcaataaaaataatatacactattatttatgtatggttttaatacaacataatgttttcaaatatgtatacattgtggaatggctaaatcaagctaattaacatgtattgcctcacatactaatcattttttggaaaatgctgcccattgacatatggattttaagatgtatcctgattttagaatgttaaaatgtaaaaataaagtttcttagaaacaatggaacatggcattttaaccatttggatgtgccatattttactggctttgcaactttttactatcagttacatcctactcattcctaagttacatcacttaatgactgggaatacattctgagaaatatatctttaggtgattttgtcattgggagaacatcatacagtatagtaacacaaacctagatagtatagcctactgtacatctagcctatatagtatagcctattgctactaggctgtaaacctgtacagcatgttaccatactaaatactgtaggcaattgtaacacaatgtaagtatttgtgtatctaaacatatctaaacatagaaaaggtacagtaaaaatacagtattataaccttatgggaccaccatcatatatgcggtctgttgttgactgaaatgtcattatgtggcacatgactatatgaactgggaaaaaagaaaggaaaattgataatgttggcaattctacccaatattccacatgaatctgtataaataggggtcatataacagttaagaacacaggccagccagactgcctaggtatgatacccagctctacctaccagctacgatccctatgaccttagttaggtaggcttactgcctcatctgaaagatgagaacaaaaatatgtcttaccttctaaggtttgaacacattaagtgagctaatagttaacaaaacaaaactgcctagcccagtgctgtacatagagtaagtggtgactaagtgtctgctattattattcttttaaaaatttatttctgttcgaatgtgcctctcagcatgtccatgaagctattcacactgaatttcatgggaaagctaagaaattttttttttgaaaatactatatattcaatagaagaaaaagaaaatactgtatataatttcttccttattgctgactttaaatcctaacctccatgtaaaagactattctaacccccagagcctaactgtagcataggaaaaaaaaagcacatttaaaatttattagttgaatttagaaacaggaattctcaatcttggcactattgacgttttgggcaggtaattcttttgagggggtgagtgcagggggctgtcctgtgatttgtaggaggtttagcagcatttctggtctctatccattagatgtcagtgatactcctcagtttgacaaccaaaatgtcttcattttgccaagtgttcactggaggcaaaatcagtcccagtcgagaaccactgggtaaaaatgagtggtgtcatcacagctatatatgacacttagaaaaaaagatggaaacacaacatccagttacatcataaattacagattcaggaggatagccacaatttaaaacgagatagtagtcaataaaagtgtttccacttgatgttttgcggtctctcttcaagtgtctaatgacaatatgtcgttcctctataggaatactaatcagcttgtaaggatttattcatattctactatcatcactatttgttttcaccttccatatatctggataaggtggagtctaaatccttctcctatcataactctcattcttcaacaagggatgtttgccagtcccctcaaaaccagtcaatagactatgggcataattcagagttcccacaacaaatcacgtctcccatattccaaaacaagaatgtccttgtttcagtatgcttcacttttggtaaatgccagtcaaaacaaaataggaagtagactacaactatgatggagagtggcagatgaagggggtcaggggactgatctgcactggatattgtctagaagaataaattccttaagaaataaaataatgcaaataatactgaacattcagaagcatgaaatctgatgctgatcgctttggtttattctttatagttctgtggaactataaggacatgctctcttcctatgagcattttgctcctctggtttttattttcccatctcatatatatcctaaagtaatatacatatatacaaatataaagtgtttgatagtacatttatatgcataattatcaaacaaaattgtatgctttgttctcaattgtaaaaggtcaattcgtatatatttaaaaatctttccttcccattccagcaaagttgcattcttaaaaactgtaagtcgaaaaaaatttttttttcttttttgagattcagtctggctgtcacccaggctggaatgcagtggtgtgatcttggattattgccacctccacctcctgggttcaagcgattctcctgcctcagcctcccgagtagctggggttacaggctcgcaccaccacgattttcttaattttagtagctcgcgccacggctgattttcttatttttagtagagagagggtttcatcatgttggccaggctggtctcgagctcctgacctcaagtgatccgcccgcctcggcctcccaaagtgctgggattacaggcgtgagccaccgcgccgggcctcaagtctaaatttttaaaagaaagtttcttccaaccgcattcacgagaagtgcttctctttcatgaaataacaattagaacacaactagtgaaacctttgggacttcaatcactactttttctaaactaccactttccagcaggaagacggagcggtagcttggggtaaaaattaaaacctagcattaccatgagttaagatcgagataaatagatcaaaataaatgggtcactgctggcgctttacttagaaaaataaaaaatttctcatcactagaactcataatcgctccgcaaggagggcaaaactgggtttattaaagtgaaagctggagaatccaggggacacaagcagaaagctgtcaaagaggggaggggccgggttccagcaccgacaggaccaggatacttatttccgactcttgagagagtagggcgataccacacctccgcggctccagcgtgttcaccacaaaatcttttccctgcggccaccaccatcctgcagaaccgtttcttcttttccacatagtaaccgcatctaccctcagctggaaaaccaggcgcgtgcggcgacgtcgcggaggtcgccataattctagggctcgcttccggtgtccagcatccggcaaccagaagaaaagttagaagcttccttcgggtctccttcccttaacaaacatggctgcctcagcccccgcgccacacaggttaatacccggaactaccacaaccgtcttccctttatcctccgcagaaccggaagaatccgatggtggctggcgagggccaagtctcttacgccttcccctcgtttctccctccccgcctcctccgcagaagccgagcgccaaactcaaactttatcaggacccggacctctcaggctaatcccgagggccgggcctgttgggcttttctgcacaccagccgaggcagcgagccaacatgagccaagtgctgttccaccaactagtcccgttgcaggtgaaatgcaaagactgtgaggagaggtaaggtccgcgtcatccagtgcccgcgggtggcggttggggtcaggccaatggggaaagatggcggttctggcccgtgggatccaccttgcacctaggtgtcgagtcggcccccctaggaagcggatagggaacccagagggcccggtggttacctctctcaccaagtcggccgttgcagaggggactggaggaagggtgtgaggagttaggaagccggctcacatcaagttaatgtcaaaaaccctacctgtgcacggaatcgtgaagattatagccctactcttcccttttgacagataagaactctggcccagagaagttaaaaaaatttacgtgagggctcacagccagttcatggcagggtcaggactagaactcaggccttggctccgagcctttccccctcgttctcttttgaagtatgttggcagtaaagttcaacttttaaaaacctaccaatttggtggcgtactttggctcttcacatcagttgctttaaaaaagtaaattacatttaaccgactaaaaatgagaaaagcagaaacgtcattaattcattcaataaatattgcctccttgtaaaacaccttactgggcactgggaatacagtggtcaggaaaaacagtccttttcttcatggagtttacaatcactggaggaaataaagaccagtcgcacagagaagtgcaactttgattaaggaggtggtattattggggcgtaaatagatttgaccagaggtcaggagacttactttttttttctcagttctaacactcaatggttgtctctttttttctctgaacgttctttcctcatttgtaaaactgatataacatgcgtattcacgtgtttgtaatgaggatcaggtgtgaaatcttttgcgtattcacg

SEQ ID NO: 1535 - DNA, 6000 bp, Homo sapiens
gtatttttagtagagatggggtttcaccatgttggccagactggtctcaaactcctgacctcaagtgatctgcccacctcagcctcccaaagtgatagcagtacaggcgtgggccactgcacctagacggtgttttacggttttaaaagtcctgtcatacttcatatatttgcaaaaagtacaagaagaattcacttatcaaagtgttctttacataatcctggaagagttatattactatgacaatttaccaatcatattaatgatattgttgcatatattccaaatgcctatatacattagatgttgaaagaaaaaacggaaggcctgtaagttaaacgaattccccatgcttagttaaaaaacatccctagaaatatgctgtagaaaaatacaagctttcagaggatacgctaactaaaatcacaaatcttattttttcccttataatggttaatgtcataagagcaatataaaacaataaaaactcaataaaatgttatttctcatctcaatagatgtcgtactcaatagatgtctaatactaatgacattagatttagttatgagttcttctaaataaaaagtattctaaacatcaggcttgctttagcacaactggattctaggccatctctgacacccagtagctgtgctcttaaactatcaatcaaacaaataaaaggtactttaagccaggtattgtgccaggtgctagggatacaaacagaaataaacatggtccaggggcttggcacagtggctcacatctgtaatcccagcactttgggaggctgaggtgggtggatcacctgaggccaagagttcaagaccagcatgggcaacatagcaaaatcctatctctacaaaaaatttataaaatgagccaggcatggtggtgcatgcctgtagtttcatgtactctggaagctgaagcaggagagcttaagaccaagagtttgagattacagtaagccatgattatgacacaacactctagcctgggcaacagagtgacagcctctctctaaaaaaaaaaaaataataatttttgaacataggatgacacaaacaaaacaaaacaaaaaaaaccatggtctctgtcctcaaattgagatgagattaatgactttttgctagatttgcttctgattgcattttagggctccatgagaggggagggaagggttaccaacactactgagtacctgccaggtattctacatatatcatcttatttaacaataatcttgataagtaaatattatttattttacaaaagaagaacttaaggcccaaataatggtttaaggtcacattacagagcccaaatgaaaactcagatctttcacctacaccacactatctaataactgaataatggcaattcatttcaacttaggcaactttgaagggtccttatagtgaaaggatttaagacatacctgaaagttatgaaagaaaaaagcatttgaggcacaaggaacagcaggggtaatagtatagaatgagtatcaggtatattcagaaggtaacaagaatgcttgtatgactttcatattggagagataagcttaggaaacaaaactgaaaaggcagattagtgtcaaatcatgggttccaaaattttgcataattttccaccagatgaagttccctgatcattaccactgtcctcaactgaatttccttcttctctgactttagtgtacttatattactttatgcatttgtcacacattaatacctaaaatttagtgaacatttattatgctctagtcactgttgtaagcagttcatatgtataattcattccattctcataataccatgaagtaggtactgttattaccatcaacttaaagatgagacacagagaaggaaattgtacaagatctgtcagtaagtggaagaactgggacttaaacccaggcaatctggctccagagcctgaactcctaatctgtgctatggtgcctgttcaaggaaaatcttatttcccctattaaaatgtgagttccttgagggacagaatgaaaagaggtttttgttggcttttgttgttgttggggacggagaggggggtgcgtatttacatcctccacacttaggacagttcctgagacacagcagacatttgccagtatttgttgagctgaactggcctcaaatactcaaccaaggcgtctgggctgggcgtggtggctcacgcctataatccccgaattttgggaggctggggtgagaggatcacttgagcccaggtgttcaagaccagcctgggcaatacagggagaccccgtctcttttaaattaaattaacaacaaaaaaaagccaggcgtggtggtatgcgcctgtaattgcagctactcaggaggctaaggtgaggggaacccttgggcccaggaggtcaaggctgcagtgagctgtaatcgtgctacaatactccagtctgggcaacagagcgagactctgtctagaaaaaaaaaaaaaaagagagagagaaagagagagagtctgggttgttcttcctataggtcaaggatcaccaaattattctgtaaagggccagatagcaaatattttaggctttgcgggccataaggtctctgtcacaattactcatctctgcccttcctgtgcaaaagcagctacaatatgtaaacaaatgagcatggctgtattccaagaaaagtttatttacgaaaacagtgagccaactggcccatgtgctccagtttgctgacccctattatacagataataggaatatattaaaggtttctaagcagagaaattgagtttttagattaactgtgatggcaatgtaaccagaaagagaccatctaggagtttccatattgaaaccaaagtcatggcctcctttatctttctataatcattctaaaacagtgttgtccaatggagatacaatgtaagccacaaatgtgagccaggtatgtaattttaatttttttctttttcttttttttttttcagagacaggatctcgctctatcacccaggctggagtacagtggcacaaatagtagctcactgtaacctcaagcttaggctcaagcaatcctcctgtcttggcctcctaaagtgctgggactacgggtgtgagccaccatacctagcctacttttaaattttctagaagtcacattttaaaaagacttttaaaagcaggtgaaattaattttaataatacattgtatttaacccaatatacccaaaaatattgccatttaacacataatataaaaattgacatattttacattcttttttcatagtaagtcttaaaaatccaacgtgcattttcatatgtaaagcacaacaattcagataagccccatttcaaatgtctaataaccacatgtggctagtggctaccatactggacagcattaaaagaatgatcaactaaacctacagatctccatatgcagctgctggttttgggaccatctccttgaccggcttgccattgatttttgaccgaattctgaactatatatactacagtttgacattactggcaactcaataaggcaatgtcttcattttttatgttacatttgtacaccacttagttttcacatacgatttcacacctgatcctcattacaaacacgtgaatacgcaaaagatttcacacctgatcctcattacaaacacgtgaatacgcatgttatatcagttttacaaatgaggaaagaacgttcagagaaaaaaagagacaaccattgagtgttagaactgagaaaaaaaaagtaagtctcctgacctctggtcaaatctatttacgccccaataataccacctccttaatcaaagttgcacttctctgtgcgactggtctttatttcctccagtgattgtaaactccatgaagaaaaggactgtttttcctgaccactgtattcccagtgcccagtaaggtgttttacaaggaggcaatatttattgaatgaattaatgacgtttctgcttttctcatttttagtcggttaaatgtaatttacttttttaaagcaactgatgtgaagagccaaagtacgccaccaaattggtaggtttttaaaagttgaactttactgccaacatacttcaaaagagaacgagggggaaaggctcggagccaaggcctgagttctagtcctgaccctgccatgaactggctgtgagccctcacgtaaatttttttaacttctctgggccagagttcttatctgtcaaaagggaagagtagggctataatcttcacgattccgtgcacaggtagggtttttgacattaacttgatgtgagccggcttcctaactcctcacacccttcctccagtcccctctgcaacggccgacttggtgagagaggtaaccaccgggccctctgggttccctatccgcttcctaggggggccgactcgacacctaggtgcaaggtggatcccacgggccagaaccgccatctttccccattggcctgaccccaaccgccacccgcgggcactggatgacgcggaccttacctctcctcacagtctttgcatttcacctgcaacgggactagttggtggaacagcacttggctcatgttggctcgctgcctcggctggtgtgcagaaaagcccaacaggcccggccctcgggattagcctgagaggtccgggtcctgataaagtttgagtttggcgctcggcttctgcggaggaggcggggagggagaaacgaggggaaggcgtaagagacttggccctcgccagccaccatcggattcttccggttctgcggaggataaagggaagacggttgtggtagttccgggtattaacctgtgtggcgcgggggctgaggcagccatgtttgttaagggaaggagacccgaaggaagcttctaacttttcttctggttgccggatgctggacaccggaagcgagccctagaattatggcgacctccgcgacgtcgccgcacgcgcctggttttccagctgagggtagatgcggttactatgtggaaaagaagaaacggttctgcaggatggtggtggccgcagggaaaagattttgtggtgaacacgctggagccgcggaggtgtggtatcgccctactctctcaagagtcggaaataagtatcctggtcctgtcggtgctggaacccggcccctcccctctttgacagctttctgcttgtgtcccctggattctccagctttcactttaataaacccagttttgccctccttgcggagcgattatgagttctagtgatgagaaattttttatttttctaagtaaagcgccagcagtgacccatttattttgatctatttatctcgatcttaactcatggtaatgctaggttttaatttttaccccaagctaccgctccgtcttcctgctggaaagtggtagtttagaaaaagtagtgattgaagtcccaaaggtttcactagttgtgttctaattgttatttcatgaaagagaagcacttctcgtgaatgcggttggaagaaactttcttttaaaaatttagacttgaggcccggcgcggtggctcacgcctgtaatcccagcactttgggaggccgaggcgggcggatcacttgaggtcaggagctcgagaccagcctggccaacatgatgaaaccctctctctactaaaaataagaaaatcagccgtggcgcgagctactaaaattaagaaaatcgtggtggtgcgagcctgtaaccccagctactcgggaggctgaggcaggagaatcgcttgaacccaggaggtggaggtggcaataatccaagatcacaccactgcattccagcctgggtgacagccagactgaatctcaaaaaagaaaaaaaaatttttttcgacttacagtttttaagaatgcaactttgctggaatgggaaggaaagatttttaaatatatacgaattgaccttttacaattgagaacaaagcatacaattttgtttgataatta

SEQ ID NO: 1536 - DNA, 6000 bp, Homo sapiens
aaccgtttatgagtcatgctatctatttttggtattctggttctactgtaataacttttttattacatgtattttactaaaagctgcttaaaattatttttgggatcaaaaattgtcaaaatatgtatatgaataaataattcaaattaccttgaatttcaaattactcagtggcacaggtttttactacgtttcatacttaatctgaaaattaatttacagaaagaattcaaagtatgtattctatattttctttacgttctttggtaactttgtatcactactgaacaaacaactaaaagagtatgttctaatgatacattctaataagaaatgatgataattttaaaataatacaatatgtaaaccacacagctgtcaggcctttgacaatcttgagctcatttttccttgccctcttccagcaagaaagaatattttccgccaggtgcagtggttcatgcctgtaatcccagcactttgggagggcgaggtgggcggatcacgaggtcaagagatcgagaccatcctggccaatatggcaaaaccccgtctctactaaaaatacaaaaattagttgggcatggtggtgcacgcctgtagtcccagctacttgggaggctgaggcaggcaaattgcttgaacccgggaggcagaggttgcagtgagccaagattgtgccactgcactccagcctgggcaacagagcaagactccatttcaaaaaaaaaaaaaaaaaaaagaatattttccttttcttgaagctaaatgataaaatttaattcttttgtttttcatttcttttgctcacatctgaatcttccatccattcttttttctttcagaactgcttacaccagtttaaatgataaaatttaattcttttatgtttttcatttcttttgctctcatctgaatcttccatccattcttttttctttttttagaactggccacaccagtttatcactagtctgcatccagttctgggacccacttagtaagcaattggacaaatgggcagagactggactggaaagtgaggggcttgaagccatgtaatataagacaatgtagaagaaaatggagatatttatctggggaagactaaggagaaatggaaggtgttcaaggaaactgcctttgcatttttgaagagctgtcatgagtaagggtgatcataggtcctgcagcctccaggcagaattagaactagtggcttttgacataatttagagctgcctccagcagtgagttttctagaactgcaggtgcacaagcacgggttgcagggtagttgaagcagttttcaagcaatggttgaggagttagatttaaattttgtcattttcagggcgagtgcagtggctcatatctgtaattccagcactttgggatcctgaggcgggcggattacttgaggtcagcagtttgagaccagcctggccaacatagtgaaatcctgtctctaccaaaaatatgaaaattaaccggcgtggtggcgcacatgcctgtagtcccagctactctggaggctgtggcagtagaatcgcttgaacccgggaggtggaggttgcaatgagcccagatggtgccactgcactccagcctgggctacagagcaagactccgtctagagaaaaaaaaaaaaggcgttgttttcaaactcgacactttttacacttacctgctgaatttctgtgtgtaatattaccttccttttgtgcagttgagcgatatgtaaactctcttagtatttcctttatatgtgaaacgcctttattgtttcttaaaagtccattccttaagtttatatcaagtttcgtggttggaaaattttcttccattatcttcccttgtagactgtaaaagtatgcctttattatgaaactacaaccaacaggaactttgacctcaggataactgagagaataaagtgtttttatgatctcattagaaccttggtatgtattatacgtgtgctgtgtgtgcattatctagttcatatttttcttgtagaattttctataccatttagaatggcttagagagatttgattatactgacacttccttccatgcaattttgttgttgtttgtttgagacagggtctcactctgtcacccagagacactgcactgctggagtgcagtggcataatcacgtaatcacagctcactgaaacctctgcctcccggttcaagccattctcccgcctcggcctcatgagtagctgggattgcaggtgcccgccaccacatctggctaatttttttttgagacggggtctttctctgtcgcccaggctggagtgccgtggcactatctcggctcactgcaacctcccgagtagctgggattacaggcgtgtgccaccacacccggctaagttttgtatttttttttttttgaaacatagttttgctcgtcacccaggctgtagcacaatgatgcgatcttggctcactgcaacctccgcctcccaggttcaagccattcttctgcctcagcctccctagtagctgggattacaggtgtgtgccaccattcctggctaatttttttgtattattagtagagttgggggtttcaccatgttggccaggctggtctcgaactcctgccctcaggtgatccacctgcctcggcctccccaagtgctgggattacaggcatgagccaccgcgcccagacaagttttgtatttttttaagtagaggcaaggtttcgccatgttggccaggatggtcttgaactcctgacctcaggtgatccgcaggccttggcctcccaaagtgctgtaattacaggtgtgagccaccatgaccagccccatgcaatattttaaaaaacattaattacttacagagttttattatctttgtaaaaatgctaaggaaaaataaacattttcatttgaatttaaggacttgtatttgttaggtcataattcattcctcatgatcacaattttaagcaggagagttatataaaagatttttgtaaattcattttggaaaataacaagaaggtgttcaactatatctggcttctctgaaagtgtagattggagttcattagactatttactttgtgcaattaaaagtttatgaactgaatgagaactctgacttctatttctaacgcactttttaatgaaaaattgttggggaatttgaatttagattatgcaagaattttaaatcagcatcttcggaaatacaacaacatctttggatttatttagccttttaaacaaagtgggcaagtttatcgagagattcatatactttgtttttccctatctttcatataagaaatactagattttttttcaataaaataatttgaggcctggcgcggtggctcagcctgtaatcccagcgctgtggcaggccaaggcagggcggattgcttgtgctcaggaactggagacgagcctggccaacatggcaaaacccggtctctacaaaaaatacaaaaattagccgggtgtggtggcgcacgcctgtagatccaactatttgggagaatgaggcacgagaatcgcttgtactcgggaggtggagattgcagtgagcagagattgagccaccgcactccggcctgggtgacagagcgagaccctgtctaaaacaaaacacacattaaaaaaaaaaaaaccacaaacaaaacctgcaattggccctcgaagggctggttccctcagtcagctctgcacgggtgcgccccctttctccctagaggtcaacaagcgactgcgaaggaaaacgccgccacaagtttcttgctgtttctggagagacctctcagagcgcatgctcttcggatagtcggtctgtagcgccattttcgtatggaagggactgcactctgattaggtacagccttaggacgcccagcgttcaagttgttcaaacagtacgtagagcctcgcagagacaagtcaatggcctcttttagcgggactcctgcctggagcgcttcagctgagactatgtaaagaaattcctttgtgttaaccttcctccttggaccagtggactctcctctctctcctgttccctccgcgcccgcccaggctggctcagcggtctcgccccgcccctccgggaccggagcactgtaaagattaggcatctgtgatgcttttgcgctcacattggcggcccagatgagagggcgtggagaaccagatgggaaactttttgtcccgtgagaacaaagtacaagttatatcagagtctggtatgtgtagaggaaaccaatacatgtactgtgagctaggagctggtgcttctttttcaattgtattttttataaagatgcagaccccctcagtgttgggcgtggggggtggctgaaatgttagctagaggcgaggcagggcacggagatctgaggtttttacgagtgtgtgtgtgtgtgtgtgtgtgtgtgtgtgcgcgcgcgcgcgccctacaagagtttagaagagcatgggtgagtgggcgagaaagaaagagaatgagagagagagagaaaagaaatctggagtgggacaagacttagagggtgcagaaaagaaagggggcgccagcacatcctagcctccgaggccgcgacagcgcctttggcgatgtccactctcaaccccgccgtttcattcataagtttctggcctacaggccccgcccgctcccctgggccgagggccccgtttcctgaacagcaattggtggacggcaacaaagccttagcaaccggctcctagtgacccgcggggcgcctggtaactggggctgctgcggagaaaggagcggggctgtccctttaagggatggccgcggagtcgtgaaagtggagggggctgagggagggcggggaggaaggtctgggggcggacccagggggaggaggaggaggaagagtaactgctgaaaggaggtggcgaaggaggatccggagcagctgctgccagcccgcgggcactgaagtcctcccggctgccgctcgagtagccacgggcgcgatcgggaccagaagtctcctcctccatgatcactttggaagccgggggaagactttgccctgccctgagagctggtctgcgtttcccaggcgcggcggcggcggagcagcagctgcagcagccgagtccaaataggagcggccacagccaggggcgtgagcgccccgcgcggagcgagctcgggttcccctcggaatgtccccggggcgcccggcgcgctgaccccgaagccgcctccgccttcggcgcctgctgcctccctcggccaggcttgttgttcgggactgtgagcttcctggctcctgggcagtggggaagcccccgggggcgagtgacttcagctggccacgacccagccctcccccgtgcgtatctcgcttaagatggcagcggagtcaggggaactaatcggggcttgtgagttcatgaaaggtgaggagcagccgccccgcatcttccaacgctttcttgcccccaactcttcacttcccgcgccactgtccccaccttctcctgaggctgccagtgtcctgcagccgctgcgcgcgctctcgtcccctctagggactctcctttctccgaggaccccctgcttccggcttctctttcttgtgtcccttgctccctctgcagctccctcggatggcctctcggcctcgtaatgggacagcaccggcttctgcccgtactccggcactcagcagctcatggggagcctgctccggatgctcaccggtcacctttactccaccatcgcaggcttcggttttcgggacacccccaaccacaccccccaagtctctctcccttcctctttttcaaatctccgaagctgcgtcgggaggctcacctctttcttccccttctcgcagctgctgaggtctggagatttgggaaccaaacttgcacctccagttctgcgggtacccccagctcctgcctactctgctggcctgaaacaagggaaatgtgggtgctctgagccccg

SEQ ID NO: 1537 - DNA, 6000 bp, Homo sapiens
ttgacaatcttgagctcatttttccttgccctcttccagcaagaaagaatattttccgccaggtgcagtggttcatgcctgtaatcccagcactttgggagggcgaggtgggcggatcacgaggtcaagagatcgagaccatcctggccaatatggcaaaaccccgtctctactaaaaatacaaaaattagttgggcatggtggtgcacgcctgtagtcccagctacttgggaggctgaggcaggcaaattgcttgaacccgggaggcagaggttgcagtgagccaagattgtgccactgcactccagcctgggcaacagagcaagactccatttcaaaaaaaaaaaaaaaaaaaagaatattttccttttcttgaagctaaatgataaaatttaattcttttgtttttcatttcttttgctcacatctgaatcttccatccattcttttttctttcagaactgcttacaccagtttaaatgataaaatttaattcttttatgtttttcatttcttttgctctcatctgaatcttccatccattcttttttctttttttagaactggccacaccagtttatcactagtctgcatccagttctgggacccacttagtaagcaattggacaaatgggcagagactggactggaaagtgaggggcttgaagccatgtaatataagacaatgtagaagaaaatggagatatttatctggggaagactaaggagaaatggaaggtgttcaaggaaactgcctttgcatttttgaagagctgtcatgagtaagggtgatcataggtcctgcagcctccaggcagaattagaactagtggcttttgacataatttagagctgcctccagcagtgagttttctagaactgcaggtgcacaagcacgggttgcagggtagttgaagcagttttcaagcaatggttgaggagttagatttaaattttgtcattttcagggcgagtgcagtggctcatatctgtaattccagcactttgggatcctgaggcgggcggattacttgaggtcagcagtttgagaccagcctggccaacatagtgaaatcctgtctctaccaaaaatatgaaaattaaccggcgtggtggcgcacatgcctgtagtcccagctactctggaggctgtggcagtagaatcgcttgaacccgggaggtggaggttgcaatgagcccagatggtgccactgcactccagcctgggctacagagcaagactccgtctagagaaaaaaaaaaaaggcgttgttttcaaactcgacactttttacacttacctgctgaatttctgtgtgtaatattaccttccttttgtgcagttgagcgatatgtaaactctcttagtatttcctttatatgtgaaacgcctttattgtttcttaaaagtccattccttaagtttatatcaagtttcgtggttggaaaattttcttccattatcttcccttgtagactgtaaaagtatgcctttattatgaaactacaaccaacaggaactttgacctcaggataactgagagaataaagtgtttttatgatctcattagaaccttggtatgtattatacgtgtgctgtgtgtgcattatctagttcatatttttcttgtagaattttctataccatttagaatggcttagagagatttgattatactgacacttccttccatgcaattttgttgttgtttgtttgagacagggtctcactctgtcacccagagacactgcactgctggagtgcagtggcataatcacgtaatcacagctcactgaaacctctgcctcccggttcaagccattctcccgcctcggcctcatgagtagctgggattgcaggtgcccgccaccacatctggctaatttttttttgagacggggtctttctctgtcgcccaggctggagtgccgtggcactatctcggctcactgcaacctcccgagtagctgggattacaggcgtgtgccaccacacccggctaagttttgtatttttttttttttgaaacatagttttgctcgtcacccaggctgtagcacaatgatgcgatcttggctcactgcaacctccgcctcccaggttcaagccattcttctgcctcagcctccctagtagctgggattacaggtgtgtgccaccattcctggctaatttttttgtattattagtagagttgggggtttcaccatgttggccaggctggtctcgaactcctgccctcaggtgatccacctgcctcggcctccccaagtgctgggattacaggcatgagccaccgcgcccagacaagttttgtatttttttaagtagaggcaaggtttcgccatgttggccaggatggtcttgaactcctgacctcaggtgatccgcaggccttggcctcccaaagtgctgtaattacaggtgtgagccaccatgaccagccccatgcaatattttaaaaaacattaattacttacagagttttattatctttgtaaaaatgctaaggaaaaataaacattttcatttgaatttaaggacttgtatttgttaggtcataattcattcctcatgatcacaattttaagcaggagagttatataaaagatttttgtaaattcattttggaaaataacaagaaggtgttcaactatatctggcttctctgaaagtgtagattggagttcattagactatttactttgtgcaattaaaagtttatgaactgaatgagaactctgacttctatttctaacgcactttttaatgaaaaattgttggggaatttgaatttagattatgcaagaattttaaatcagcatcttcggaaatacaacaacatctttggatttatttagccttttaaacaaagtgggcaagtttatcgagagattcatatactttgtttttccctatctttcatataagaaatactagattttttttcaataaaataatttgaggcctggcgcggtggctcagcctgtaatcccagcgctgtggcaggccaaggcagggcggattgcttgtgctcaggaactggagacgagcctggccaacatggcaaaacccggtctctacaaaaaatacaaaaattagccgggtgtggtggcgcacgcctgtagatccaactatttgggagaatgaggcacgagaatcgcttgtactcgggaggtggagattgcagtgagcagagattgagccaccgcactccggcctgggtgacagagcgagaccctgtctaaaacaaaacacacattaaaaaaaaaaaaaccacaaacaaaacctgcaattggccctcgaagggctggttccctcagtcagctctgcacgggtgcgccccctttctccctagaggtcaacaagcgactgcgaaggaaaacgccgccacaagtttcttgctgtttctggagagacctctcagagcgcatgctcttcggatagtcggtctgtagcgccattttcgtatggaagggactgcactctgattaggtacagccttaggacgcccagcgttcaagttgttcaaacagtacgtagagcctcgcagagacaagtcaatggcctcttttagcgggactcctgcctggagcgcttcagctgagactatgtaaagaaattcctttgtgttaaccttcctccttggaccagtggactctcctctctctcctgttccctccgcgcccgcccaggctggctcagcggtctcgccccgcccctccgggaccggagcactgtaaagattaggcatctgtgatgcttttgcgctcacattggcggcccagatgagagggcgtggagaaccagatgggaaactttttgtcccgtgagaacaaagtacaagttatatcagagtctggtatgtgtagaggaaaccaatacatgtactgtgagctaggagctggtgcttctttttcaattgtattttttataaagatgcagaccccctcagtgttgggcgtggggggtggctgaaatgttagctagaggcgaggcagggcacggagatctgaggtttttacgagtgtgtgtgtgtgtgtgtgtgtgtgtgtgtgcgcgcgcgcgcgccctacaagagtttagaagagcatgggtgagtgggcgagaaagaaagagaatgagagagagagagaaaagaaatctggagtgggacaagacttagagggtgcagaaaagaaagggggcgccagcacatcctagcctccgaggccgcgacagcgcctttggcgatgtccactctcaaccccgccgtttcattcataagtttctggcctacaggccccgcccgctcccctgggccgagggccccgtttcctgaacagcaattggtggacggcaacaaagccttagcaaccggctcctagtgacccgcggggcgcctggtaactggggctgctgcggagaaaggagcggggctgtccctttaagggatggccgcggagtcgtgaaagtggagggggctgagggagggcggggaggaaggtctgggggcggacccagggggaggaggaggaggaagagtaactgctgaaaggaggtggcgaaggaggatccggagcagctgctgccagcccgcgggcactgaagtcctcccggctgccgctcgagtagccacgggcgcgatcgggaccagaagtctcctcctccatgatcactttggaagccgggggaagactttgccctgccctgagagctggtctgcgtttcccaggcgcggcggcggcggagcagcagctgcagcagccgagtccaaataggagcggccacagccaggggcgtgagcgccccgcgcggagcgagctcgggttcccctcggaatgtccccggggcgcccggcgcgctgaccccgaagccgcctccgccttcggcgcctgctgcctccctcggccaggcttgttgttcgggactgtgagcttcctggctcctgggcagtggggaagcccccgggggcgagtgacttcagctggccacgacccagccctcccccgtgcgtatctcgcttaagatggcagcggagtcaggggaactaatcggggcttgtgagttcatgaaaggtgaggagcagccgccccgcatcttccaacgctttcttgcccccaactcttcacttcccgcgccactgtccccaccttctcctgaggctgccagtgtcctgcagccgctgcgcgcgctctcgtcccctctagggactctcctttctccgaggaccccctgcttccggcttctctttcttgtgtcccttgctccctctgcagctccctcggatggcctctcggcctcgtaatgggacagcaccggcttctgcccgtactccggcactcagcagctcatggggagcctgctccggatgctcaccggtcacctttactccaccatcgcaggcttcggttttcgggacacccccaaccacaccccccaagtctctctcccttcctctttttcaaatctccgaagctgcgtcgggaggctcacctctttcttccccttctcgcagctgctgaggtctggagatttgggaaccaaacttgcacctccagttctgcgggtacccccagctcctgcctactctgctggcctgaaacaagggaaatgtgggtgctctgagccccgctgagttcctcggtcaggtcctcctcttgcctaactgttgtgctcttgagtctctagctttctgggagggatgaggtttctgcaagaattccacgtgttaatggggtctttaaattgtgatccttcgtatgttaccacccaccttcacttccacttctctacttctcatatgttttttctgtcttttaaacttgtctttcagatcggttatattttgctactttaaggaatagaccaaaaagcacagtaaatacccactatttctccatcgatgaggagctggtctatgaaaagtaagtttatgttttgtttttttttctcttggccattcagcttgttctttgacgaggaaacactatgcacttttatggcagttttattcattt

SEQ ID NO: 1538 - DNA, 6000 bp, Homo sapiens
gagttcttggctattgtgctgtaggcccctttgaagcctatggctcagaataatgacttcaaatgtataaaatacaatatgtaagattataaaaaatatcaagtttattaaaataaagttatcaagatatttattaaaaacaaatttgtgacatggtaatacatgcacttctttattaatggatcaagtaacaatctagcaaggagcctagtaactacagtgatttcaaggtagtgatgagcaggaatgatatttggagctatttgaagcaatagtaatatgacataaaaacatctgtaatttctcctggcaacaaaatcacggtactgttaaaacttttgtagtttgtggcctatggttcaaagaaaatgttaaaaattcagttagaagttagtgaacattaagatgcaatttttctctctaccaagtttatggattctctgaattctgctcatgagctcctcagggctgtgactccaagttaacaacccccagcctggatgcttgggtttcctttattctattattcctttcttcatctctttttgaaacggatcagagttaattcttgtttaatcattagcaacaaaccagtaataaagggagcattttttttttctttgagacagagtctcactctgtcacccaggtagagatgtgatctgggctcactgcaacctccgccttccaggttcaagtgattctcctgcctcagcctcccgagtagctgggattacaggcacatgctatcaggcctggctaatttttgtattcttagtacagatagggtttcaccatgttggccaggctggtctcgaactcctgacctcaggtgatccacttgcctctgcctcccaaagtgctgagattacaggcgtgagccactgcacccagccaaagggagcatatttgaacacatgtgctcaaacattaacacaagatccgcccactcaggcaggagcaaggagacccctggacatgggctccctttctagcttgcagaacaataaccatgatcttaaggtagagtggaaaggggcttctcaacctctcccccatgcttaggtgagacttactccatgcctgaaggtaaacagtctcagaggactatgccaggtcagggaatattccactccatagtctcactccatgagaaggtcgccctacatcttgaggggcccctcaaggtaggccttgagattggctgttgctacacgcgcacacacacacatctgtataaatggtccatggtgacactgacatcagctaaagcagagaaataagggccaggctgacgttatgagatgtgaactgcacgtagcccttctacacagacactcaatggcatgctgcccacctgccctcattctctccgcaggtgtgtaggattctgggaaaggcttgcccggcacatcttctccactagctctctcctccctcagcggaaccaagtccacttttagcactttcaccgtttcccctccattttttaccacttgcttcttgtctcacctcccctccggcttccctcctttgtctcctccagttcatgcttgcttagttcagggttttcctctcctttccactgtccttttccacactgcacctggcagccaaaaagtaaccctaaccatggcaaaaaagaatcaagtactgttgaaatccacctagacaagggaacaggagagctctaaggtctagagggaaattagaccctagaagtgcgagttcctggtcctgacacatggaaggaactgaatgaatgtgtaattgagttattgaataaagaatcagtactgcttatccccggagctcctcagagtctcttctgggatttccaccaagttgccctctgtcccttgtcctcctctaattaaaatggcttttcctcaagcactagcattcaagagaaataaaatgcttttaatcaatgctattggttttgttttgcaacagcatttcttgctaccattcttcactgcaattgtgagatgattagttttgtgtgtttgtggcagtggggagggagggagtgagaataggggagcgaatgggacgggtgttagcctgagaatcacctgatctgacattgtctcttggaaggcaaacttgtgaggtggggtagtgtgtgcagggcaagcagagcccacaggaccacttctgtaaggtgttccaagcccccagcaaagtgctgcctcctccctaggtagcttttctcccagagcagaaggtcctccaaggctcggatggtctcttgattcttctgtcaccagcccggcccagtgtcacagtgtacaggtgggccttacagactcattattttgattctcacctcccaggagaattttatattaaggcatacaagttcatatgtttatagaaaaaactggccattggtagcaaatgctgctgtgtgccaggcattgtggtaagcacttcatatgcatcacctcacttaactctccatctgcagtcagagggatcctttcaaggtgtgaatcaggccaggtgcggtggtgtgtgtctacagtcctagctactctggaggctgaggcaggagcatcgcttgagcccaggagttccaggctgcagtgagctataatcacacttcaacctggctaacagagcaagaccttgtctctaaaaaaaatccaagtgtataccagatcctgcctctcccctgctccaaactctccaagggttcccatcacacttggagtcaggttcctgccatgtcccacaaggcaggctggatttggtctttggctcctgctccaactgcatcccctcccatcccgtcccctggctcacctcactctttgcttctcctggaactggccaaaaagccctgccacagggttgttgcactgacttttcatccaggctctgtccagctcactccttcactttatcagtcatctgcacaagtgccttctcagacagacccttaccacatctaaaatatcaccacttgtcaaggtctgttgctttccctgcctttctccccaccaccttttttttattttttgagatggagtctcgttttgttgcccaggctggagtgcagtggcgcgatctcggctcactgcaacctctgcctcccaggttcaagtgattctcttgcctcagcctcccgagtagctgggattacaggcgtgagccaccacagctggctaatttttatatttttactagagatggggtttcaccatgttgaccaggctggtctcgaactcctgacctcaagtgatccgcctgcctctaccttctaagtgctgggattacaagcatgagccactgcgcctggccttcctttttaacagtgctcaacacaactggccattttattacaaatctgtttatttgtctattacccgtctccttgactatagtcaaaattacatgaggacagggttttgttttgttcactgctatattcccagtgccaagaacagtgtcttctatacagtaggctctcaataaatatagtcaatgaataaataaatagatgaatactcgcaaaatcgtatgatgtaaatgctattcttatcccatgttatagataggaaaactgaggcttggagagattagcaatattttcaaggtcatgaagccatcgatctgaatcaaagcatctgcctctgggggcttagctcccagctcccgtgctagttaaccttcctctctgcactcataaatgcctatcagcgtttcaatgtggaaaccctagacccctgtgacatttgataagaaaggttttgtggatgaatctgcttgtgaaatactacaaactgcatttcccacttggtgtttcaaacacttattagcatatgaaaggccctgaaaagttctgcaaaaaacaagccggtttgtgtttcccaaatttttgactgtagaagtcttttatttgtttatttgtgtattaacatattgcaacacataccttgggaaatgttggcttttattactgtggagagaaggcagatcatctgacaaagcactgggagctctctctgggtcgtatgacacagagagggctggggtcaggggcttccctcacaggcggaggggccatcccgaaagtcaacttcccaccagactggcatctgagaccaccgtgtttatacactcacggataaggccactctcatgctcacccctaaaactggaaggccagtggtgtggctctggtacctttcagccacagcccataccagctcggctctgcagggtactgagagagtgtgtgccctgtatgtttgctggctttctgcccttgggtcattgtaccaagggacacttgctggtgttcatcctgagcccatgagagagcaaatccttatgtgtgtgtcacttaggaacatcagccccacaagtctggtctttttttcctcactgtcttatggctcctcactataattttaaccttttagagaaataaggataccacctcaccctcttctgtcttctcagctacctctgtgttgagcccatggtaaatgcctagataagtcttggtgtgagtgagagggaaccaataatcttgtatgttgcatagtttggtgcagggaagcataaatggtgatgttgcaaatcccttaattcattaccagaggctttcctctgccccaagtaggatagaaggatacccagaggcagaaaagaacattgagtgaaatatacataactgtctgaatcactgcgttcttgggagagttagagcaaccgtcaaagccccccaagtatccatttttattggttttgatgttgatttgatgttgttagagattcaggtctcatcttcgcttctgagatcatctgagtaacatcggtgttggagaagggaagagcagagatgaggcatccacaggcagccctggatcctgagtgtaaacatctgggaggaggcgggggatgcaggagagcctggcctccccagcttgccaggcacaaggctgagcgggaggaagcgagaggcatctaagcaggcagtgttttgccttcaccccaagtgaccatgagaggtgccacgcgagtctcaatcatgctcctcctagtaactgtgtctgactgtgctgtgatcacaggggtaagtcgcctaacattctctgtgccttgggttttgggaagatgtcagggtctgcacgggttgtgagcccaggaaccatgcaggaggctctgttggctcaacacagtgtgaaccaaagggaatggggaattatgcattaaagggattgcatgcgattttcagactagttagacctcactctactaaatgggatctgcttttgagaagctgtgtatgaatcaaatcctgttttcaatgtgttagcagagcattgaacattttgaagttcagtcctttggtaaagtgaagattcctattaagtaataaggaattcctttataaagtggattggcaaaccttaacttatcttttgtgtgaattttaatttttatttatggtctgattcacatattaatattaatattaatttacatagcatgttgacttaattaaaggcagtaagcttaattaaaggtggtaagcttataaacttctattgtataaacttaacctccgcttagaaaggatatctttgaaactctttcactctgtgcctgcctagttagttctgagaggaatatgggtgccactaacattcagctgagtgtaccccaaagcaagcatccagataacaagtagatatccagtctcgaagcagagaagcaaaggttcagcatatgggcactgtacaattggttcaaaatattcagatcatggttttctctcggaagtttgcttttacctcaaaccaccttcaaataggggcacatgatgtgttatggtagcaggaccattcttactgaagcagaaagcaatgctgtacctgagagctttccatataaaatccactggaagaaaaaggtcggggaagcagggaaactaacttttagttcagcctccaccagctttttacatggatagtggaaatgtag

SEQ ID NO: 1539 - DNA, 6000 bp, Homo sapiens
actcacttctagcacaagactgtccaaattgctgtatgcctatttgttcacctggattctgagctttctgaacatagggactatccttttaaatgttgtattccaatgtccaacagagtggaggagctcaataaatatcttgtgttggattcatttatagctcctagcacagcacagagctctccacggtgttcagtgaagacttgctgagcatctgacatcagggcatcattcagtgataaagacaggtgtataaacagcaatcatgacacaaaagatatgttcataaagcactcttttttaaagaagaaatttccctttttgagaaaatgagaccaaagagatcaaaagtccaagcagtactttaaaatttatcttagaacatcagaaaggacaccagagatttcgtttttaaagaggagctttcccttttattattttaaaggagtgcccccattattttaaagaattagaaagaaagtctggattcactccataattgctaaggaataaaaatattacatctctgaaagagcaatcttattttaccaagcctgaaggtatgcctaatctagaataatacattttaagtaaaattaaaacaatgtaattagcaatatgaaacatatgggggctatgatgaccaggatgaaaacagatgtgatcttttttgttggaccactttactattcatttatttaagggcattttcctccctgtaccctaactactaaaatggccctcatgctatttttttaaaatactttccttaaatacttaagcatttaggatatcataccacttatttgctatttgttaactcatatggcattttcagtttttaaaaagagttggctcagaaaactgagcatatcaggatgatgttatggatgataccagccatgaaaaatacacttcctatgatgtgcagaaaaccacatcagtttcaccaaaaaaacacaatttgtgcctctggaattggatctcatatcaaacatttatcaaatacatatgatggacaagatcctgtgcagaaaaccaggttgtacctgggcgactccttgctctcaagttgaccatacagggaaggggcatttgagctgggaagtttttcactcactcccctccatgtgtatacagaaatggcgaggtctttctagtaccaggctcactgtttagaaacactacacatctgtgtgtgactaagggctctgaaagcgcatgaggaggaggttctggtgaggatgtctctcttttgttgtggctgctgagtcagcctactccccacatctggcccttcatggggggcatctaccactattcattttgtcctaaatgcatttgtttacctttgatgtgccaggaaccaagcccactgagtctcctttgggtttagaaccatattgtctacaaaacaatcgcaacatctatagtcattgaaaggcatttggagaaacattctcaagaattcgagaattgaagttacataaagcatgtttccatctaaatgcactggggaataaaaaagggttcacggggcctctggcattgctccaggaaaggactattacaccacagaggaattgggtttttgcccagtggcctttggaatgacctgaactttatatactttttaaaatagatgccctgtatagtcatcacctggcagtagagaaatttcccaagtctactctattacatgtgatgcttacattcttctgcaagcattcgtatattctacacccccaatgggcctgatccccaggacctacactaaaggatctctcccacttgccaatggtagtgatatcccagccttagcaagaggtccttgccttggagacacctaggtttattttttttaacttctttaaaaaataatttcaacttttattttagattcatggagtacaaatgcaggtttgttacttggatatgttgtgtgatgctgaggtttgggatacagagaatcccatcacccaggtagtgagcatagtacctgatactatgctcttcagcccatgcctgcctccttctctcccctctctagtagtcccagtgtctgttgttcccatctcttttctttctttcttttctttgagacggagtctcgctctgtcgccaggctggagtgcagtggtgtgatcatggctcactgcaacctccatctcccgagttcaagcgattctcttgcctcagcctcctgagtagctgggactacaggtgtgcaccatcaagcccagctaatttttgtatttttagtagagatgggatttcaccgtgttggccaggatggtctccaattcttgacctcataatccgcccgcctcggcctcccaaactgctgggattacaggaatgagccactgtgcctggcctatgctattatattttaccacaattaaaaaacacaaggaactacagaaaaagcaaggaagctactcataaccttacacaatatccccctactcccagtctccactgtcaatcataactttctggagaagtaaatggagaaagcatattgcaggttaatttatgtttgaggcagcttattccagccatagaaaggggatggatttaagcaggacaaaaggagaggcagggaggctggtgatgcagtgacagcaataaggcaaaagataatgaaagccttaactagctagctctctgctaaaagacagacattagaaacacattgagaacctaaatatgtttggtgcgtgactaatgataaagatgaagaggaagaaatctaggtacctagctttagaaacttagcgatgcaccattacttgagaccagatacacagggaaactgaaatttaataatttaattagaaattttaaatattttcactaaaattttaaataacttgattacaattgctaattgggaatgtgattatagtggtttgtaatttgttaacttggttaaaatggctatttcccagactgctcttcctcatatgtttctggctggggtaaaccgtaagagacattttgtgtgagttctgcaaggtggaagtgaagcagcacccagaatgttttgacatgcaaagggttggtgcaggagcactaggcaccaatgcagctcacgtgtacgtgatatcacttatctgctgcttcatctccttggcatggggcagcagccagtcctgcagttagcttctccacctcctcctggatcttccttcagcttttctaactcttgagccggggagtatttagctccaagacaaagtgtgccagcttctcctgtagacacccacatcatcaaagttagaggtaagagagactgacacaggatccatccatctttctgggttctggttggtggttctaggattcagcttgttcctcctccttttctccatttacatgcatcttcccacttcctgactgccagtcatgcaaacttcatgctccagcatgagacacaaagacaacagcctcacagagactggataatcacatctcacaattgtgtaaggttcaacttctggtggttttgcttccctgacaaaccctgatagagaatttggtagcagacaagattccaggggtatagaacctgaagaatgagttgtctaaacaggttccaggttacttggaattcatcctctgattttcctaatgccctgtttccaatggttaagaggacattagtattatgcagtggcaaacagttacacaaattatcacattgacacctttaatcaaatgcctatggaacgacggttggcaaactttttctgaaaagggacagatgataaatattttaggcattggaagccacatagtctctgctgcatacactccacctagactctgcatagtctctgtctctactcaactctgtggttgtagcacaaaaacaaccacagacatatgtgtatgaatgaacgtggctatgttccaataaaactttatttacaaaaataggggcaagccagatttggctcaggagtcatagcttgctgacttctgctatagaaggaaagctttggatgaacaagtatttgctgccatagaatatttcagtgaaaatacaaaccataatgggattgattaattgcttctaagtgtgctggagaacttcagaaaagaaaatgatgagctctgggctttacattcttagctcaaggtctatataaggaagctaaactcttctatgattaccctaaaagaattctgactgatacagtgatgactgaactaaaatcagtagatgttttgcaggctaactttaaaaagaagcaataaatttgtaggggagttaatttgggacatgccaagttggaggtgtcaatgaagcgtccaagtggtgacgcttggcagacagtaggatgcatagtctgaaactctgggagaaatgtccatttggaaatcactcacacgtactcaattgttataatcacaagaataaaagaggtaacaaggaaaatgagagagagagagaaagagagagagagagaaagagagagagagagaaagtgcaggaggctaaagcagaccctaagaaacccaacattcagtggagggacaggggacgaggggcccgtaaaagagcctgagaagttgaagaccccagaagagagtagcatcgccaagatcaaggaactggagtgtatcaagaaactgcgagtgaatgcaataaaactgcacatggcagaggttgagaaagtcctaagtcaaaattgaaacaaaagatccactgccttcaaaagaaacaactggagaggaaaggcaaggtgatgaatttttatgaggtgtgtcaccaggaacaccattcattccataagcattcctttctttaaagaggaatacctctcttaacagcttaactcagggtggtgcaaagaagctttttttttttttttgaagggttttttcaaatgtttattttatgtacaaagaactatcatgtttttaattgagtagatgccttggataatcctttgaaggaagatcgtttagaccagcttaatgaaacagacatccttcgcgtactgacggaaacactggcggcacatattgaggccgtatttcaggatcagacctgccggttcgaacacacgcgacaagagcaaagaagttaaaagagaagtgtctgtgtggctccttccacgtgggtgaaggactgtgccagctgagaggtggtagagcaggaagctgcctgaggacctccatttatttggtgaaaaactgggctccgcccttaagagagcaagtcgagggccgtgtaggagttggaggagagaaatgaaattttggaagagtcagcagaaggtgggaaatttttatttcatttacagcagtacagacttcatgcagccaaaagtatgaatgccctttcttctgtgacttacactgtaaagggagcatttctcttatgtgcaaactaaccatagtggacatgtttgtctacatccagaccagttcctagattcaaaacttgtctttgtttttgtttttgttttttttttctttttttgagatggagtctcaccctgtcacccaggctggagtgcagtggttctgtcttggctcactgaaacctccgcctcccgggttcaagtgattctcctgcctcaacctctggaatagctgggactacaggcatgaaccaccatggctggctagtttttgcatttttaatagagatggggtttcaccatgttgggcaggctggtctccaactcctgaactcaggtgatcctcccactttggcctcccaaagtgctgggattacaagcgtgagtgagccatggcgcccggccatgtatttgttttataaccatgagaaactaaaatcaaaagtctatttgtagattctcccagtgggttataaaatctggaatatttctgaagaaattatttctgctacacacacacagacacatacacagagagacacacacacagcgcaggtgacagctctttggtaactcaactatgaagtatagtttttagaatattttcactgatgaaagatca

SEQ ID NO: 1540 - DNA, 6000 bp, Homo sapiens
acacaaaatgcactataaagcagcatataagtgccataggtgtggaatgaataggaactatgggacttcagaggagggctccacttaggagttgcaatatgagacaggccttcaaggatttcaacagattttaggtttgatagagggaatggaaggcatttgttgcaggcagagaggtaacttaatacgttgactcctttgtaaaaagttagtaggagttacagcaagtagtttgatatacatgtaagggtatagtgaaaggtaaggctagaaaagtgggatggagatacacaattgggcaagtgccagattgagcagtttgtactaaatttgatggggaactactgatagtttttaaaatagggtggagtcatgatctggacaatgcttcaggaagatggttttggcaagaacacaagacggactgaagggaaggcaaccaagcaggagaccaaacaggagatcacagcaaaagtctcgacctaggttaaccaatacctgacctagggtcgtggcaatagagctagagaggtgggggcagctggaagggccattgtgtagaaagtatagtatttatacctgtgcagtccaatatagcagctcctaattaaggctctttaaatgcaactttaattaaaattaaataggatttaaaattcaggccaggcgtggtggctcacgcctgtaatcccagcactttgggaggctgaggcaggcagatcatgaggtcaggagattgagaccatcctggccaacatggtgaaaccccgcctctactaaaaataaaaaaattagctggccgtggtggcctgtgcctgtagtcccagctactcgggaggctgaagcaggagaatcgcttgaacctgggaggtggaggttgcagtgagccaagaccgtgccactgcactccagcctggtgacagagtgagactctgtctcaaaaaaaaaaaaaaaaaaaaaatttacttcctcagttgcattagctgcatttaaagtgctcaatagccatatgtaactcctgttttggactatgcagataaagaacatttccatcacagtgcaatgtttattgaacagtgcagctcactatgctttagggactaattaggcatagaatgaggaagatggattaaaggaggcttcggtttggcagctgagtgactgagaaaggtagtgccatgaacagaaaagaggaagtcaggaagaggaggagctggatttaggaagaaaggtgtttagtttctgtcaaatactaggccagataaagtgtctacccaaatcatcagatatccctggtgaaaggaaagggcagggaaagcaaagtgcccattgggttctcccaaagcttgtaaaggagccctgggaggatttaattggtttatctcctcctgcactcagtttctcctgtttgtgcagctccctgaagattatgagtgggcaatccagttcctcaacctctccaaaccaatggttcacatataccgtgatgaggacagaagcccaagggctttgctgtttccttagctccttggagccagcttgaacctttttctcacagatgctttgtgcttcctgtcccctaaccgccttactcacccttccccatgctcaacttttggaaagtccccttggcctcacttgtttgattacttcctctcaaactacttctcacagggaccacagcaaaccattgactctaccactttttacttgccctgtcttccctcccagcttaaattccaaggtctatcactataatcactcccttacataatactcctacccctctcataggctttccccagcaaaactcagacctggtcaaatacaattctcctccaacccccaagcaatggagtgtggctggaggagaatcacacggccttgctgagtggtctcactttaatgtatgatcatcaactcaagagggccctcagcactgtccatgctaagcttctctagtcacttttccactcttcaaggagattatttctcaccttcttctatctcctttaatagccaacagcttttcattgcatagagaacagatcttacctcatcaatcccagtgaggcagccagtacatatggcactcagtggaaactgggaaaaggtccatacgtgtgtgtgtgggtatgcatgtgtgtgtatgcgcatgtgtgtgtgtttgcgcatgtgtgtgtgttatatgcaggatgctaacatgcaccacctctcctggtggagcaatcagaaaagtaccccttcctccaggctgatgtgaccccaccagggcacgtggctttgtgggcaaaacaagggctacatttcagctcctacctgccgcctctgctctacaggggcctgagcgtgccacaaccaaatgtactgtctaatctatctgcttctgcacccagacactctaccttctctccagaaacagtgtgtgaatgcattcccttactcctatcctaggccaaccctttcacttctgtgctagatccaattgcttctcacctatttgaggacactctttctccagttgtctcctcttgccttctgtgtcatcaattttacctctcttacagagtctcgctctgttgcccaggctggagtgcagtggcgcgatctcggctcactgcaagttccgccttccaggttcatgccattctcctgcctcagcctcctgagtagctgggactacaggcgcctgccaccacgcctggctaattttttttgtatttttagtagagatggggtttcaccgtgttagccaggatggtctcgatctcctgacctcgtgatccacccgccttggcctcccaaagtgctgggattacaggtgtgagccaccacgcctggcccaattttacctctctaaagaatcattccagctgggcgcagtggctcacacctgtaatcccaacactttgggaggccgaggcgggtggatcacctgaggttgggaattcgagaccagcctggccaacgtggagaaaccccgtctctaataaaaacacaaaattagccaggtgtggtggcacatgactgtaatcccagctgctttggaggctgagacaggagaatcgctcgaaccagggagttggaggttgcagtgagcggagatcacaccactgcactccagcctagcaacagagcaagactccgcctcaaaaaaaaaaaaatcattccagcatactaaaatgagaaaaagcatttctcatcttaaaatatcctcccttgatctcaagtacctctctggctactgcccttttctccttcaaagcaaagcctctcaagagctgtttagaacactttctcttcctcacctcccatcctattaacataccctaatcagactttctcccctatgactccactgaaactgttttcatcaaggtcatcagcaacttcatcaggccacatccagtgttcaaattctcagtccttatcttactaatttcagcagtatctgataagactcttcactctctccttcctgaaacaattatcttgttttccaacgcttcaccttctcttggtgtttctcctgccctgactggtagcgcctccttttctacttaaccttcaagtgttggagtgcctcttggtcctttccttcagctatctcccctccccatgtgatcctaactagacttaagacttaaaaagtatctatttgctaatgaatcccaaatgtatctctctagactcatatatcgattgtttattcaatatctccatttggatgtataacagacaccttaaacataacatgtgtaagaaaagactcttgatttccccatccccaaatctgctcctccatttcattaagtggcaccgccattaactcagtcatcaggcccgaacctaagaatcaactcttgatttctttttgttctttcacacactatgccccaaatccaaatccattccaatcaaaatgtatctaaataaaataaaataaaataaaatagccttcttctcatcctgtccgtggctgccaggctagttagtccaagctaccttactggtatcccaaggacatctgtgcttctccattgtgtattttacacacatcagcaagactaacttttaacaacatgaatcagatgcggtcattcctcggctcacccttctctcatggtttcccgttcctgttataatggcccacaggcttcactggatctggccaagcctagctggtactgctctcgggctggctgacgctgctcagccatgccggcctttcactgtttctgcaacatggcaggcgtatccccacctctgggtttatggctgattttctctcagcttggaaaggctattcctcctccaggcccgcgtgtttgcaagacttattccttcatcccgtgtgtatgcgctcaaaggtcttctttgagaggcagtatctcaccaggtgtaaagtcaccctatcctctgctttatttttctccacaccacttatcactacctgcaatttttgtcacttgtttgttgtctgtctcccctctctcactccaccagcatgcaagctgcaagagggtctttgcctgtctatgactttaaacctctgcgcttagttagaacagcgcctggaacctaacaggtgctcaattagggcttgtcgaatgattgagttccctccaaattctcttcttgaatctttggacccttcctcatcttttttccggtcttacccacctcccatcccgccctacgcaaagctaaaactccccgccccttcccggtagctccaggctttcccggctccagtgtgcgcggctcctttaagcggactccggaacgccgtggggaaggcggggccgaagcccagccatcgccaacttggaggggcggggcagaaccagggggcggggcctgcgtggtgcgtgcgtgcgcgttctggaggaggcgccgccgccgctcccgaggcccctgccgccgccgctcccgctgctgtcgccgcgcagagccggagcaggagccacggccgagaggagggaggaggaggaggaggaggtggaggaggtggaggaggtggaggaggcgccggaccgggggggtgagtaaggggcggggagctccagacggccccagagggagcggggggcgcgggtcggccgagccgagggtgaggcggctcatgtcgccggtcagtcgcctggctcccccttcctcctccgcgttccatcggtgtcggggcggcggcccgggggcctggccggcgggaggggccggagatctgggaggcccggccgccgccagggccagagccaaccacgcccgcggaccgacccggtcgactgtaggcctgcgggagaccgtcgggaggggccccggccggctgtgggagagaaagaggacattgtgtcccccacccttcagctccccgaggtgtcatagcacaagcccatttccctcgccgtctccccagacacggtgccctcgtacctcactgcctgagagaagtagaaggttggacatcgctgccttcctcctcttgcatgtcccctgtctagggtcagagcttccttcaaacccagctctcccttttgggcccgcgggggcgggggggagggacacacggggaacggggttggagggttgggtgaattctctgtcctctgctgtaggagtgcgggtagactggagcattgctgtctccgggctcacttctgtcagggttcagggtctccctttccttcctttattcccccagttaatagggctgacatctacatcccactccaccttccagcccctttcccgccttctttaccctcatgtcttccgtagcttaccatgtgttcgccttttcagtgttacttttcatgggtctctgcttcttccctgaattttgttagggaagaggtcacggtgtgattcttgttatccttcaaactagcggcttggtaagagtatctcttgcccccttaatcaggaagttaaggacggtgtcttcagccgagttgtgtaatttactgctacggggagaagatgagaggaagacatttgtgc

SEQ ID NO: 1541 - DNA, 6000 bp, Homo sapiens
tcgccctgctaactctgtgttttctggtatcatctcccacataacctacccacgcccaggtttcttgtgcagagtttgctttggaggggacatcaaaactgaaaaagttaaagagcatagagaaaagaagaaaggctaaacacctcttatagaaaaatgctaactaatatgtaaaaagaaatgagagaattaggaagattgccattttacaaccccaatgtgaaagttgattttagcaagggccattaatttacgctaaaatcattgagtgaaaggttaatggggaacaagatattcacatggtctcaaagtattaacccacagattacttaatgattacaaggagatatacctgctcagtggaaagatctagtcaccaccttgtcagatcactaggctggggtggttttgtggtggcttagcctcagagatgatggggagaagtggctgcttacccctgaagcaagaaacactccagcagtagttctaattccattatcatgtaggaccttggctgaaactgtacctcatgtgggcaacagtgagtggggcacagtattggatccttctctggggggagcacagctatgtggattccaggcagctccctcagctgggtttagtgcctatgaggactgcaggggccccagtggtgaggcctgtacctgtccaaggtgttgatgggggttgctggaatccccttacttaccacctcaccataaggggaagttctccttcctatttgatgccggctgggggatacagtggtggaggcctggcatttcctctcattctctgttctctaagtggcatcccgagtttctgtgctcaccagggtttctattagtcctctgatacactctagaactctccctgttatttttgtgaaaatatagttgcttattagttgttctggctgtctttgtgaggaagatgagtgctagggacttctaatagaccatgttgctaacattactctcctcaaagctcgttctaagccttaaacattccctctaaaagacattaggttatttctaatatttcaatattatgaatatactttgtgttttaatttcatacacatccttatttacttagaatatttgtaattcattctttttttcagggggaggggatggagtctctctctgtcgcccatgctggagtgcagtggcgcgatctcagctcactgcaacctccaccttctgggctcaagcaattctccctggttcagccttccaagtagctggggattacaggcacccgccaccaaacctggctagtttttgtatttttagtagagacagggcttcaccatgttggccaggctggtctcgaactcctgaccttaggcgatccacccacctcggcctcccaaagtgctgggattacaggcgtgagccactgcgccctgctatttgtaattaattctaagaattctttgtgtagaattcttacctaaataatagtttcttcttcataagtcaatcattcctgtcgtttcatggttcctcctcagacccacttcagggcagattcattttgtccaacttcaacttcactttctctgctattcaggagtaatctagtcatcttcttttaacttgttagaaagcagtatgtcttcttaaggcatcagttccttaagtcctcatgacatggccatgcattctttttcctaaaactgtatttattgacatctgcacagtccaagtgatgtaggaaaatatatgtatttatttattacatgattacctgatgatgttatcctcataaaatgttgagacattgtaagttgaaggtaccccatctggacagtagaaatttctgttgtaaaagccggtgatgaggagttcgagacgagcctggccaacatggtaaaaccacatctccactaaagatacaaaaagtagccgggcatggtggcacatgcctgtaacccctgctactcgggaggctgaggcatgaaaattgcttgaaccctggaagacagaggttgcattgagccaagatcacgccactgcactccagcctgggcaacaaagcaagactctgtctcaaaaaacaaaaaaacaaactggtgatgattgttcccaagccagggagctgcacaggtgagaggaaagaaagctttttgtccaagttgccctctcatagcctagacaatgctctctgtcctaggatgcaaccactaccacctcaattcccccagtatgcacgtacacactagttcaaaacaatcctttatctatccaggagcttcttacagtttgcttgttatttcctggattcctgtagtttctttaagtttgaacttaggggaaggagtcagcagtcaatctctttcaccatattcatcaaaaaatgccgttaagactgggcttagtggctcaggcctgcaatcccaacacaatttgggaggcggagacaggagaattgcgtgaggccaggagttcaaaactagcctgagcaatatagcaagatctggtctctacaaaaagttaaaaaaaaatttttttttaaataccgttaaacacattacaacagtgctataacaaaggactggggcatgggttaaaagagaataaatgaataaatgaattaaacaggagtgcccttgcacagggcaaaaagtcaaatagtgttcagggcttattataagaaagagcaattctggccagatgcagtggctcacgcctgtaatcccagcactttgggaggccgaggtgggcggatcacgaggtcaggagatcaagaccatcctggctaacacagtgaaatcccgtctctattaaaaatacaaaaaattatctgggtgtggtggcgggtgcctgtagtcccagctacttgggaggctgaggtaggagaatggtgtgaacctgggaggcagagcttgcagtgagccaagattgcaccactgcactccagcctgggcaacagagcaagactccatctcaaatttaaaaaaaaaaaaaaaaagaaaaagaaaaagaaagagcaattctttggcctatcacattctaccacaattcccagaacccctaacattcaactcattcagatttttcttttggaacttgctttgtatttctaaacaaagttttgaaactcttatttcctgatttttcaattttagatgttttctgttggctagagagggagatttattgtgaagctaataaaggttaagtttcagagtccctcattttcatgggccctctccaaggccctattcttagccattgaatttggaattttattttcttacggagcattcagctggtgctgtggctcatgcctgcaatcccagcactttgagaggccaaggcaggaggatccctttagcccaggaattcaagaccagcttggggaatatattgagagccctgtctctactaaaaataaaaataaaaaaatattagccaggcatggtggtgtgtgtctgtggtcccagctcaggaggctgaggcaggagaattatgccattgcactccaacctgggtgacagagtgagactctgtcttaaaaaataatttttttaaaaaatttggccgggcacagtggctcacacctgtaatcccaacactctgggaggctgaggcaggtggatcatgagatcaggagatcaagaccatcctggctaacatggtaaaacccagtctttactaaaaatacaaaaaattagccaagcgtggtggcacgcgcttgtagtcccagctactcaggaagctgaggcaggagaattgcttgaacccaggaggcagaggttgcagtgagccaagatcaggccactgcactccagcttgggagacagagcgagactccgtctcaaaaaaaaaaaaattatcttaaaagcatcctccaaatcatgtatgcccccggccccataagccctgaatccacccttgatttactaactactttggatgatgagggtttagctaacttagatcgtagcccttgcaacacacatcaatacacaaacatttccccttcccggtttcccaaaatgtagtcaagctattaatttttagttcatttatcatgttttagcctctaagggccctttcttgttatcttttctacattagcctgttctttgtcttatggatccaatattcgatctctccagcaatattgtaggggttgtcttattttgtttgttggttggttagttttttagtttagttttattttctcaattgtctgtttccttttaagttccttttccctcatggtttgttttggcctctctcttatattggagactttcctaaaatgggtggtcatccaaccatatttaagaatgaggcaccaaagctggacatagtggtgcatgcctgtagttctagctacttgagagactgaggtgggaggatcgcttgagctcaggagttggaggctgcagcaagctatgattgcaccactgcattccagcgacagagcgagatcctgtctctaaaaaaaagtaataaaataaaataatttaaaaataagaatgaggcacttaaaagctaatcagaagctcaggttggggagttttctaaatggtgagtgtggtaggaaacctgaaaggtagcacccagtgatcctcacctcctggtattcatgcctgtgcaacaaaaggattaaccttgccccaagaagtatctggcctttactctcactttctgggaggtaatctctaaactcttggaatgttctttgtttacctgggggccttgggccatgccagatggtctatgctaactatgtgatatatggtaggggctctgaaccatgcattgtcagctcaacctcaggagggggttggacatgaaggccagccacacaggcagtcagccacgtctacatgaccaataaaaattctggacaccaaggcttggaggtgcttccctggctgggaatattgcatgtgtattatcacacattgttactgtgagaagaatagctccactgggagaggacaactagatgctctgcatttaaaactctcctggggcacagcagctgcacatcctggggctcctgacctctttgcgtttgcagtgtagcccaaatcggtcagcactggaggacctcagcagccatgttgaagccccatagtgaagccgggactgccttcattcagacccagcagctacatgcagccacggctgacacattcctggagcacatgtgccacctggacattcacacaccacccatcccagcctggaacactggcatcatctgtaccattagcccagcttcccaatcggtggagatgttgaaggagatgattaagtctggaacgaatgtggcttgtctgaacttctctcatggaactcatgagtaccacgtggagaccatcaagaacatgtgcacagccacggaaagctttgctgctgaccccatcctctaccggcctgttgctttggctctggatactaaaggacctgagatccgaactgggctcatcaagggcagcagcaccatggaggtggggctgaagatgggagccactctcaaaatcatgctggataacacctacatgaaaaagtgtgacgagaacatcctgtggctggactacaagaacatctgcaaggtgatggaagtgggcagcaagatctacgtggatgatgggcttatttctctccaggtaaagcagaaaggtgctgacttcctggtgacggaggtggaaactggtggttcctcgggcagcaagaagggtgtgaaccttcctggggctgctgtggacttgcctgctgtgtcagaggacatccaggacctgaattttggggtcgagcaggatgtcgatatggtgtttgcgtcgttcatccgcaaggcatctgatgtccatgaagttagggaggccctgggagagaagggaaagaacatcaagacaatcaacacaatcgagaatcatgtgggggttcagaggtttgatgaaatcctagaggccagtgatgggatcatggtggctcgtggtaatccaggcattgagattcctgcagagaa

SEQ ID NO: 1542 - DNA, 6000 bp, Homo sapiens
ggaaatcaaggctgcagtgagccgttgatcgccactgcactccagcctgggtagcagagcgagaccctgtctcaacaataacaatgacaaaaattcttcacttaccctgtaatcatcaagaggatggttagaagcttctgcttcccacctgtttttctcatgttttccactattgttgactgagtacatttgcctggatgctgaaaattgttaggcagctgaattctttggcatagtttttatctgtagcctgcaccgggctccaggcaacttcatactgtagggcagggctcagcatatatggtggccttttcttgtgatcacagccacaaccatttgtttacatattgtttttcgttgctttctcactacaacagcagagttggttagacaggatgacttgcaaacctaaaataatactctccggccctttaggaaaatggtttttggtctctgatctggaaaaaggaacctatgtgagggagccagaattcgaacaaaaaaaaaggaggtggggtgtcaaatttatctaaattgtttttgcctgtgcccgcctagttgtttactggctcattgagtatgggacaaaagtatttttggttggctcatattgtgaacttgggaagaagatagtcctgtgaatattggcaacccatagtgcttaaaatttaggcaatgggattgtaaatgacagtattttttgttttaatttataaatgcagtttaaaattgttcatcagctaataaagtactgatgggagctgtgacattctcatttggttccatggtagtatttaacatttaggatttcatttaagctttaaggtgaaacttctgagtactgaaaatgtaaatatattttaagtaacataacacatttttagcagttatataaacttcctagggtcatcagcagaggactgttgtgaaatactagcttttagactttgtacctgttttacaggcgatatgaaaggtgaggtctatccatttggcatcgttgggatggccaacaaaggggattgcctgcagaaaggggagagcgtcaagttccaattgtgtgtcctgggccaaaatgcacaaactatggcttacaacatcacacccctgcgcagggccacagtggaatgtgtgaaagatcaggtaagtgccagcatctctgtatctgaatttgatccttctatgagttggtaaccaaaaccttcaaatattttcagccaaggggaaatcatcaacattcattcgtttttttatttctacttcaccttttttcagtcatttgaggtagcttaataaaaacagaaaactacacaaaaagtgactatattagcaatgagaaagtaagattggtattagtaactaatattatgcaatggggaaaataagttaggggtgagatttccagaatagaaggactatatggttttgtacacttttgcttagagcttcttttgcatatcacacaaacacagaaaccacgttcaaaagtacttaaaaaataagcttagggcaaacaaacttagtcttactcctgagatctcagggaaatctgagtcctcagaatgtttttcatcagtacagagaataataacattttgtatggctgctactataacccagcttaattctagaggggatccaaacaatatatatgttgaagtaacagcttcctgatgagtttgcttaattcaaaaagcttagttcataatatacgaaggaacaaggcaagttttatttgtttggttcaagtttgtgatatagtgaatggcactttcagagatacatttcttccctgacaggttttgccacaggcagctggactggagtatcaacattaataccatgttttatacatccttttagataggggcaggcattgtgcttcattcagagtgaggtgtggcatgccctctcttttttacctacttttttttttcagtttggcttcattaactatgaagtaggagatagcaagaagctctttttccatgtgaaagaagttcaggatggcattgagctacaggcaggagatgaggtggagttctcagtgattcttaatcagcgcactggcaagtgcagcgcctgtaatgtttggcgagtctggtgagttttgttgttgtggtttgattagtaactaccctggagtgtctcaactttatagtctctgttttgtcacatcacttttctgtgccttgtcttctgccacttattatttcttgatacttcctacttctagttgaatacaaaaagattgtttagtacatgttttttaaaatttttgccaaattcttcttcttccattaagtcatttctaggttatatgctacttaaaattctaatagtttagccatgctgattcataatgccgctttgcttccccagagacagtctcacagtctgattcggttacccaggcgctatcacgactcactgcagactcaaccccctgggcctaagcaattctcccacgtcagcttccccagtagctgggactacaagcatgcgccaccacatgcagccaattttattttttgtagagacatggtcccactgttttgcccaggctgatctcgaacttctgggctcaagtgttcctcctgccctgtcctctcaaagcgctgggattacaggtgttagctaccacatctgctaccttgtttttttatgcatctgtggaactggtcactcttgattgcattcaagtctagggtctgcaaatgattccttccattcctattaagttgggaccttgagttggggataataatacataaacaaacttgtctgtcctgtctttctagctaggtatatgaggcaagagtcccatcataaaaagtgagtcatttgggcagttaggtggaaaacacactcctttgcaagtgcttgctgtctgcccaccaagtgtggtttcttctcatcttttgacttaattacagtgagggccccaaggctgttgcagctcctcgacctgatcggttggtcaatcgcttgaagaatatcactctggatgatgccagtgctcctcgcctaatggttcttcgtcagccaaggggaccagataactcaatggtatgagggcatacaaggcttgggggaggccaactgatagaccaacataaaatatgtggtcctatttaaacaataggtcaggaaacttaatgaagcagggagacttccatattgcttataactagttaggactttctacacattggttcagccccctaacctaatggttgcttacagtaagaagcacatttcttttcttgatgctttgaagacagtttaggtaatgaatgggtcaggagtgcttactgtggattttctcctctaggaaagaattagtactgcataagatgattaaaaataatgcttttgtagtttcatttcggaatagtgaatgtactatgattgttgtgcgctcaaatcattaactgcagggttttttttttctcccccccacaggggtttggtgcagaaagaaagatccgtcaagctggtgtcattgactaaccacatccacaaagcacaccattaatccactatgatcaagttggggggaatctggtgaagggttctgaatatctccctcttcatccctcccgaaatctggaatacttattctattgagctattacaccagttttaacaccttcctcgtgttatgtttaaaaaaataaataaatttaagaaaaccattttaaataatgcacagttgcagcctggaaaaacttaaggtggcgccttatagtatcaattttaggagctttatttggtgcatttaacgcaactggtaattgcagaatccactttgcctgtgtaagtgaaaaatatagactgttatcttgttggccctatgaaattctgcacttttcattatatactctaccttcattaattacttctggcaagatgttctgccttagcactcagttgcattcttttcctttttcttcctgttcattatgctttaattctgaggaccatatgagggtagaatatattatcttttaaaaattacaaaaatttgtataggcaaaccatttcttaaagttgatggccaaattttaaaatgttatttttcatatcatttataatcttgtcacaatccacttaaagaagtttggttatatttcagtgaaaattttcttccagagtaggttttttttcgtgggttggggggtaactttactacaattagtaagtatggtgcagaatttcatgcaaatgaggagtgccagcagtgtgataatttaaacatatttaaacaaaaacaaaaaaaatgaatgcacaaacttgctgctgcttagatcactgcagcttctaggacccggtttcttttactgatttaaaaacaaaacaaaaaaaaataaaaaagttgtgcctgaaatgaatcttgtttttttttataagtagccgcctggttactgtgtcctgtaaaatacagacacttgacccttggtgtagcttctgttcaactttatatcacgggaatggatgggtctgatttcttggccctcttcttgaattggccatatacagggtccctggccagtggactgaaggctttgtctaagatgacaagggtcagctcaggggatgtgggggagggcggttttatcttcccccttgtcgtttgaggttttgatctctgggtaaagaggccgtttatctttgtaaacacgaaacatttttgctttctccagttttctgttaatggcgaaagaatggaagcgaataaagttttactgatttttgagacactagcacctagcgctttcattattgaaacgtcccgtgtgggaggggcgggtctgggtgcggcctgccgcatgactcgtggttcggaggcccacgtggccggggcggggactcaggcgcctggggcgccgactgattacgtagcgggcggggccggaagtgccgctccttggtgggggctgttcatggcggttccggggtctccaacatttttcccggctgtggtcctaaatctgtccaaagcagaggcagtggagcttgaggtaagtttatctcatgcatagtgttcggctttgggctgtggaatgttcaggcgtttcactgatgccagaaatggagcagaatctatcagctggagacaaaggccttgggcgggggtccttccatttggtgcctacgtggggagatctttggagacagaagggagaatgggaaggagttgcggcctggaggcttcctgctagagctgagaagccttcggggagtaataggaagggggatttccattgcttaggctgagggcggggcccaaggactgttgaaaaatagctaaggatgggggttgctagaaaactactccagaagtgtgaggccgatattaatccggtgtttttgcgttctctagtcactttaagaaccaaatggaaggtcacactagggttttcatttccattgattatagaaagctttaaagtactgtagatgtggctcgccaattaaccctgattactggtttccaacaggttcttgctggtgtgaaatgactgagtacaaactggtggtggttggagcaggtggtgttgggaaaagcgcactgacaatccagctaatccagaaccactttgtagatgaatatgatcccaccatagaggtgaggcccagtggtagcccgctgacctgatcctgtctctcacttgtcggatcatctttacccatattctgtattaaaggaataagaggagagaaagtaaaaagttattttgggtatacattcagttatgcaataagcttaacgtgtttatagagaacagttcatttttattagctgctgaagtttctaaaacctgtccagtttttaacagttctgtaaactattgcaaactcagtgttgagttcattcatgagtttcttcatatataacagctctattacatgagaaacacaggccatagtagcgagactgtctgattgtatgggagataataggatggagataaaggattcagagatgagtgttct

SEQ ID NO: 1543 - DNA, 6000 bp, Homo sapiens
gattaaagccaaagttcttttcatcattgcctattactattccttttgcttattccattccagccatgctgcttttgacgcagatattcctaaaaaatttcaagcaggctcctggtacaggttctagtgtatttgataagtcttctgcctggaaacctctttccccagatagtcacatgactcccttattcaccatcttagatttccgctaaatgccattttatctctgattcgcctttgaaaaattagttaccaccccttaccctaaattcttatcctcctccctgttttttttcctctataacacaccactctgctatattacgttattactttaaaaaatgtgtatatgtctctttcctccccaactgctctcagacccagaatataaactcagtgaggggagaaaattttgtctgttatgttcaccgctgtatcgctagcacagtgactggatggatgaatgaatgctgcctaaacattaataaattattgattggctcttatattttacagctggatacttgaacaactttgccttttatttactgttgatcttgggaaaattactgaatttttttaagtttcaagtaagcccttggctgcttttatattctttttttttttttttttttttttgagttggagtttcgatcttgttacccaggctggagtgcagtggcgcaatcttggctcactgcaacctctgcctcctgtgttcaagtgattctcctgcctcaggctcccgagtagctgggattacaggcgtccaccaccacacatggctaatttttcatatttttagtagagatggggttttaccatgttgggcaggctggtctcaaactcctgacctcaggtgatccaccagcctcggcctcccaaagtgctaggattacaggtgtgagctactgctcctggcccggctgcttttatattcttataactacttactgacccttccttcctatgtaacttagtggaaattacttaattttctaggtttcaagaagctcatctggaaaatggtgataataatagaacttacctcatacagtattgtgactactacataaaataatacatagaggcaagtcacttagcataatatttagcatatattaagggctcagtaaatatttgttttttgttatttaaaagctgcattgttttaaaagattatttatcttttgctactttccaatatacattaagataaatatgatgatatttttcagatcgtccatgccttaaaaataagcaatatatggaaaatttataagaaccagttttacaaatattgtataagtattcaaaaatgtatcatccagaagacccatagcattttgcccatctcatatggaagcatactgaactgagaactctgaattataaccattcagaaatacttagcacttggaaaacaaaggaccccaaattggctactttactctctgagaagtgaaatttgtattcttgctgaaattttagaatgttgtagtttgttttaaacttcctaaatctgaattgtttaccatataggatgactttatcatataggatgactttatcatataggatgactgatttggacaacatgaacggtattgctgtgttaccaatatatgaccgtaaaatggacatcatcaatgctcatcaaaattttatgaaaattttgtggaatatagaactatcactgagggatatctaggattctttttatgattggactcaaaagaagcaaaagttgtttcctcatgtttccttcaaaaggagccagagagttattacctgaagaagcttcacttttttcattcagtaaaacattgaatgaaaatatataaatttatggatataagaaaggctagctagtgcaaacagttgtaattgaaataaagagagtttggccgggcgtggtggctcacacctgtaatccaaacactttgggaggctgaggcaagtggagcacctgaggtcaggagttcaagaccagcttgaccaacatggcgaaaccccgtcgctactaaaaatacaaaacaaaatacaaaaattagccaggcatggtgatgcgcgcctgtaatcccagctactccaggggctgaggccagagagtagcttgaatccgggaggtggagattgcaatgagccgagatcacgccattgctctccagcctgggcgacaagagcaaaactccatctcaacaacaacagcgacaacaacaacaacacaataaagagagtttgtgaccttcattaactaaagccagactgatggaataaggaggtaacattttaaacctattcctgttacagcattttgtgaattattaaagacgagcaaaactgttcaaatcttatcatttcttaatgccttaaaaaaagagatgctttataaaaacaaagtaggaattttgtgatggcaagaataatgaaaaattaaaatacagattattaaaatattttaacatatattaggaaattaaacataatttacttctcattctggcacagaatattttaacatttttgccaacatcttttgtggaaaaaaacgaagttcttaaaaccagaaatctttctacaaatttttaagtccttatatggacaggatgttaatatgttaaattaaatttcatgtgaaatacatggaagtgagaaattctatggtggcactattgctttggaagactgattttaagtaaataaaatatggtaaatttaatataacactaggagtagcattttggttttcaataaagaaaaaagtgaccatagttgaaattttcactgttgtaaaacttttaaaaatattgggatattagatttatagcctcaattgaataaaaatttttaattagatcaattattgcctctggtggtactttgtgtatattcttagtatcatctctctgagggagtatcttatctttttcagagtatctagactcagtttccctaaatagtaaaatgaaggagttaaactggatcatcctttactgctcaaaaattttattttatcgggaatgattgtttctgattatacaaaatgagctattaaaaatattgctaaagtccttagaaaaagcatcaattatattatgatgcccagagaaagttggaaaacaaagtcaatggtatattcaaaatggagctcattattttattgctcaaaattaagtaacttagcactaggatgatgataatagctagttactcaagcctgaaaccaggtagtcatcttagactgctccctttctttcacttcttactactaaaaagttataaaattctactaattttacttcttaaatatcttttacatttgacacctcctcttcactccactgtccgtgtcatagctcaagtcctcatgtctcacccaggctattaaaactgtctcgctactctggtctcttaagcctaaaccattcttcatactacaagttttcttctgaactcgatcgtgtaatcctttctgctcaaaattcttcaagatctccgtccacaaagtcaaaaatccagacacttttccaaggcctttctataatacttgctttctctttctctctttttttttttttttttttttgtgagacggagtctcactctgtggcccaggctggaatgcaatggggcaatctcggctcactgcgacgtctgcctccccgggggttcaggcgattctcctgcctcagcctcccgagtcactgggactacaggcgtgtgccacgtgcctggctaattttggatgtttactggagacagggtttcgtcatgttggtcaggctagtctcaaactcttgacctcaagtgatccgcccttcttggcctcccaaagtgctgggattacagaagtgagccaccgcgctcggctaatacttgctcttgaaatctctagtgtcatctcttgccattttccccacttaatcctcacacagaacgcttcttggacttagttgtaataatctctctcacaactccaatgcctttgctcgccttgcgtcagccagcaatactctttccccattccctctccctctccctctcccccttcccccgctctcccctctctcccctctttccctactctcctccgtttcctccctctgcctcctttctctcctctgtctcctctctctctctctttgagacagaatctggctctgttgcccagactggagccagtggcaggattattagctcactgcagcctctgtctccaagactcaagtgatcttcccgcctcagccttttaagtagctgaggacacaggtgcgcaccaccacacccggctattttaggagaggcagggtctcactacgttgcccagactggtcttgaactccttcctgggctcaagcagtcctcccgccttggcctcccaaagtgttgggattacaggcgtgagccaccggcccgcctagccaactctccattcactcattcttatgtgaaacagtaacagaactataccacatctgtggagcttctcctgactccccaagccaccctaagagccactttgcctacgtccttatcataggaattaccctaaatgattataggacattttaattgtttgcccatctgtttccttcctaagattgtgacctcttggagggcagaaatggatttttcactctcagcttcagtctgtcatagagcctgacagtttccctagcattctttgacaatagcagaagcctaaagaacttccactccaaggaaatacagaatccgggaaacaattgttcctagcgattagggaaatctcgcgagattcaggtcctgggagcctggcaagcccacacagcgacggttatttagccgttgaactgccagccgcccggggcccacgcgctccgggccgctcaggctgagcgatttcccgccttttctgaggttctgaggcgggagccattggttctttctgttgccctcatagaccgtatgtagcagttcgcgtgggcacagaacccacggtttcccgctagttcttcaaaggtgagggcaggtgccccgagttattttcctggggactgagcccagagcggggcgatgttgtgctactgcacctccccgccgcagccctccgctgttttcttttgggtagtggtccaggaacttaagacagttcctcctggcgatgtgatggaatttaatgggacaggagaagggaacgggctttcttttcaggccagcgtggcagcgggcggtagggcgaaagggagaaggaaacgagggtttattccgttgcccactccgcggtaagcgacgttgtagggctccactgtagcgagagccccgtggattcctttttttttagccatttagtttgtaaacatcactttaaagaatacatagtgtattcatgacactcggtgaaaaaaaactttccttcccctcccgcccccccggggcagtagatatttacaaccgtaacagagaaaatggaaaagcaaaagccctttgcattgttcgtaccaccgagatcaagcagcagtcaggtgtctgcggtgaaacctcagaccctgggaggcgattccactttcttcaaggtaaatttccatgtgactcttaattggactcttcttaactttagggaaatgaagaaaagtgtactttcttcctggtggtgttttataattatttcttctcaataaatggtctcatttacccaagaattttgaatcccattgctttaaatgaacagtgagcattattgtgtaggcatcattcatttaaataatgactgctgccgtagaactctgcatacatagtggaacgtgcttattttaattctccttctttccgtatttgattcgtggcaacttataggacagatactacgagatagtagaatatgttaggataaaattaggaaaattatcaagaaaaatgaggactatttggacaaatgcctatatatgaataataattcgtgttgtgactgagcttcagatttggctctgagcttcctagtggatagggcaaagaggg

SEQ ID NO: 1544 - DNA, 6000 bp, Homo sapiens
tttccttcatccaggtgactctcttttctgtactttctcctcttctagattctgattcgcaaccgagtaactgatctagatgccaggatgaatgatggtactacacccctgatcctggctgcccgcctggctgtggagggaatggtggcagaactgatcaactgccaagcggatgtgaatgcagtggatgaccatggtagggatgaaaggcagggatttggattcttacctgcaaagcatgcctctgacgaggggaatagagttacgtgacccttagagaactgcctgagatccaaatacgtgagagattcactcattctttcattcatgcatttatttaacatgctgagctcagagatccaagccagtaggagatccctaattaaaatgagggatttttaatgagggttcttggacctcagagcagatacatgaaaggtgttcccatgtagtttcctaggcataacacttgatttgaggatttatgagagctgacttctctaggagagttgtagaatattctcaatataaattctgacatgtaatatataggtttttatcttcagtatgtaacagggtagattctgccatgtaggggacatgaatgcctcatacaagtgatcctttcacctagaggtcttctgcaggctaggcagcctgtactgaagtatttctagaacagaggaaaaagaagagattactttggtttttcctatagacccctacagagaactgcttcctgctgatctctggggagtttaagatttcattgtgcaagtcatagtgtcttatactaagagtaggatatgtctgtttataaaaatgtttctcccctgcaggaaaatctgctcttcactgggcagctgctgtcaataatgtggaggcaactcttttgttgttgaaaaatggggccaaccgagacatgcaggacaacaaggtacagtttgtgggctctgagcttgaggaggctcatagcagtgcctcagttataagcccattcccgtttctccttacagcttctcttgttatatgtatagacaaagatggaagcagtttgggcagacactgggtttcgagagcttgatgaggatattgggcttgtccaggcatgtgtcaggatggagttctctgccctctcagtactcagcttgcagtaggctggctatagatagcttggtgtaactctttctcttccctgacatttccttttctccagttgtctcttctgttcataatcacttctttttctcgttttctttcttttttccctccggctgcttttttttctgtccttggataccctgatgttttcctgtttgatttttctccatctgagttttttgtcctgcttccttctctcattcatcttctctcagttttctttgttttccttatcttagtcctttcttgcacatgttttgtctcttctttcactgtttcccttacttttcccagttctgtgcatgccttagttttttctcttcctacctttcttatttctaactccttttcctattatttcttatttctaactcctattcctacctttcttatttctaactccttttccttaaccttattttgataagctcagtactcttttaagtgagtctctggctcaggggcatgctttattttatgaattcccaactaaagagatgttccccctaaggggcaaaattgtttttttgaggagaggtgaaataatcttactttttttatgtgtaaatcacagatacacattcagtacattggtagaggcacagcctatctgtggtgttaatatttcatcggggagataattaggaaaacatgtctaagggggtgataataaaaaagattgagaaaaactgctatattctcaagagtgttattaacatgtgttctgtgatgggccttttctgtaggaagagacacctctgtttcttgctgcccgggaggggagctatgaagcagccaagatcctgttagaccattttgccaatcgagacatcacagaccatatggatcgtcttccccgggatgtggctcgggatcgcatgcaccatgacattgtgcgccttctggatgaatacaatgtgaccccaagccctccaggcaccgtgttgacttctgctctctcacctgtcatctgtgggcccaacagatctttcctcagcctgaagcacaccccaatgggcaagaagtctagacggcccagtgccaagagtaccatgcctactagcctccctaaccttgccaaggaggcaaaggatgccaagggtagtaggaggaagaagtctctgagtgagaaggtccaactgtctgagagttcagtaactttatcccctgttgattccctagaatctcctcacacgtatgtttccgacaccacatcctctccaatgattacatcccctgggatcttacaggcctcacccaaccctatgttggccactgccgcccctcctgccccagtccatgcccagcatgcactatctttttctaaccttcatgaaatgcagcctttggcacatggggccagcactgtgcttccctcagtgagccagttgctatcccaccaccacattgtgtctccaggcagtggcagtgctggaagcttgagtaggctccatccagtcccagtcccagcagattggatgaaccgcatggaggtgaatgagacccagtacaatgagatgtttggtatggtcctggctccagctgagggcacccatcctggcatagctccccagagcaggccacctgaagggaagcacataaccacccctcgggagcccttgccccccattgtgactttccagctcatccctaaaggcagtattgcccaaccagcgggggctccccagcctcagtccacctgccctccagctgttgcgggccccctgcccaccatgtaccagattccagaaatggcccgtttgcccagtgtggctttccccactgccatgatgccccagcaggacgggcaggtagctcagaccattctcccagcctatcatcctttcccagcctctgtgggcaagtaccccacacccccttcacagcacagttatgcttcctcaaatgctgctgagcgaacacccagtcacagtggtcacctccagggtgagcatccctacctgacaccatccccagagtctcctgaccagtggtcaagttcatcaccccactctgcttctgactggtcagatgtgaccaccagccctacccctgggggtgctggaggaggtcagcggggacctgggacacacatgtctgagccaccacacaacaacatgcaggtttatgcgtgagagagtccacctccagtgtagagacataactgacttttgtaaatgctgctgaggaacaaatgaaggtcatccgggagagaaatgaagaaatctctggagccagcttctagaggtaggaaagagaagatgttcttattcagataatgcaagagaagcaattcgtcagtttcactgggtatctgcaaggcttattgattattctaatctaataagacaagtttgtggaaatgcaagatgaatacaagccttgggtccatgtttactctcttctatttggagaataagatggatgcttattgaagcccagacattcttgcagcttggactgcattttaagccctgcaggcttctgccatatccatgagaagattctacactagcgtcctgttgggaattatgccctggaattctgcctgaattgacctacgcatctcctcctccttggacattcttttgtcttcatttggtgcttttggttttgcacctctccgtgattgtagccctaccagcatgttatagggcaagacctttgtgcttttgatcattctggcccatgaaagcaactttggtctcctttcccctcctgtcttcccggtatcccttggagtctcacaaggtttactttggtatggttctcagcacaaacctttcaagtatgttgtttctttggaaaatggacatactgtattgtgttctcctgcatatatcattcctggagagagaaggggagaagaatacttttcttcaacaaattttgggggcaggagatcccttcaagaggctgcaccttaatttttcttgtctgtgtgcaggtcttcatataaactttaccaggaagaagggtgtgagtttgttgtttttctgtgtatgggcctggtcagtgtaaagttttatccttgatagtctagttactatgaccctccccacttttttaaaaccagaaaaaggtttggaatgttggaatgaccaagagacaagttaactcgtgcaagagccagttacccacccacaggtccccctacttcctgccaagcattccattgactgcctgtatggaacacatttgtcccagatctgagcattctaggcctgtttcactcactcacccagcatatgaaactagtcttaactgttgagcctttcctttcatatccacagaagacactgtctcaaatgttgtacccttgccatttaggactgaactttccttagcccaagggacccagtgacagttgtcttccgtttgtcagatgatcagtctctactgattatcttgctgcttaaaggcctgctcaccaatctttctttcacaccgtgtggtccgtgttactggtatacccagtatgttctcactgaagacatggactttatatgttcaagtgcaggaattggaaagttggacttgttttctatgatccaaaacagccctataagaaggttggaaaaggaggaactatatagcagcctttgctattttctgctaccatttcttttcctctgaagcggccatgacattccctttggcaactaacgtagaaactcaacagaacattttcctttcctagagtcaccttttagatgataatggacaactatagacttgctcattgttcagactgattgcccctcacctgaatccactctctgtattcatgctcttggcaatttctttgactttcttttaagggcagaagcattttagttaattgtagataaagaatagttttcttcctcttctccttgggccagttaataattggtccatggctacactgcaacttccgtccagtgctgtgatgcccatgacacctgcaaaataagttctgcctgggcattttgtagatattaacaggtgaattcccgactcttttggtttgaatgacagttctcattccttctatggctgcaagtatgcatcagtgcttcccacttacctgatttgtctgtcggtggccccatatggaaaccctgcgtgtctgttggcataatagtttacaaatggttttttcagtcctatccaaatttattgaaccaacaaaaataattacttctgccctgagataagcagattaagtttgttcattctctgctttattctctccatgtggcaacattctgtcagcctctttcatagtgtgcaaacattttatcattctaaatggtgactctctgcccttggacccatttattattcacagatggggagaacctatctgcatggacctctgtggaccacagcgtacctgcccctttctgccctcctgctccagccccacttctgaaagtatcagctactgatccagccactggatattttatatcctcccttttccttaagcacaatgtcagaccaaattgcttgtttctttttcttggactactttaatttggatcctttgggtttggagaaagggaatgtgaaagctgtcattacagacaacaggtttcagtgatgaggaggacaacactgcctttcaaactttttactgatctcttagattttaagaactcttgaattgtgtggtatctaataaaagggaaggtaagatggataatcactttctcatttgggttctgaattggagactcagtttttatgagacacatcttttatgccatgtatagatcctcccctgctatttttggtttatttttattgttataaatgctttctttctttgactcctcttctgcctgcctttgg

SEQ ID NO: 1545 - DNA, 6000 bp, Homo sapiens
gtcatatttctctctctgaagtctactttgcctgatactgatatagctactctagctttattttattattagagtgtgtttttaaaaatccttttacttctggcctgtttctctaaaatgggtttcttgtagagagcgtatattgggtcttgtctttttttctccagtatgatggtgtctatcttttaattcaggtatttagactgtttaaatttaatgtagtttttatatggctggcttcaaaatatgccatcttgctgtttgctttatctttgttcttctgtgtattgtttccattttcctttttctgacatcttttgaaataattgagtatttttatgattacattttatctacatacataaatttcaaaactttatctatattcactaccatattggttacatattttttagtagttattgtagggtttactggtgtgcagctttaacttattataatgtaccttcaatcgtaccacttcatatagaggagaagagctgtacactcacatttacattcctcctggcctctcttctattgttgttataaaatgtatatagcattaaacccatcaaatatgtaattaaaaggtcaatttttttcaagatatttgaaaaataatttaaaagtctttaagttacctacgtattttcaagtcttattggtctttattcttttatgtagatttgtgtttccatcaggtatcattttccttctgtctgaaaaaatcccttgaatattttgtgtagtctttgtctcctggtgatgaagtctttctgtttttgtgtgtcagaaaggtttttattttgctttagttttcaaagatattttcacagggaggagaattctaaattgactttctctttcagcactttaaagctatcctattatcttcttccttgcattatttctgaggagaaatctgctgttattccacaattcttttatctgttccttcatatataattctctctcctgtggctgcttttaagatatcctctttccactgatttttaccaacttgattataatgcctgttggtgtggtggtcttttttttttttttttttttttagactgagtctcgctctgtcgcccaggctggagtgcagtggcgtgaacttggctcaatgcaagctccgcctcctgggtttgcgccattcttctgcctcagcctgccaagtagctgggactacaggtgcccgccaccacgcccggctgattttttgtatttttagtagagatggggtttcaccgtgttagccagggtggtcttgatctcctgatcttgttatccgtccacctggacctcccaaagtgctgggattacagcgtgagccaccatgcctagcctggtgtagtgttctttatgtttcttctgtttggagtttactgatatttttggttatgggtccaagtctggaaaatattttaaccattatttggtaaatatttagccattatttttttcaaaagtttttgcgtctcccttttataatgttcattatgcatttattaggctgcaaggttgatttatttatttttcagtgttttttccacttagtgttttattttggattattttactatttgaagttattttgttatactttcaagtttactaattgtttcctctatagtttctcgtttactgttcatctcatttagtatatttttccctcagatattatgtttttatatgtggaagtttaattcaagtctttcttttaacgttacctccctctttgtcatgttcatgcttttatttccttcttgaatatattgagtatcgttgttttctagttgataataattgaccatattttattgtccttacctacttttctaccatatgagaaattcctgagtatgtttctgttcatattttttctactcattttgaatgtatttcctgcttctttgcctgcctggtaactttttactggatgctagacatccatcttacattgttccatgctgaatttttttaaaaatcttttttaaaaaaacatttttgagctttgttcaaatattcaattatttggacatagttcaatccttcagagtcttacttcaaggtttgttaattggttccaaaatagtctttagttgagggctaatatggctcactactacaacaggggtccctcaggactctacttactgccacgtggtttttttcattcttattgaataaacatgagctgttctcagcccagtgaaacctctagggattattctgcctacttctttctggtggttcttcccccagccttaatagttttattacatgtatgtactgaccgatccttagttacttgtatagtgatttaacttcaaatgagattatcacaatgcattaataatggcaccttaatttacaggatatataacttcagattatcatatagaggccaccatgctaggtgccggcagtgataagataaataagttttagtttctattttcatgaagctcatagtctgttagggaagaaagacatatagacacagttcaagaccagcctggccacatggtgaaacctggtctgtactaaaaatacaaaaattagccaggcgtggtggcaggcacctgtaattccagctactcgggaggctgatgcacgagaatctcttgaacccgggaggcggaggttgcagtgagccaagattgtgccactgcactccagccggggcaacagagtgagacttcaccaaaaaaaaaaaaaaaaaaagacatatggacaaataattttaatgatgtattacaaatagtgaaaaagtatccaaggcacaattgatggagaactttagggagtgagatcaagctgtttgtattcctttctcacattaagtaacatgtcattcaaaatattgagtatttttaaatttttctgtatgaagtgggaccaacaatatttacaatgagtttaaaataattcagtaaattatggatggtgagtttcctgaaagatgctatggaaattatagtagctgtgtactgtggttaagaaaaactgaaacaatttttacaattgctttaatagagattgcagatgagtcttataagggaattagttcaagagatgaataaagtatattaaatgtttcgctaataaaataaaggtcacattaccctttagtttagtatttagttttcattttacatgtatgacctgtctttgcaattatatttttaagttccttaagagccatagctacagcttatttttcttgttctgatttgtatggcatataattgtagagtgccgtggcatgactgtagcttaaaatttgttggttccttactatgagtataaagtgttccaagatcaagctatgtgatatttcaatttttatttaaactgtgtttcataaggctactgaaatctaaaagagagagaaaaagagagagagaggagatggaaatgaaagggagagagaagattatataattaatatgcctggaaaaacatgaatatgtgtattttgtcctcccccacacactccacaatcacatataccttttgaaaatattgattgatattctgtgtattggggcacatatttgatttccaaatgtgtgagggaccaatgcaagttttatgactattaattttacaaaactgttggtggtgacatagatgaagtttattccaattaataaacaggttaaaaacttcaagcaagtattattgaattcattttcataaatgagggagttggcaaaattgaatgaaaaagtcagaattatgctgcccccagcatgacttagttcaggtcattcacttttatgaatctaagattaaactgatgctactcttcagaggtctaattcttttgtaatggcttagatccttgccagaatggaggttcctgtatggatggagtgaatactttctcctgcctctgccttccgggtttcactggggataagtgccagacagacatgaatgagtgtctgagtgaaccctgtaagaatggagggacctgctctgactacgtcaacagttacacttgcaagtgccaggcaggatttgatggagtccattgtgagaacaacatcaatgagtgcactgagaggtgagcaaccagtccctcgggcatcagcatcttacgagagaaagggagaaagggaaggaaatttcagagcacaatgctagaattgtggagcagggatgaggtgtccacatggatcccagtccacagtcatctcctattgcccggttactggttcctgataaacatatataatagaaagttaaaggtcagaggttgcaaagtttatagggatggtttattatttcttgcttagggaacagaaagagctataattttgttctgttcttcccttggcctctcattcatttcaaaaatccaaaaattccagtttttctgcagagattggaattgttactagtctttaagtaatttctgggagttttgtttcatttctttttataatattatgagcatgtttgttctatttgtcttttataaataatctatagtgaataggacttttcaaataaattaaattgacttagagataaaatgaaatgtgatacatgggaaaactacagaaggactgggtaaaacctagaaaacttcattttctgtaggtatctatagtaagctcagtcttttaaatacttctaagcctttgattatagaaaggaagtgggcacctcagagcttctggcacccaatctagcttgtaagaaagtttaagggatatgggttgctcagaggtatttgcctctgtatgatcttagattccagaaatcttactttgtagtagtaagtcacaggcaccagatacatagctgatgttgctctgtttgcttcttagctcctgtttcaatggtggcacatgtgttgatgggattaactccttctcttgcttgtgccctgtgggtttcactggatccttctgcctccatgagatcaatgaatgcagctctcatccatgcctgaatgagggaacgtgtgttgatggcctgggtacctaccgctgcagctgccccctgggctacactgggaaaaactgtcaggtaattgacttccttcccattcactcagctcccctagagcagctgaatattatacctgttcactttctagtctgaataagttccttctaaaagagaaaattgtggatctcagggattccctgagataatctaggtaacttcttaataacttgcagattccaaaatggtgctggcaatatgatatagattcacaaacataagatcttgaaaagaggctaaccaagaactgcagaaaaatacatgtgggaaataaacacagatttttgttttttgttttttgtttttttgttttttacattggaagcacaaaaagaactgaagaaaatagagaataatcaaaataaccttttaaaggtcagatgcaacatctaagtgtttaataatgataattgttgtatcttgcaatgtggtaacattctcaaaaccaaacaatttacatatcttttaagttcaaatatgtaaatacacacttccattaaattttagaatggaaagagcccttataggcaactaatctaaccttcgatttcatggaaggcgaaacagccccagaggggcaaagtaacttttccaaagttgcataccaaacagccctgtgtttaatttaatgttattctacctctttaatagtgatagaataataactccaaagaacataggaataaatggccaaacttaacttgacttacagggcgcacttaagtaaggcttaggctatattagacatgtgagcacccacctccacaaaattaagcagcttgttgctgattccatggatcacgagagcatttttggttgggctcctatttgttctcacagtgtagattggcagtgctggtgaagcactcctcccttcctccagcaaactgtctatattgtgaatttggccttcctctcctcaaggggccaagccactccgtgtgtgaattaagatgaaaggtgcca

SEQ ID NO: 1546 - DNA, 6000 bp, Homo sapiens
gatcaaccaaggaaggaaacctatttgaaggattacaatattttctttttttttttttttaatggtgtagttcagaaaacgccagttagaccgagactcaaatttatgtccactggtctttgtttctgtgccccatcccaaaattaatttatgaataggaaaagagatttgatagtgaagttctttctcactctgaagtctaatactgtttctgggaggaagtaagagaattattatgcccacactgtgcactgagaggcttaaccagcaggtgaagctgttgattaaaaacataggttgatgagtattctcatttttctcctttgaagctttcagaaattttctgctttgtcctggtctaaatttattttggcccagcccttgtctccaccctacatttcaaaccagtagccttccctctatggctcaacatttctctgcctcagttttttccattttaaagatgaagatattgtttggaaggaccagtaaatacaattaatataaaaattacttctgtagaatcaaacaacctccaacatttctgttggaaatttataatttatagagtattcttacacagtgatctcctttaatcctcacaaacttggtggaaatggagcctcacaggggttaggtgacttgtatacattgtttacccctacataataagtgacagagctggtacttaaacttgtggcttgatttttctttttttttgagttggagttttgctcttgttgcccaggctggagtgcaatggcgcaatcttggctcaccgcaacctccacctcccgggttcaagtgattctcctgcctcagcctcccgagtagctggaattacaggcatgcaccacaacgcctggctaattttttgtagttttagtagagacggggtttctctatgttgggcaggctggtctcgtactcctgacctcaggtgatccgcccgcctcagcctcccaaagtgctgggattacaggcgtgagccaccgtgcctggtccttgcagcttgattttttaaacatcagatttttttttcttttttgatttttattattatgtgtctatcattctgctaggggctttgcaaatattgctttatttaattcatatggctatcctttggagtagacaatatttttctacattataggtaaggaatttggaacttaggttcacagctttggatgttggcctatggttagtgaggggtgtagccaggattcaaacccctgtctggctctagggccgctgcaataaatcatggtgttttatgtacattcatacacttaacactttgcaacaaccctaagagacaggggtaggtatttagggaaactggggcttctaacttgcacaggataatgcagttagtaagtggcttagtcgagattcagagctagatctgtctccataaccctcactcattccaggatactgcagatgcctatttttatgatatgtataagtaaaaattaatttgaaaaactaccttctttgaagggtcagccagttagaactcttttgtatcttctgaataagtaagaagtggatggacattagctgaccgatacattgatggcttttaaccttctatcagttgatttccattaccaggacaagcaaatataatttggagggaaaagaggggagtttccattaaggatgaatctttaagccgaaaagggccacagtgatgaactcttcagaggactgctctcaggagcaatggcccttctcctctgggctctgcttggggcattcctgtttgtatttatggagacatctttttgaaaggcagataccagctttggtggggagaaggttggaaaacatacaagccttgctctaaatttactagccccgtgtctttgggctagtttctgaagcatggtgtgcctcaattttattattttaaaaataaagatagtagcagtatattttggagttgttatgaagataatatcagttaataaatgttagattcattggacagtaccaggcacatagttaaagtgcagtaaatagtagttattgttggtattggtgttattttatgttgtagtacagactggcttcttggtgcattcacttttctttaatcaaaagtggatgagtgattgggaaccttcatgaggaaataggaacatcatctttgcagcctgtggattgttcactggtttcctgtgatctaataattatttaagggtttcatatttgagtctcttcccttaatgaggtacactttcagtttggggagattttatctataggcataccttattttattgtgtgttcccttttattgtgcttcacagattttgttttattttttacaaattgaaagtttgtggcaaccctatgtcgagcaaatgtatcagcaccattttttccaatagcatatactcagtatatgtccctgtgtcagtattttttagcaataaagtatttttaaactcaggtatatgcattatgctttagacataatgctgttgcatgcttaatggactagagtatactgtaaacataacttttgtatgcactggggaaccaaaaaatttctgacttgcttcattgtactgtttgctttattgaggtgatctggagctgaagccacaatatcacaaaggtatgcttgtattatgcaaattgcattgataggtgttaaatcattttcccattttttattaaccacacatttgtgattggatgttatgtttagtaaagatattgtgattttctgaggtacagctttgagaacagtatcaggtctaacactcttgtttccaaatttcctatgatatgacaaacataatcacatgccatccagtgtcaccatgcagagtactaatgtgaagccaaaatacttggtgttttaattagccttaaagcagttaacgaactatctctgttagacattttgaaataataaaaatatcccattgtcttttattacaacctcaggggctcctggagattttgggatcttgtgtggggaaccacccatctaatccatccttgttttaaagagagaaaaccaaagaagcaaagtgactggcccaagtacctagagctgggtcagggttggggccagaatccaatctcttgacttttagtcaagtgatttttccactatgctcagtactcaaattatgtatcaatatgtcggcccttgttttttgaggtctgaaaagggttagtgccagtcaacaacagtagaggagtagaaagggtgttgggatgggagaggtgtggctatatttaaaatttcaatgacagcagtgaaaataatttgcctgtgaacctctgcctgtccctttggacttctttgtagtagttgagacaacccggcaggtctggtgtcattagtgattcagaattggattaacctggactggtggagttactttctcagaaaagggctttatattttaacatttgtttcccttgacagtttgcttcttctcaagttttggcagccttgaacaagggttgtcaggtttttattttgttttgttttaagaaaaaattccaaattttattttgccgatttagtaagttatcctctacctgccactcccttctgctccctctataattatttctaagactttatttttccattgtgggaacattatggaaggttttcttttacagtctgagatatttataattacgtgtaagcacacagtttatagaatatgtaaatggtccatatgttaacttaaatacccttaaaatattttccaataatttaaatctttccataaaagtagctgaagctgcttataataaaagagaagtatacacgaaggatagcagaatttggatgtagttaatatagataaatatgaatgtcactttggaggaactggaagtatttgcatgaatactgatcaagccatgcctccttgttaatagagtgaacaaaacagatgaatgtttctgttttcatgaagtttatgtgactatcagtagcttccatattctgagggtttattatgtgacagatgcttggggacaaaatactttacttgtttcctttagtccttaaaatagatgttaggattcttgtttacagaaaagttaaggaatgttcatccagatcacctagccagtcagtggtaaagaacagtcactggaacccctctttcctgatccaaagccaacatacttaaccataataaataataccattgtctggtggaatcctgtagtcccttagatagtgtaattttgtatttaatgtaaacattttgtgcactagactgacttacattttactttttaaaacaatattttaattctgaatgaacatttgcataataggagaatgatctaaattgcaaacttccattttgaagagttgtagttcttttaaatctttttgtaactgggaagaagaatggaattatgtttgttataatccaaggaaagttggttagcattctttcctgttactttttgatcccaaaagaaattctttagtagatcaagaccaggaatgaatgtgtggatttttttaaataaaaaattgagagagattgtaactagcaattcagagccagatttatgttcagaaatgtttgatgccagccgttttagttacaaataactttttcttgactgtacagttgtgttcttatggtaccattctgaaagtgatgtaagagaccatgtaaaatgattggaatgcctcagcatctgaacaatgcacatagccaattattaaaattacccagtactaacctgtcttggcttaggaactatggaattaactgtgggtagcatttctacacatatcattacagaacaagcataaagacaagcttgtttttttccttttctgtggatttgttttttcttattaccatatcttttgttactgaaaactggtggtcatctgtactaatagataagagaagtgtgtttgacaccaatacctaatcttagattatccctgctattttaaaacaccgtccttcacctgcatgctcagacatgtgggttctttcaaacatactggacttcctccttaggttttagttgtgttagttaatagttgaatgttgaaggagaggatgccaagggatattaaagaaggtaaaagagataagtgacagcaaacattatttatttttaattatctctcagaatgacttttagatacccttccctactacattttgatttttgctttagcatagctggtgagttttggaatcagagagactgggctctgatttgtactagctaagaatattagacaagccacttaacttctttaagtctcagtacccgtatttatataatgggaataatagtaatatctaacttgcaggattgtttgtaaagattgaaagcaacatatttaattgtgcttgcgtggttctgggcacagaataggcacccgagtgtaggggcccctgaactttaaagttcattactttcatggtaattcctcctttggaatatatagcctgggaacatttgtctctagaccttgtttcagtttcttttaatgactccttttaggctctgcttcatggccaacgcaagattatggatcacctaaagagtagactaaaagtactattgtctagtaacttcaagtttgtaggttaactcactgtgaatcaaaagcttttaaaaatcttttgcgtggtcatagtttgtagtgtcttgtacctctcatctcagaagcaattgattcatagaaaaaattatttaggatttcagattaaagatgaagaactcttccaataagaaggaactgatttggttggattatttgtttctttcacccctgagttttcatggaaatcaggtttaaaatgttagaagcagttggttttcagcattgggaaagcttatctgatcaggcatgcgaagtggcctatgtcggatttctgagctaggaaaggctaggggaggttgaggagattattgtacttgtaattcctgagcatggttgagacacaaggagaggattgtgga

SEQ ID NO: 1547 - DNA, 6000 bp, Homo sapiens
acatcaataaaattgagataatcacattcataaaagggcaaaactatgtcaacaagcccactgtattagtctgtcttcacagtgctgtaaagaactgcccaagactgggtaatttataaaggaaacaggttaactgactcacagtttagcatggctgggaaggcctcaggaaacttaacaatcatggcagaaggcaaaggggaagcaaggtaccttcttcataaggcagcatgaaggaaaattaatgcaggaggaactgccaaacacataaaaccatcagatctcatgaactcactcattatcaggagaacagcatgggagaaaccgcccccatgattcaattacctccacctggtctctcccttgacacatggggattacaattcaaaataagatattgggtggggacacaggcaaactatatcgcccatattacaattacttacattactgattcccttaattagagcagaggtaattaattgggtctaggctcagtggaagggtctggctggttcttaattctcagagctagtttgaatcttgaggttaacttcttgccttctagaacttgtcctgtgtttggctgaactctgtgaacctttcagaaagtaggtctttattgagcacatactctgtgcaaggcaaagaaccaactactgtggagtttacaaacatgaataaggggtaagaaatgactcttgtcacatggcttacagtccagctgtgtgggccaccacagttcatatctttcaggatggggactggatgagaggaaagtggactcaaaattaatcccagtgctctctactttcccatatccctgtgctttatctctgttgtagttatgttatttgtatgttggcctgcctcactgctctgtgatctccaaagaacagggactgggttttatttatttctgcattgccgcagagcctagtatgtgctttgtagagaacaggctctcaaaaaaattttaaattaaaagaatttattcacttgtttatgtttcctagttacagtgggtcagcttgttctgtgctaacatggaagtgacaagaagctggtgtccctctacacagaggtccccacactaaatatcatcttggatgtgcttcacattgttgcacaaaggtacagtggagtgagactgagtaagaggacagaaatagtggggggtttgtctcagctcactaattacttatttaaccttgggcaagatacttaaagctctatctcagtttcttcatctgcaaaatgggtataataatgactggggtgcctatttcccacgattgttttgaggatcaaatgagataatataattaaaagtgtttttggaaggtctaaatcactgcgcaactgcaaggcattattaaaagaaatcttccttttaattcctgcttccacaaacatctcatcacatatccttgggttcctgggttacatggagagattcgtggtgtagctcaatctatgtgtcatagctatcccacaatctcttcttcaacttctccaacacaccaagacattcttccagtcttgcattgttccccagtttatatagatatatatgttcctcattcagcatttatgtaaaacatatattattgagcacttatgtgatagaaaccgaggcaaaacagaaaataaaacagagttttattttgagagttttttttacagcttatcggctctgagaggacagacatgagaacaaataagtgcccaattctgcatttattttggaaggcagttttatgtgagtttaaatcagtaaagacatagatgtatatttttagttttgattaaaactaaaacaattggtagcccttattcatatttttctatcattaaaacttatctttaaaaaatgtcttcagtcatatttttcccttacttccattcatatttactctttacttctcttgtccttaccagaatgtatgcagtaagttttcatattgtaacatattcaacaaaagttatatgtgaacataatagctgctttctttaaaacggttactttgagaaactgcatacctatttttttttttttttgagacggagtttcactcttgttgtccaggctggagtacagtggcacgatcttggctcactgcaatctctgcctcctgggttcaagtgattctactgcctcagtctcctgagtagctgggattacaggtgctcgccaccatgcccggctaatttttggtatttttagtagagacgggttttcaacatgttggccaggctggtctcaaactcctgacctcaggtgatctgcccacctcagcttcccaaagtgctgggattatgacataagccgccacgcctggcctgcacatttattttaataatgttgtcatagctacagtcgcttctagagttgctctttggggataactatcttatattcttctgaatatattttaatagtgacaaaacttatctttgcaggtgatttttaaaatttgtatgcagccaagtcactatgaattatctttagtgagtaaagaggaagatcgaactggtaacactgtgggtaaacaactgaaaaataatgttatctttctctgaacatacttgcacaagacaaattccaaaaatattttgactacgttatttttgaaaagggtttccagtatttcaatgtgactactttcactaatggtacttgcttacctaaagtgcttgttaacatgcagttttggaacttcataggtctatgcccatactgacttgtacttgcttagtgttgtttcacattctagttcaacatctattatgtgatagacactggggattaataggctgtggtctttgcccatgaggacctcaaaacttagttgagaacacagaaatacaaagagtcctgtgtgaaaaataagtatcggtgttaagataaagaagcggcagtggaagacagtggagggactgtctgttagggggaggaatttattgcggtgtcggcaaagccttctttggactgaaggatgaattatgattagaagttcattaagaggaggagggaaggggactacaggagtcattccaagccaaaggaacaaaagatacagggacagaaacagcaagatatgtttgggggaatctcaagttagtcaatactgttattgtgtgaagttcacaacaggggcagggaggacaggagatggggcccaatgacgaaaaggccttgtatgtaccatgtttagaagtttgaattttatcctataggagtcagggagaggttctatgggtaggatttcccatcccaacaggattgtaaactcccacatccaattagtcacacctccattttttttttctgtttctttaacattgtctcggattcattccttctgaaatctaccttattagttcaggtcttcttaaatttgtgcctggactgttcaccaactcttgactggtcctggggctccagttcacctcttgctcccccaacaatcaattttctacagaattatcagagcaatcttcctttccatcaatctcaactctgttcaaaaactttcaatagttttatgtgacctaagaggtagctgcctccccaccctttcagcttgccattcaaggctgcataatttggtcccaaccccctttccgtccttgactcctctcactgctaacagagacagaactcatttacttactcttttgactgtacctttgctttcacgagggctctttcctggaatgatatgtccatacaactattgttgctgttcttacttttagctcttttcttagaagcccacttgtacccaggtttgatcacaccccctactctcctgccctggaagtaactactattctggttatagtctcttaatatctatatctatatatatgcatccacagataatgtgtagtattgtcttgaaaaaaatatacataaatggtatactttgtctccctctgtgattagttttttcactatcatttagtttttaagatttatccctattgacataaatagctatagtcttttcaattactgtgttgcatttcattttataaatataccatacattattcatccattcctctaagggtgggcatttatgttgttttcaaggttttgctattacagtgttacaacgaatatccttagcttagctggtctccttgtcttatacaaattttactgacctttcaagatcctgctttcatcccagctcctctgggaaagccttccctgaatcccccagcccacagcggcaaagtcttggtactcaaagttgcttgtgcatctttggtatcatcccactgccaagcacacagctacgcaaagtaaggcacttaagaaatattcgctacacggatgaacaaatgaatgaatgaatggggcagcaccactccgtgatggctctattcctttttaatggactttggcgccttggcccactttccttctttgacagcactggtcctactccagagcattcctctagctagcaaagcagtgtgtggatgtgtgggtgtaggtggcgatacagacctcactggatgaggaccgcctctccctgcaagttcacgatcccggcaaactccagtgcttgaagttcagagtcctaccccacccccctcacccccacgccccttctgcactggtcaagccagcgagccgctgcagccctgatcgagttaaggcgcggcggcccccggggccgctggagaaggatgcggacgggtccagtgactcgtagtagatccctccgcgcggagctcgggccggcgcttcttcctgcgggaaacccctgggtgcccaaggcggcggggccgaggccgcggcgacagtggggcggggcttgcggtgggaggaggcggctgaggcggaaggacacacgaggctgcttcgttgcacacccgagaaagtttcagccaaacttcgggcggcggctgaggcggcggccgaggagcggcggactcggggcgcggggagtcgaggcatttgcgcctgggcttcggagcgtagcgccagggcctgagcctttgaagcaggaggaggggaggagagagtggggctcctctatcgggaccccctccccatgtggatctgcccaggcggcggcggcggcggcggaggaggaggcgaccgagaagatgcccgccctgcgccccgctctgctgtgggcgctgctggcgctctggctgtgctgcgcggcccccgcgcatggtgagtatcgggctgaggggcgctgtccgcggcgcccggggctgccacctggggcgacccttctccccctcggtccttctctgtgtgggaaggccaggctcggccgccggcgcggagcgaggccactcgctgggttcccaagagtttggacatcgccgggggcccctcccgtggtgccccgccaaccgccggggttccccgccgcctctgctccccgcggcccgggaccccttacacgcctcctcggcaggagggaggccggcagcaagtctcagaaactcctttttcgtagtgccagggtgcagggaggtgggcagttttgcccttcaggttccgcgtttcttggggtcgagcgagagccgacggcgggcctcggaggggctgagcgaaggaatgccagattctggcgtggagagcgggggcagggccgccaagccaaacggcctgcaccgtcgcagccagcctcgcctttgccagggggcggcacatgggccgggtgtgtgggcttggtttggatggggacggggttttgcggcgcgcctgagttttgacactccaaccccaccgaaagtccgggggagccgtgtgtgctgctcgcgtctttgaaaggtggaggcaggagaagtagggcaactggtgtggctgcatgctgaggcacatgatttaaaaatctcaactgctgttattctttccgaggcgcggagctctgctgctgtttcaggctgtgtccagacccaggaatgtggtgtgacgatcaccaattcctccaacctggcagcagcatttgctgctccttt

SEQ ID NO: 1548 - DNA, 6000 bp, Homo sapiens
ttgcctccttcctccctgagggggaagtggtttttgagtctgagtcacttgagctccatctgtctcttcccttggctgagggtggctgtgctattggaatccaggcccttattcaagcgtagcctctggatccaggttttggaatgatcctggagatttcaagaggccccctgccctccctgcccgctgacccgtctctgtgtgcactgctctgggccagagtctggagaccagctgggccagctcagctcacctccctgctgctccttgttgagaccccatcacccagttccagcccagccccctctcagccctggactctctctttgccctgtccccgactttaataatgggacactcctcgatatcaggtgattcaggcactgggggaaaggctggtgaactgcctgtggaaaaccagttcctaagctggaagaagcagagagaaaatcgtgacccttgatctgctccaccatctgccaccagggccttttgaggaggtcgtcttctcatctttctgcctcaggcctacttttcaacaactccccagcaggagagtctgtggtctcctttggggtcttgctgttctccttgtaccagcagctccagagtttgttgtgggtctcattgtaacctgtactgatatagatgggcgctcttgttagtggatttcagtctcatcctgggttccagtctcttgttctttgagggaggggcctcagaggtaggctagtgctgctggtggtgacttcctgaggaatgggatcttcccctctccctctacagagctgcacactgtgatggagactcctctggagaaggccctgaccactatggtgaccacgtttcacaaatattcggggagagagggtagcaaactgaccctgagtaggaaggaactcaaggagctgatcaagaaagagctgtgtcttggggaggtaggtgattgttccctcatcctccaccccaaagtctgagtactccctctgggggacacatacctaccctcaggatcctccagcctaagccaggggcagggtggccaagggctacagacagagacaaaggaagatggtggggatttcgggccagcaaaactctagccctctgtgaaggagaatgggtcagggtctcactgagaaggaggaagggctgagtctggagggtttagagaaggagattgaggagccttcgatggtggggccaggctctcccagcagtggcagaacctgtgctaggggtcatgggtggtgaagggatgcagggtgtccaggtccagctgtgtacaactcaagtgtagggactctgcctgattcttctctgtgtgcacagcatggccagggctctctgatggtgctggcactcaaactgaaaggttaacttgtaaacatagggtagtgaggagacagaactggttctcaccagatggaggtggtgggagggaggtgactgacagaggggaaggcccatgaggttattataatacaatatccccgaggataaataaataaataaatatatatatatatatatatatatatttttttttttttttttttttttttttgagagagtctcgctctgtcacccaggctggaatgcagtgacatgatcttggctcactgcaacctccgcctctcaggttcaagcgattctcctgcctcagcctcttcagtagctgggattacaggcacgcaccatcacgcccagctaatttttgtatttttagtagagatgggggtttcaccatgttggtcaggctggtctcgaacacctgacctcgtgatccatctgcctcggactcccaaagtgttgggattacaggcgtgagccactgcgcctggccaaggataaatatttttgagacagagtctcactctgtcacccaggttagagtgcagtggtgcgatcatggctcactgtagccttgaactttcaggctcaagtgatcctcttacctcagcctcctgagaagctaggactacaagcaaataccaccacgcttagataatttttaaaattttttgtagagatggggtctcactattttacccaggctgttcttgaactcctggcctcaaatgatcctatcgcctcagcctcccaaagtgctgaaattacaggcatgagccactgtgcctagtcttattatttttatagttaaaaaaaatcaatgctcaaatacatcaaataacttgcctaaggacaatccgctagtgggaggctgagctggagttctgggccaggcctgtgaatcatcctccctgtttcctttaaaatttagcctgggtgcctctccatctatcacaccttgagccctggtaggccctcccagaaagaaggtccacagtgtgccacatgggcaggggacagaagcaggtatgggcgtccccaggcctgatctctggccttctgccaggctgcctgcatcctggaggttaatgagggcagagggaggggccacaggtccagcagggattaattacagaaggagagacgcccagaggagggcctggcaataacaggagcccaggctggggactaggatcacgtgacagacaagcagtttccgcctttgtaagtcccaatgtctcctgtgaaaacctgtagctgacggcaatgatgaggagacatcaggatctgcttgtctatattttcttcctgttccacccaaaggaccctgactccatcgtcctaatggagccaggctgggacatcaggggactgaacaacagtgcacaaccaggctccaggcaggcctcttgcacagctctcctagcaggggagggatgcagtggcttcacagccccagtgcactgctctcattgagagacattttgtccggggttattctcacctagtccttagaatggggagagagtcactcagagacttggataatgctcaatgccacataatcagcaaggtgttctttttttttttttgagaaggagtttcattcttgttgcccaggctggagtgcaatggcatgatcttacttactgcaacctccgcttctcaagttcaagcgattctcctgcctcagccttccaaatagctgggattacagggatgtaccaccatgcctggctaattttgtattttcagtagagacagggtttcaccatgttggtcaggctggtctcgaactcctgatgtcaggtgatccacccgcctcggcctcccaaagtgctaggattacaggtgtgagccaccacacctgacccagcaagctgtttttatcaggtgttggtataaaacctagatgattgtttctttggctgggggacagtattgcagggaaggcaggctaggctagcattcctgctgtcatttatttccattcaggagtcaggtccctgaccccctacctcatgccaggcccttccctaggtgtgggcagtgggcagactctgggggtcgagatgctgacagtgtcattgactcagctggggctcaccctgaagtttcggggtggggatgacaccatgcagtggtgcgagggcagggctgggagcggggtctgagctgtctctccacctgggtccacaaaagatgaaggagagcagcatcgatgacttgatgaagagcctggacaagaacagcgaccaggagatcgacttcaaggagtactcggtgttcctgaccatgctgtgcatggcctacaacgacttctttctagaggacaacaagtgaccagggctgccctccaccctcaccctccaccctttgctgctgacctcggctgctcctctcacagaccctctttggccccctgccctcctctccctcccagatggacccttccatgggaggaaataaagtttccatcgcaggtgctgggagtctggttttgaagctgtcttgtctaccttggcctggggagaggggagcacaggaagggtctctccttgagtgggttgagacagcttctgcctctgggggttagggtcctgggctcccactgcattcctctccttctttggtgtggacgtcattggttttgtcatggcttagttttgcctgcctggaaaatggggaagttaggccaggcgggaactctgcaaggatgcagaggaagttaagagggaaagttgctttgagaggaggacactgggaggggttgggagtggctcctgagggcggtgataggcaggcaggcctgacttgtccacagctcaccggaggccaccttggcagcacctgtaggaagggcatgtctggcctccacaccagccccctccctcttcaccatttccccttcaatagcaccactctcatcatctatgggggacagtgctttcttctctccctgcctcctccatcaaaatcttttctcaggggagggtctgaaaaggccttcactcccccgtaaataacgaatggtgcttacagggctgggctcccacgtgcatgcacattaacaccaaaggtgctgtagtgaatggaatttggggcactgaggggaaggagtggaggtgttggtaggaacttgttgctggtgggggatgggcgccgtagatatcctttacaccactggctactccccctatctcctctggggtgaccctgagtatcctctgtgggacaccggcatcctgtgaggcgccctccttgcccacattgacgctgcgctggctcgagggtcacattcacggtctggcagaggaagcaggggtgaccgccgcagtcctcctcctgctccccttgccgagtcacgtgtcacgaagagcaaactgagcaaactgagctgcgcagatgaggggagactcgtcaccaggcgtgcagtgggcactgctgggctcccccatcccgtcctaacccggaacagccccgggcaggaggcgtggaaagtcgagggggtaaaccgcgaatgtgcgttgtgtaagccacggcgcagggtggggcgcgggcgggacttgggcgggcggggtgggcttggccgagctggcctccggggcaccgaccgctataaggccagtcggactgcgacacagcccatcccctcgaccgctcgcgtcgcatttggccgcctccctaccggtgagttctctccaggagccctgggtactttccagggccagctgccctcacgctgggggtccagccatcccctgcccagttcagccgctggatccagactggggccatctgtggcgctcccccgctggagggatagtcaggagcagcagtgctgtgccaggcaggccttgggctaagggatcgcaatggggtgtgctcttttggggtgcggaagggagtgccctgggtgtgtcattgccaccatgtgtggccctgtgaagctgtgtttaagctgcctttgcagcctccattcccctcccctgcccagccatactcctcaacttctggatcccctgaaggacagttctcagctgtgcccaaagctactgttcctatatgcttcttagaatccttaagccacctctcttgccttggccctagtgtgctctctccttccccttcaagccctgggctgtctcctgatgccattgtgtgtggcctgagactgggtggttccaaaggaggcggggctagtgcaggcagcattattggggtgtgtgggtgagaagtccttgctcccatggcactgactaggccctctgctgccagctccaagcccagccctcagccatggcatgccccctggatcaggccattggcctcctcgtggccatcttccacaagtactccggcagggagggtgacaagcacaccctgagcaagaaggagctgaaggagctgatccagaaggagctcaccattggctcggtgagtggcctcctccccaggaccccttttcccacccttgtcctttggaagcaggattaggggagagagaggtgccaggtgcatctgactcacatttacccacattctgaggccctggtccacatgtagaccctgagctgtagacccactctcccagcgggtaggggatgcttccagccggatatccatctctccaaatgaggaccagta

SEQ ID NO: 1549 - DNA, 6000 bp, Homo sapiens
ggcatataattagaaccatgatattgatgatgctcaccctgagtgagggggaaaaaacccgtacaattacagcactagattataaaaacttcctctttaatcaaggcttttaacatgaacagatttcttgaataaaatggaaagtttccagtacactgaaacataaatccgcaagtcaccacacatacaacacccggcaggaaaaaacaaaaacagcaagtttacatgatccctgtaacagccatggtctcaaactcagatgcttcctccatctgccaagtgtgttctggatacagagcacatcgtggcttctggggtcacactcagcttaggctgtgggtccacagagcactcatctggctgggctatggtggtggtggctctactcaagaagcaaagcagttaccagcacattcaaacagtgtattgaacatcttttaaatatcaaagtgagaaacaagaaggcaacataataatgttatcagaaagatgttaggaagtaaggacagctgtgtaaagcttgaggctgaaaagtagcttgccagcttcatttctttggtttcttgggtagtgggcgccggaacagcaagatgtgaggttctgaaagagtgagggaaatctaagagacaagctcacaccattctatgtacaacctatagtgtattccactaccacctccccagctatcacccactcagatctttataactaaataaagacttaagcatatggccttagaagcagacccagaagtctggactgtctgccaagtacagaattgttaatatcagttcttttgctatgtttatacagccccagggtgtcccttattagttttgcctggcagctgggtgtctggtgtcttatcaataaatatactttcctttgcttatttagaacacatccaagaatgttttcgatggagaatgaggcaggggctatgatcaggctatatgtggccttaaaaagaataccctctgattgaatgaaagattacaggaggtttttcagtgacaggttgtctctgaacttcccagatattttagtcttatttttggtcactagtttttttttaaaaaaatcccccacgactggagggggaaggaaccagtaaaccatttcctatctccctatttgggttatacaatcttattctttcattctctcagtgtagcagttctatatggttgtttttagccagtgcactgacctggttcatggatcatataatggacccatccctgactctgctgaacgccaagattcctccattcagattcagacatcagatgggttttagggaccagcttggctatgtccttgggcagcatgacatgtctgtaacagaaacggggaagtggggaatttatgttagtaccagatacagtctcttagacaaatgcctgtttacaaggccaagaaaggaaagaaaaactggtttttgatgtcagagtttatataattttattgtggggtagcagcagctagaaatacaggctatgttatataaattccgagagtatattaaaaatacaaattagtgaataattccagtgaatgagcacttaagttcaaggcacattttctccgccttcatggaccttatagtcttctagttgattatctacaacataatgggagccccacggagcacacagtgttaataattagaaggaaggaagagaagttattttgtggcgaggaaaggccttttatgaagtactgtgtggacaagttattacaaaggatgaaatgaactatcttgtcctttaaaatctaagccaggcatggtggcacaaacctacagtcccagctacttgggaggctgaggcaggagggtcatttgaacccaggagtttgaaaaagatacagtatgaagtttgaaatctgattaaaatacagaagaaataggccaggggcggtggctcatgcctgtaatcccagcactttgggaggctgaggtgggtggatcacttgaggtcaggagttggagaccagcctgaccaacaacgtgaaaccccgtctctactaaaaatacaaaaattagccgggtgtggtggcatgcacctgtaatcccagctatttgggaggttgaggcaggagagaatcccttgaatccaggaggcggaggttgcagtgagctgagatctgggcgatagagtgagattccgtctcaaaaaaagagaaaaaaaataagaaaaaagaaagggctgcaatgcacaatggttgtgcctgtgaatagccactgcactccagtctgggcaacaaagcaagaccttgtctcttaaaaaaaaaattaaatctatcctgaatcttattttcctaactctggagggatgtaccttgagactttctgggtaaattccgtgcttttctaaccaaggataagtctcccttcatagcaaaaaaattattaccctgatgtgaatcaaactaatccacatagtcttcgtcatgctcaatgaaaatgtactaagttctccctctgtgctagtaacagtgattccccaccattctcctaaaagaaaaaattctagtccaaatataatgaaaatagctcacattctaacaccaccctggcacgaaatttggcttcaatacatacaccaaaaaacccctcttaaaccaaagtgccactgccaagagtttcatcttccaggggatgaaatggtgattccttcccagctccacaaatctcttataagcacatacagttttaagttagtttagttcagatgtagaggaaaacagctgaggaaaagaaagttaattaaaggagggtctggagccgtcttggcataaagatgattatgtatttgtcaatgcacatcgagttctctggaagacccaaagccctgaactaggctgggtgaagagacacaagaaaagcaagttttcattttatgttctccaactgaggagacaagatacaaaccaggaagtggtcttaattattacaattaatacagattagcataatgccaacatttgtggaatcctgtgtcttcccttattcccaatctagattatgcacttaaaatttatcaagcccgaatgccacatccagtgccaggattccatcatcaccatccttggcagatggctatccagtgtcttctaaacaatttcagtcaagaggtgcttcctcccacatacctttttcttagagtctcatctcaggctctgccctctaggaagctttccccaacattccctcttccgtttttcctctcagtattttaagtttcatgttcaagggtacatgtgcaggtttgttatataggtaaaatcctgactcgggggttcggtgtacaggttatttcatcacccaggtactaagcatagtacccgacagtttttttttttcctgaacctctacctcctcccaccctcctccctcaagcaggccccaatgtctgttgttcccctctttctgtccctgtgtttttatctccgacatataaatgaaaacacgcgtagtttactactggtttcgttttcaatggtggtgaaagagacatcacgctgaattggcccttaggacactcccccgcccccaaaccaagcccagggaagaagaccgaccgaaagtaagaggtcagcctccaaggcggtggcggggcggggggcgttctcgaagcgtgggatgggggagcgtcctggagttagcaaaagtaggggactgactttctagccccacctcaacccccgctcacagctaggaagccgcagccttcgggtcgccagttccctctccttagcaagtcttgtgtgctcccatcacaccctgtaatggctccttgcatagcgtgtgtcacctttctggtgtctgtcggtaccacccacagatttttaaatttgtgaacagcagagaccatgtgttatccttgcactttagcagaacacctgaaacctgttaagtattccgtaactgttccctttgatatttaaagggcatctattagacccatattaagtattttctcaatgctcctagccagttttattccattgcagtcccaagcgatccccttccttacacaagccagacaaccacgccccttgtctttttcacgagttaataagcaatattcaactctctcagcgctactctcctgttagggacgccaggaaacttccagctccgcttttgctacgttctcccactggattcgacaagattactgtgaaacagtctctacaaggcaagttaagtttgcccgataaagttcagagaatgatccagaaagcctcatgggtgagggtggtcagtaccctaaccacgcccacccctctctcctctctactgagaggcgactccaaattcgcaaccactttgttttacgagcgcctcccacctccgcgcatgcgccttacgccttccacaatatcacaccattgcccgttcgcacctcgtacgcatgcgccaattctatcgcctcagttcctgttactaattccttgtgccctcagcggccaaagctcacgaccctcgctattgctcccgcgccagcactaaccgatactcaaactcctcgtcgtcgtatttgtccgaatagtaaatttgtttgtgcgacatgatcgctcggtttgctagccttcagccccgcgccgccaacctccaagcaactcccaacagcacgcgctcccacccactttggcctcgctttcaaacacgccgcccgcacttcctattggtccgtttggctcgaggcgggacacctctactttcaagcctccgattggcttagatttacttctcttcggatccttattggagggcagttctcacgcttctcaagaacgagcgtgggtcaaaagtaggcgtcttattggccaccactgcctttgtgcgcgatctcgcgctgccattggctaactcgggaaagtgggaagcgtgaaggagggaccctgaggtagagggtcaggggttagtgaggccggaagtgagtgtaataaagtttctccagggaggcagggcccggggagaaagttggagcggtaacctaagctggcagtggcgtgatccggcaccaaatcggcccgcggtgcggtgcggagactccatgaggccctggtgagtcttgacttttttctccttaggtgactcactctttcaccccggaacccctctcccgggaccccacttccggtcttcatttataagtcccgcccctgagacccctctccccggaagtcccacctcccaacttcagggggctcccccgaaccccgacttgatttttattttttgtctccgaccccaccctgtcgcccagtttttctggaagtccccaccccccgacacgttccaagccctactacgagaaacccttcgttactccttccattctccgaaactccgcctcctagcaacgatcctcggctaactcctgtcaaaaggcctatctcccaaaagggcaaaaccctgctcttcaaagaacgattcgaatttgttgaagctccgcccctccgaagccacgccccctccgtaatccacgtctgactgtccagaaagcctccccgcccagaagtctgaagttcgcgtccttaggggaccacgcccccttaggagctttatctttgtgggacctgggtcatcagctgaaaagccttgtcgtcaatccctgaaactccacctgcttatattttcctgtcctttctctttttgggccttgggatcagttttccgagcactctcgtgctcccccaggtgggaagtcaaagttcccatctctggctgtaaggagtgagattaaaggcagccgttttccgttttcctttctatcttttttttttttttttttttttttaagacggagtttcgctcttatcgtccaggctggagtgcaatggtgcgatctcggctcactgcaacctccgcctcctgagttcaagtgattctcctgcctcagcctcctgagtagctgggattacaggcgcccaccaccacgcccggctaatttttgtatttttagtagagacggggtttccccatgt

SEQ ID NO: 1550 - DNA, 6000 bp, Homo sapiens
aaagatcaagaagtcattcattccaacacttattaagagcttctgccatgctgggcattgtgctaagcatgccagggtgggggtgggggagtgaaaagaaggaagggggcccaggcaaagctggaagggaaggggctacagaatcggggaagggatgagaaaggtttaggaaataggacactgaaacggggttgttggggaacagcaggaaaaaagagattccggccaagctggagtgagcattagaactggagggggtctgcgggggaatggagaggaggatgttcactcacccgaaccaagtaggaaaccccgggtcccatgactttgtcgttgggatgcagccagccccgcgtgggcttattgacaaagctcccgtggcgggtccactcctcgcccccaagctggcccccttccacccgagtcctgcgcccgccgcctccactcagcttgttcatgtcctggaggaggggtagggggcctgagtctggcatggctgcccctacgatcccctccccatcatcagctgcccttcctggctcccccttagaccctgggcgccccccagccgggttggccagcctcaggttgctcatccgggggaagaaggagcacagggtagtgggactatcgtccccaggcagaggaggcaggatgggccccagggatgaagctgatggggaaggcagctcctccgggggggtggacccagaagccccttcctccagcgatgacagagactcattccggagtggattgtacttgggcttggggggcaggagatccatagttgaggtgaaagaggggctgctgcccagcctggcccccctgccagtttgggcaagggggccaggcagggggtatccccaggcccttagcctggttggacctctgtggcccaggagtcacagaagtcctggggagggagagggacaagtggcttccgctccccagctcagacccagacagtttcaggccccatccccgcccaacgtggagcctcttctctggctgagaagagaacaggctggacccagcgcttctggctcctccccaggggcggggagctaaggggagagaccaatcgtgaggacagtgctgactcacaggctcagaggggctgagcccccaccccgccccaacctcgaactggagcagggggtagggctatccaagcccctctcccctgccctatacaaacaactagtaatctggggagaagtaaagtgggggtgggagggaaggatggaagagtgggacggaaaggaaggagataggaggtctgggtcactcaaaaccggacacacgcaggccaaagggggcaggaagccaggcaggagtacaggggaatgagggaggaaacagaggcagctgggggtggaaaagggaggagatctcagagctcagcatttcccttcctgtcctggttggacactcgaattcccccaccctctctatgcccgaaagctggctggccccagcccaggccacccccaaccgctaccccatacagtaagcctgggccattagcatcctctgctacagcagctgtggactggagctagcgaagtggggatgggaagtaagtggtcccaatggatgcagagcagggccaagaggaagagcaaagctggtgaaaaaaggggaataaagttcaacctggatgatacatcaggaagctaccaggcaagaagggaacaagaggacatgctggtcacggcttgttctctacgtatgccatctaccacaccaagaccgatggctcatagccaagcactgtcctgtctcccctttccacagggcttgttaacacagcacactgtcaagggtgagaatgaggcaatcaggtccccactcccactccaaaccaccccaattcacatccctcctcttacagggccctaagccccaccaaagagcacagcatccttcacaccagggaaggagcctggctggaggaggtggaagaaacagttctccaagagaagtagaaactacaggccaggaagggacagagagatcagaagacacatctgcgtcaataaggacaggagaaaaataagtacaggagaaaggggtgtcaggagaagatgggttgaagctggacacagggaacagtcccaaacccattcctgccacccacggcttcctgccactgctcttccggagaatgccacaggcaaagctggaaagtgaccaaaaaaaaaaaaacaaagatacgtattcctaccgggcgcggtggctcacacctgtgataccagcactttgggaggctgaggcgggtggatcacctgaagtcaggagttcgagaccagcctggtcaacatggtgaaaccctgtctctactaaaaatacaaaaattagctgggcgtggtggcgggcacctgtaatcccagctcaggaggctgaggcaggagaatcgctcgaacccaggaggcggaggttgcagtgagccgagatcgagccattgcactccagcctaggtgacaagagcaaaactccgtctcaaaaaaaaaaaaatacgtattccccccagctcaccttggaattacccttagatttacttcagagaattaaaatatagatagataattatcctgattaacaacattaacacttgaagtgtgttagatgctgtgcttaactcttacatctccccttagtgctcattccagaagagctttgtcactctgccagccaatcctgagaaggaattttatcacttcatttccagccagctctcgggcatagagagaatgaggaaaggattccaccatagcctcacacccccaaaacacacaaacacacactaggatgtccctcatctgtagagatgatgttctgtgggagcctacagtatccagagccagggaaggaccaacgggtgtgggcgttcggaagaaaagaaagacgtatgactcttgaaatttacatagggagaaaggagattgcctactggaagtccaggtgattgggtgtaggggaaaagctgtgtgtggcttcgcagcccaactgggaggaggggacaggggcgggaagtggcaggaaatggcgaaagcctcaggaatgtttccagcagggaaggctgggcaaacggggccaggaggaatgcccagacaagaactctggttagggggaggggaagagacagagaagtagcgactgaactgtcccttaaaaaaaaaaaaatcaaacaacaaaaagagcactattatctacccccactccaaactaccgttcttctggtagtagaaaacttttgctcatgtcacacccacatgccacacaccaacaaatccatggtcttatccacttatgtctaggaaggcctagagctacttctgggatgaggttggtcctgggaagggaaagccaggaagtgaggctgggagtctgagggcaagtctctctctccctctcgtgccaaaccccacgttcagccctttcaaatagttctacccttggaggaggttaagaaagaggaaaacggggacgggcgcagtggctaacgcctgtaatcctaacacttaaggaggctgataagggtggagcacctgaggtcaggagttcgaggctagcctagccaacatggggaaaccccgtctctactaaaaatacaaaaattagccgggcgtggtggtgggcgcctgtaatcccagctactcaggaggctgaggcaggagaatcacttgaactcaggaggcggaggttgcagtgagccgagatcgcaccattgcactccagcctggacgataagagcgaaactccgtcttaaaaaaaaaaaaaaaaaaaaaaaagatagaaaggaaaacggaaaacggctgcctttaatctcactccttacagccagagatgggaactttgacttcccacctgggggagcacgagagtgctcggaaaactgatcccaaggcccaaaaagagaaaggacaggaaaatataagcaggtggagtttcagggattgacgacaaggcttttcagctgatgacccaggtcccacaaagataaagctcctaagggggcgtggtcccctaaggacgcgaacttcagacttctgggcggggaggctttctggacagtcagacgtggattacggagggggcgtggcttcggaggggcggagcttcaacaaattcgaatcgttctttgaagagcagggttttgcccttttgggagataggccttttgacaggagttagccgaggatcgttgctaggaggcggagtttcggagaatggaaggagtaacgaagggtttctcgtagtagggcttggaacgtgtcggggggtggggacttccagaaaaactgggcgacagggtggggtcggagacaaaaaataaaaatcaagtcggggttcgggggagccccctgaagttgggaggtgggacttccggggagaggggtctcaggggcgggacttataaatgaagaccggaagtggggtcccgggagaggggttccggggtgaaagagtgagtcacctaaggagaaaaaagtcaagactcaccagggcctcatggagtctccgcaccgcaccgcgggccgatttggtgccggatcacgccactgccagcttaggttaccgctccaactttctccccgggccctgcctccctggagaaactttattacactcacttccggcctcactaacccctgaccctctacctcagggtccctccttcacgcttcccactttcccgagttagccaatggcagcgcgagatcgcgcacaaaggcagtggtggccaataagacgcctacttttgacccacgctcgttcttgagaagcgtgagaactgccctccaataaggatccgaagagaagtaaatctaagccaatcggaggcttgaaagtagaggtgtcccgcctcgagccaaacggaccaataggaagtgcgggcggcgtgtttgaaagcgaggccaaagtgggtgggagcgcgtgctgttgggagttgcttggaggttggcggcgcggggctgaaggctagcaaaccgagcgatcatgtcgcacaaacaaatttactattcggacaaatacgacgacgaggagtttgagtatcggttagtgctggcgcgggagcaatagcgagggtcgtgagctttggccgctgagggcacaaggaattagtaacaggaactgaggcgatagaattggcgcatgcgtacgaggtgcgaacgggcaatggtgtgatattgtggaaggcgtaaggcgcatgcgcggaggtgggaggcgctcgtaaaacaaagtggttgcgaatttggagtcgcctctcagtagagaggagagaggggtgggcgtggttagggtactgaccaccctcacccatgaggctttctggatcattctctgaactttatcgggcaaacttaacttgccttgtagagactgtttcacagtaatcttgtcgaatccagtgggagaacgtagcaaaagcggagctggaagtttcctggcgtccctaacaggagagtagcgctgagagagttgaatattgcttattaactcgtgaaaaagacaaggggcgtggttgtctggcttgtgtaaggaaggggatcgcttgggactgcaatggaataaaactggctaggagcattgagaaaatacttaatatgggtctaatagatgccctttaaatatcaaagggaacagttacggaatacttaacaggtttcaggtgttctgctaaagtgcaaggataacacatggtctctgctgttcacaaatttaaaaatctgtgggtggtaccgacagacaccagaaaggtgacacacgctatgcaaggagccattacagggtgtgatgggagcacacaagacttgctaaggagagggaactggcgacccgaaggctgcggcttcctagctgtgagcgggggttgaggtggggctagaaagtcagtcccctacttttgctaactccaggacgctcccccatcccacgcttcgagaacgccccccgccccgccaccgccttggaggctgacctcttactttc

SEQ ID NO: 1551 - DNA, 6000 bp, Homo sapiens
aagatacagcaaggtggaagctgaaatgtcttttatgacctaggaagtctcacaccatcatttccataaattccccttggttatacagatcaccctgctcaacatgaaagggtgttacaggaaggagtgaatactaggacacaaggatcattgggggctattttggagactggctaccacagggtgtaatcactttcatgcttgaaggatatggatctatctttaagagctcaacaattaaaatacaggccaccccttctgttaatgatattccaaggcacatctgtttcagaatattcttggtatgacttttgaatatggctcaattctataatttagtatcctcatcttttaggttaacaagtgaagcaatgagaagacactgaagtataacagaagagactggaaaagcagaaagaaagaaaactttactgggaaatattttcagatggataacttttatttgtagtgttcaggaaaagggcttataactaaccaagatatggcgtataacaatggatatttttcacaaggaggacctagtcaacttctaaaagtttagcgcttaaactctctgattacaatacactttatttcaacaagaccctctgaggatccctagtactttacttggcattcctttagagcatttttacctatattgtttgatcatattacacatgtctaagtcattctaccaactccaaagtccttaaaatcagagttcatttctatttcatctcttccctctatttaggatctaatgtcattttgttctccacttccctccctacttctcaacttcccactttgctctccctttatacaaacacagatggctgtacttattgccttagaggagccatgtggctgcaacatcacaaaaacctgtgagtctttgcttcagttttgtattccaaaagcccaaagccctcaagagatttgtgtggactgcagacttagagaaaatgctttttagatatagtaggagaggggctgggcatggtggctcatgcctataatcccatcactttgggaggctaaggaggaaggagcccttgaagccaggagttcaaaaccagcttgggcaagaaagtggagaccttgtttctaaataaataaataaatggatttttaaaatgaaaaaaaaaaatagttgtgcaagatggtgtgtgcctgtagtcccagctacatgggaggttgaggcaggaacgtcacttgaacccaggaattgggggatgcagtgagctataattatgccactgcattccagcctgggcaacaagtgagactctgtctctaaaaaaagaagaagaaaaagagcaggagagtgcacacatctcagtgacaaccagacaagatgatgaaaaatgatactgaaaagcagatgtgtcaatgaaaaaagccaaactctgtaaaatatttgagaagatttattctgagccaaatatgagtggccatggcccaaggcatagtctcaagaagtcctgagaacaagctcccaatatgtttggattacatcttggttttatatgttttagggaaacataagacatcaatcaatatacgtgggtacacactggattggtctagaaaggtgcaacaaagcaggggtgatggctttcaggtcatgggtggattcaaagattttctgattgcagtcgtttgaaagagttattgtcctgtaatcaatagaaaggagtatcttggataagataaggagttgtatagtgagaatacatagatacagggagggtaacaacacacactggggcctgttggggatgggatgggaggagggagagcattgagaaaaatagctaaggtatgctgggcttaatacctagctgatgggttggtaggtgcagcaaactaccatggcacacatttacctacctatgtaataagcctgcacatcctgcacgtgtaccccggaacttaaataaaaattaaaattaataagaaataaaaaagataaggggttgtagagaccaagaatctcattatgtagatgaagtctcatagatggtcatccttagagacaatagatgaaaaatgtttcttatttggacctttagaaggtgctagactctcatttaatatcttcagggttgggagggcctggaagggggaaaagccatagttatgttaacacagattatttacagatgcaaatttcccccacaaaagacaggctttgcagggccatttcaaaatatagcaaagcaacatatttgggggctaggcacagtggctcatgcctgttatcccagcacttcgggaggccaagatgggtggattacctgagctcaggagttcgagatcagcctggccaacgtggtgaaacctcaactctactaaaaataaaaaattagctgggtgtggtggcaggcacgaataatcccagctacttgggaggctgaggcaggagaattgtttgaactcgggagggagaggttgcagtgagccaagatcgcaccattgcactccagcctgggtgaaattccatctcaaaaaaaaagcaaaactctgtctcaaaaaaaaaagaggccgggcatggtggctcacgcctgtaatcccagcactttgggaggctgaggcaggcagatcacaaggtcaagagatagagaccatcctggccaacatggtgaaaatacaaaattagcggggcgtggtggtggatgcctgtaatcccagctactcgggaggctgaggcaggagaatcgcttgaacccaagaggcggaggttgcggtgagtcaagatcgtgccattgcactccagcctaggcaacaagagcgaaattccgtctcaaaaaaaaaaaaggaaatatatttggggttaaaatatttgtatttccttctttatctgtcatgtgatgttatgccagagttaggttggaaagtaagtcacgttatatggggttaaacaaaacccatcttgtggccgggtgcagtggctcatgcctgtaatcctaacactttgggaggccaaggtaggaggattacctgaggtcaggagttcgaggccagcctgaccaacatggcaaaaccccgtctctactaaaaatacaaaatttaaccgggcatggtggcgcatgcctataatcccagctactcgggaggctgaggtgggagaattccttgaacccaggaggcagaggttgcagtgagctgagatcacgccactgcactccagcctgggtgatagagtgagactttgtctcaaacaaacaaaccaaccaaccaacctatcttgttactggaaagtggtctcaatccagaccccaggagagggttcttggacctcacgcaagaaagaattcagaatgagtccataaagcaagtttattaggaagtaaaagggataaaagaatggctactccataggcagagcaacagcttaggctgctcgacttatagttattcatatttatagttatttcttgattatatgctaaacaaggggtggattattcatgagttttccaggaaaggagtgggcaattcctggaactgagggttcctcctctttttagaccatgtagggtaacttccaggacgttgccataccatttgtaaattgtaatggtgctggtaagagtttcctttagcatgctaatgtattataattagcatctaatgagtagtaaggacgaccagaggtcaccttcaccaccattttggttttggtgggttttggctggcttctttactgcaatctgttttatcagcaaggtctttgtgacctgtatcttgtgttgacctcctatctcatcctgtgacttagaatacctaacttcctggaaatgcagcccagtagatctgagccttattttacccagctcctattcaagatggagttgctctggtttgaacacctctgacaatctgatgagattttatggtttgtaggctgtgactcctcacatcccttagataagaatttggggccaggtgcagtggctcacgcttgtaatcccagcactttgggaaggtgaggcaggcggatcacaagggcaggagttcgagaccagcctgaccaacatggagaaacttcatctctactaaaaatacaaaattagctggcatggtggcaaattcctgtaattccagctacttgggaggctgaggcaggagaatcgctggaccccaggaggaggaggttgcggtgggcggagatgccgagatcatgccattgcaccccagcctgggcaacaagagcgaaactccgtcttaccaaaaaaaaaaaaaaaaaaaaaaaaaattgagcaagagagaagacaggtcagagtttagtcctcaacctctcctcaaactttccacttagcactacatgaaccatctcatctggctgggaacttacacaaaacctgaagaaaagaagatagggcctattgtctgatactaagtttttgccacacaatcagaatagatcttgaaatagaaaaggttgaatgactgaaaagtaaagaaggctacatttcttacacactcgagtttgtggattgagatgcctatttgctacatttgttactcaataaacgtttgctgaatgaataaaataattgaataaataaatgaaaaataaaaatttggaacagatccgtgtttgcccagggtgaatgctttttgatgagggagccataggcaaggtggactatgttgataaaaagagttaaactctgtaaaatatttgaagagatttattctgagccaactatgagtgaccatggtctgtgacacagccctcaggagatcctgagaacatgtacccaaggtggttggggtgcagcttggttttatacattttgggagacatgagacttcaatcaaatatatttaagaaatacattgatttggcccagaaaggtgggaaaactcgaagcgggaattggtggggggagaaatgggtccttccaggttataggtagatttaaaatttttctaattggcaattggttgaaagagttatcaatagaaaggaatgtctgggttgtcataagaacttgtggagaccaaagttttgtcatgcagatgaagcctccaggtaccaggcttccaagaaaatagattgtaaatgtttcttaccagaccgaaggtctgtgttgaccttaaccggagaggtatgaggctagtcggacccccacttcccgtcatggactgaaccagaattttagagtgccctggcctgggagaaagtccattccgatggttggcgacacggggggcttagaattgtattttcggtttacatctaaaagaagaacaaaggtctaggcttccagaatcatgggttctggtgaccgtggacctggaggtgatggtaaactctctttttgttcctggggtgttttccttgggatcctttctatgagaaatgtaggccgggttttatttttcgggttcctagtggtgaggtaaggtgaggtgcctcaacaagaaaaaggaccagttttggcttcaggtctatgtgaaagcggttaacactgggcctggaatggtagatactcaataattaaggttacttcttattctcggttcttttttccaaacctagcgcgtctaatctcttctaggccccgccccttctgagccccccctccttcggcctgtatgataggctcttcctccatttccggcttctgggactcgggtgcaccacggcttccggtgtcatggctgcttgaagtcccgggagtcggtgaggcggctgcaggtccctccctgcggagccgctggtccggctggcggagatgtgaccgcgggcccggccggcctgcctcaggcgtcgcgtcagctcccgtgtccgtgcccttaacccacaccgatggcgggatccggctgcgcctggggcgcggagccgccgcgttttctggaggccttcgggcggctgtggcaggtacagagccgtctgggtagcggctcctccgcctcggtgtatcgggttcgctgctgcggcaaccctggctcgccccccggcgccctcaagcagttcttgcc

SEQ ID NO: 1552 - DNA, 6000 bp, Homo sapiens
attctaccaactccaaagtccttaaaatcagagttcatttctatttcatctcttccctctatttaggatctaatgtcattttgttctccacttccctccctacttctcaacttcccactttgctctccctttatacaaacacagatggctgtacttattgccttagaggagccatgtggctgcaacatcacaaaaacctgtgagtctttgcttcagttttgtattccaaaagcccaaagccctcaagagatttgtgtggactgcagacttagagaaaatgctttttagatatagtaggagaggggctgggcatggtggctcatgcctataatcccatcactttgggaggctaaggaggaaggagcccttgaagccaggagttcaaaaccagcttgggcaagaaagtggagaccttgtttctaaataaataaataaatggatttttaaaatgaaaaaaaaaaatagttgtgcaagatggtgtgtgcctgtagtcccagctacatgggaggttgaggcaggaacgtcacttgaacccaggaattgggggatgcagtgagctataattatgccactgcattccagcctgggcaacaagtgagactctgtctctaaaaaaagaagaagaaaaagagcaggagagtgcacacatctcagtgacaaccagacaagatgatgaaaaatgatactgaaaagcagatgtgtcaatgaaaaaagccaaactctgtaaaatatttgagaagatttattctgagccaaatatgagtggccatggcccaaggcatagtctcaagaagtcctgagaacaagctcccaatatgtttggattacatcttggttttatatgttttagggaaacataagacatcaatcaatatacgtgggtacacactggattggtctagaaaggtgcaacaaagcaggggtgatggctttcaggtcatgggtggattcaaagattttctgattgcagtcgtttgaaagagttattgtcctgtaatcaatagaaaggagtatcttggataagataaggagttgtatagtgagaatacatagatacagggagggtaacaacacacactggggcctgttggggatgggatgggaggagggagagcattgagaaaaatagctaaggtatgctgggcttaatacctagctgatgggttggtaggtgcagcaaactaccatggcacacatttacctacctatgtaataagcctgcacatcctgcacgtgtaccccggaacttaaataaaaattaaaattaataagaaataaaaaagataaggggttgtagagaccaagaatctcattatgtagatgaagtctcatagatggtcatccttagagacaatagatgaaaaatgtttcttatttggacctttagaaggtgctagactctcatttaatatcttcagggttgggagggcctggaagggggaaaagccatagttatgttaacacagattatttacagatgcaaatttcccccacaaaagacaggctttgcagggccatttcaaaatatagcaaagcaacatatttgggggctaggcacagtggctcatgcctgttatcccagcacttcgggaggccaagatgggtggattacctgagctcaggagttcgagatcagcctggccaacgtggtgaaacctcaactctactaaaaataaaaaattagctgggtgtggtggcaggcacgaataatcccagctacttgggaggctgaggcaggagaattgtttgaactcgggagggagaggttgcagtgagccaagatcgcaccattgcactccagcctgggtgaaattccatctcaaaaaaaaagcaaaactctgtctcaaaaaaaaaagaggccgggcatggtggctcacgcctgtaatcccagcactttgggaggctgaggcaggcagatcacaaggtcaagagatagagaccatcctggccaacatggtgaaaatacaaaattagcggggcgtggtggtggatgcctgtaatcccagctactcgggaggctgaggcaggagaatcgcttgaacccaagaggcggaggttgcggtgagtcaagatcgtgccattgcactccagcctaggcaacaagagcgaaattccgtctcaaaaaaaaaaaaggaaatatatttggggttaaaatatttgtatttccttctttatctgtcatgtgatgttatgccagagttaggttggaaagtaagtcacgttatatggggttaaacaaaacccatcttgtggccgggtgcagtggctcatgcctgtaatcctaacactttgggaggccaaggtaggaggattacctgaggtcaggagttcgaggccagcctgaccaacatggcaaaaccccgtctctactaaaaatacaaaatttaaccgggcatggtggcgcatgcctataatcccagctactcgggaggctgaggtgggagaattccttgaacccaggaggcagaggttgcagtgagctgagatcacgccactgcactccagcctgggtgatagagtgagactttgtctcaaacaaacaaaccaaccaaccaacctatcttgttactggaaagtggtctcaatccagaccccaggagagggttcttggacctcacgcaagaaagaattcagaatgagtccataaagcaagtttattaggaagtaaaagggataaaagaatggctactccataggcagagcaacagcttaggctgctcgacttatagttattcatatttatagttatttcttgattatatgctaaacaaggggtggattattcatgagttttccaggaaaggagtgggcaattcctggaactgagggttcctcctctttttagaccatgtagggtaacttccaggacgttgccataccatttgtaaattgtaatggtgctggtaagagtttcctttagcatgctaatgtattataattagcatctaatgagtagtaaggacgaccagaggtcaccttcaccaccattttggttttggtgggttttggctggcttctttactgcaatctgttttatcagcaaggtctttgtgacctgtatcttgtgttgacctcctatctcatcctgtgacttagaatacctaacttcctggaaatgcagcccagtagatctgagccttattttacccagctcctattcaagatggagttgctctggtttgaacacctctgacaatctgatgagattttatggtttgtaggctgtgactcctcacatcccttagataagaatttggggccaggtgcagtggctcacgcttgtaatcccagcactttgggaaggtgaggcaggcggatcacaagggcaggagttcgagaccagcctgaccaacatggagaaacttcatctctactaaaaatacaaaattagctggcatggtggcaaattcctgtaattccagctacttgggaggctgaggcaggagaatcgctggaccccaggaggaggaggttgcggtgggcggagatgccgagatcatgccattgcaccccagcctgggcaacaagagcgaaactccgtcttaccaaaaaaaaaaaaaaaaaaaaaaaaaattgagcaagagagaagacaggtcagagtttagtcctcaacctctcctcaaactttccacttagcactacatgaaccatctcatctggctgggaacttacacaaaacctgaagaaaagaagatagggcctattgtctgatactaagtttttgccacacaatcagaatagatcttgaaatagaaaaggttgaatgactgaaaagtaaagaaggctacatttcttacacactcgagtttgtggattgagatgcctatttgctacatttgttactcaataaacgtttgctgaatgaataaaataattgaataaataaatgaaaaataaaaatttggaacagatccgtgtttgcccagggtgaatgctttttgatgagggagccataggcaaggtggactatgttgataaaaagagttaaactctgtaaaatatttgaagagatttattctgagccaactatgagtgaccatggtctgtgacacagccctcaggagatcctgagaacatgtacccaaggtggttggggtgcagcttggttttatacattttgggagacatgagacttcaatcaaatatatttaagaaatacattgatttggcccagaaaggtgggaaaactcgaagcgggaattggtggggggagaaatgggtccttccaggttataggtagatttaaaatttttctaattggcaattggttgaaagagttatcaatagaaaggaatgtctgggttgtcataagaacttgtggagaccaaagttttgtcatgcagatgaagcctccaggtaccaggcttccaagaaaatagattgtaaatgtttcttaccagaccgaaggtctgtgttgaccttaaccggagaggtatgaggctagtcggacccccacttcccgtcatggactgaaccagaattttagagtgccctggcctgggagaaagtccattccgatggttggcgacacggggggcttagaattgtattttcggtttacatctaaaagaagaacaaaggtctaggcttccagaatcatgggttctggtgaccgtggacctggaggtgatggtaaactctctttttgttcctggggtgttttccttgggatcctttctatgagaaatgtaggccgggttttatttttcgggttcctagtggtgaggtaaggtgaggtgcctcaacaagaaaaaggaccagttttggcttcaggtctatgtgaaagcggttaacactgggcctggaatggtagatactcaataattaaggttacttcttattctcggttcttttttccaaacctagcgcgtctaatctcttctaggccccgccccttctgagccccccctccttcggcctgtatgataggctcttcctccatttccggcttctgggactcgggtgcaccacggcttccggtgtcatggctgcttgaagtcccgggagtcggtgaggcggctgcaggtccctccctgcggagccgctggtccggctggcggagatgtgaccgcgggcccggccggcctgcctcaggcgtcgcgtcagctcccgtgtccgtgcccttaacccacaccgatggcgggatccggctgcgcctggggcgcggagccgccgcgttttctggaggccttcgggcggctgtggcaggtacagagccgtctgggtagcggctcctccgcctcggtgtatcgggttcgctgctgcggcaaccctggctcgccccccggcgccctcaagcagttcttgccgccaggaaccaccggggctgcggcctctgccgccgagtatggtttccgcaaagagagggcggcgctggaacagttgcagggtcacagaaacatcggtaattgccgctgtctcctttctcttcttgcccaggtcacagtccgagcacactcttcctctcgctgtctggcgttccatcttcctccccttctgcgggagaagcgggtttagccctctttatcaccccatccaggcccctttcccctttcactttattactgtctgcggtatagtggagttggtggtctgctttgccaggtgtcacatagatgctcagtaaattgtcttgcttcgagtctcatcggagaatgccgcattcattagcatacagaaatatcttttctagtgagaggaggcatgtctttgctagattgtcgtgtcttgtgtggaaatttttgaatctttgcataccagtagaaaatgggaactacgtctgggccttgtgacatcaatgctagtaactcgtatagctcacctattatatctttagtacggatttggaagaaatgatgcactattccatgggagcctttatagaagtgtgaaatttaggaacactatacctttgctctcttgagactgtttcaagaatcagatactcagaatgtaagatatgtaatgatcactgatgattgatctgtgaaaaggtttcat

SEQ ID NO: 1553 - DNA, 6000 bp, Homo sapiens
agcttcagctgactgccctctttcaacttgtccctgctcctcccacccttctccctccacacacacatttaatgcagcttctaacatgtactgataacattattaccttctcttcagggaaattctgagaatgctcttgttatttaaaaagttgataaattctgtccatttgcagtcatagtgttgtatagtaccttatttagagttgtgagtatttatctgttatagaagaactgccgtatacatccttaagtcacggtaggaaatattccaaattagaacatccactccagaagcttaaagtttccccaaataaatcttataatagcatcacgttgccaaggtccccagaaatctctgtggaaggttagcaccctgtatcccagcaaatcaacaatgtggctttcctgtctctgactttaggcctcatttgatgacttgcaggttcccaaaaggcctcacccctgatattaagccaaagaccacagacaacaaggtcttcttgattctatagtcttgtatcttcattctactctaaataattagctctgtgtgtgtgtgtgtagtgtgtgtgtagtgtgtgtgtgtgcgggtgtgtgtgcctatgccctttgaattgtcatcaggtgacctggggaccagggaaggttgacctgaacatgggagtctgcccacatatccctttcacagacgtccccttctcaatacttctatggctgtattggaaagcctggcaaaaatggctctgccattaccttcctgcgtggcctttagcaagacactccgcttttctgggcctgtttcctctacagatacagaatagggcaattagactaagtgtggataggaaaggatgagcagctgggaaggaatctctgttaccctcttcctccggcttgctttctctaatggtcagatagatttctagcccccaactcctactcaggagactcacagaaggatgttcagggatttctgtgttttccattcttatttctaaggccttgaagggcccaaatttggggaccctgtactaggtacattattctccattctccaccctccactgtcctgccttttgtcttggaagccaacttctacagactatataatcagggcatgttcaccctctggctttgactgggtttggccagtgggagacaatggcaagaaggattggaggattggaggagaaaaaagtggaagtcatactctcccagtgcctccctgtgtttctggcagtggtggcatcatgtgattgcaacaccagttgggcagcccctctccctcacttcctgctgtcactggttttcatcacaaaattccctccctttctctgctctggtccaggagtgctagaaaggctttttgcttttgccagtccctaattagttccctctgccctgcacacaaccttgtgaatagttcttccagtaaaccattttcagtagacccttggaacgtgctttctctttcctttcatatctaactgatacacactcttgctatttttcttccaactttcagaattagggttctaactgtcccagctgtggaaaggttcatctggaagacctagagttttgagggacaaagcaagggtctcttttctgttgctgggcacctgcctccagttgcatacaccttctctgatccttggtgcgaatgagtaaggggaaagtcatctaatgctactgggtgacatattttaccaaacactcttctattgctcactataattatgtgaattgtgtataagctgcgttcctctcataatttatttcatttttgggtggcagacttccaaattccctctcttttattcatgcataacacatgaatgattcacaagtggtaaagtcaacagggccccttccgcttcagtccccatctgtaaaaatggtttatcaacctcatgttgaggttcagagttggtataatatcaaccctcatattaagggttggtgtgaggactaaatgagtaccatctgtaaatccttagagcagcaggtgcaaagtgctagcccacaccatgagtatttgctcatctgattcatctcggccccctttcctacaatttatatgtaggaagggggaaaaggggacttcggtaggaatttctaagtgctccctccagcttccggggttttccgcagcaccccttcctctctcaacacccatttctgagtagatttccttttccgcaaccttttcatcccaggaagttccaggaagggcaagaagggcaattgcgattctcacgttttctgctcttaattctaaaccagtgattgtcaaatagaggcctagggagccccactgaccacagaaagtgggttttgctctaggttatatctttgttattgctcttatctgtttaagtttcaagattctgtttgaacaatggtttccaagtctttaaaaagtcgaaaatcccccttctgatgagatacagaaaccccagactttaaaactctcagtcttaaacctctttggcaccattgccaagaaacttttctctattccattcaaatagtttgtattctttgccatttctgatgctctgaaacagatattcaaacaagcaagtctttatgtatttatctggagtgtctttctcaagcactcagcatgttcagtagacatttgtctccttaatttctaggcccatgggaaagataactacaacactgtttaacaacagagacatttgaaggtacaaaactttactggaacctgatccagccgctgcagtacttccaacccatagaatccagcgttactagaggaccgtccattctggttccagaggctgctaggagcgagaaaagttggagagcagaagctgtacagggactgagtcccggggaggagtacccagcaactggaattggctgcgtcatggggaggagagttagcaaggtactaacactccaattggctaacacataatttctctatgcagcttaagacttcaggcagacagatatgaacacatgaagggagtaaaaactccaacctctggaccacttcctggagtgctcctaacccagactcccacagggcttcctcccatacttcatttaggtctttggctcaaatgttacctctttagaactgcctcaagactggggcaagaggagccccagtctagggctctgagcacctgattctcttccgtccatgttcctttccatagggcaagaaatcccacgggccaacgggatgtactcactcagagctcttgcccctctcctttttagagcatactgtgagttcctgggaccctagaaaatagtgccgcaatagcaacaggtcaccagctacaggctgcctcagccttttcccaaggtctatcctcctgaggagcaaggggtggtcaaggggaggctatttgcaggtgtggacaaaactctgatgtgcagatgtcgttgttataggtgtgggcaaaaggccatttgaagtatgggacagagctggggtgccaagagaagaaggaaggctgagggccaaggacatgttccccctccaaagcactacattcgagggcgtatctcagaagggtccaagaatcctaaacttaaatgtggccttccagattatgatgaaggtatacatgtcaagataaaaggataggaattttacatcaccgtttaatttgtagttttaaaatatgtagacatgatatgtgggcctccatttgtactactgactcagttcttgcaaatattaagggtagacctgtccctgatcttcgtgtgtaaaatagcacctcctctgccactctattcttaccccagtctacatttcttcataacatcggtcaccatctgatctacatttacttatgtatcatctctttacccccactggaatgtaagttccacgtccctagagtctatattttgtttactgccttatccttatacctaaacaagtgcctggcatgacaccactcagtaaaacttgaataaatgaataacaaatctaggctcaaagctcttacaggtgaaaggggctaacctggcagtcacaaaggaaaaatatcactgtgacaaccgtctgaggagcaccttctccccttaaaataactcactcaaaacagtggagctgcaaaggtgaccagagaaaatccattaacaccttagtgcccatgacaccaggtgagttgatcgggctacttgcgagagggacatgtgagtgagcgtggagagctctgagtaggctgaagagctggatgtgggggatctgggctgctgggaaccccgaatgttggaatcgccctgacaaccttatgagggtggtcagatatgggtcctgaggaaactgattccacggcaactgcccgccaacccagcacaccccacagtgaagaggggcttctgatccatgagtagggcccctcaaatgatgttcccctttagatggtcatggtcatcagcaggggtgggtgcatcgatcctgtggggtcttggtggtcgcagaccaagcgtccctcttctcacatctaattcacaacgtctcatcgctccgcgggagcccaggaactgccctacaacagccgaaatccgggtcgtctattccaacggactcctcttccgttggatacgggggccgtgagaggccaaacaacctccgcgaggctacccccgcagcgaccgctcggcgggcgctccattcctttaccggactgtacacctcgcctcctggggcctgaggcgggaacccgggtcgcgctgctccgaggcctcggcggaccgcgaaaggatggctcaccacccggccagggccagcccctgcaacaagctcagccccgcccgctcccgcgcccaggagcggccggcggggcggggtggctgggccggcctcgggggcgggggctcgggggcgggggctcaggggcggggccacgtggctcctccttgcgggcggaggcaggcggtgccgcggcgccgggacccgactcatccggtgcttgcgtgtggtggtgagcgcagcgccgaggatgaggaggtgcaacagcggctccgggccgccgccgtcgctgctgctgctgctgctgtggctgctcgcggttcccggcgctaacgcggccccgcggtcggcgctctattcgccttccgacccgctgacgctgctgcaggcggacacggtgcgcggcgcggtgctgggctcccgcagcgcctgggccgtggagttcttcgcctcctggtgcggccactgcatcgccttcgccccgacgtggaaggcgctggccgaagacgtcaaaggtgagaagcgggggcggcccgctcccccgtgccccgccgcccggacccctccacctgcccggtgggcagcctcctactccgggagcgcgtccctcttccagtcacctccgcccacctcttcctctccgcgcatcccacgcccaccaccttcatgtttctcagctccatttttgcctcccgctcccttgccttttcctcttggccctcatcccgagcttctttccctctccgcggcctgggcccccagacctgccctgctcgcccggttcgtcccccgccaggttactgcctccttccctgcgagaggtctcctttgttccttcctccgcatggtccgctgacaccttaccgtttcctgggccagccttgtggcagtcctcttcctctcgtccagggacccatgtcatcttcctgccaggttccctagctgctgtgggtcagtgctggggagaaaagggaacggacatccattttgcctccctgccacctttctccactccctcgactggttgaccaggtggtacatagacttcctttctcatttttgtctttgatgtgggtatgtccacctggcagttttcctatctctgttccgggcctctcctgacctgccgcctccagctccttagcttctgggccacatccttctctctcttcccccgctcagacccttatattttaaacccatgcacccagaggcctttggtgcgtgtttggctcttgctccatg

SEQ ID NO: 1554 - DNA, 6000 bp, Homo sapiens
acaggaatagtcatcagtatagtgaaaaagaaatactaatgtaaacggattccttatttactagatgaaaaatggctttcttcagacttttaaaaaagactttgtgactattatcatatagatatttaaaattttatattttgttaacttaatatacccaaatttcaaaaaagtagtcaataggacacttgacactccaatggtttggcaaaattccagggacagaaattaaaatctcagtcaaaaaaaacaccaaaaaagaaattcctagctttaactcatagacaatatgccaactatgtaacctattttataagaaagtatttatatcacctattctcccctggtattccatgcacaaaaagagtgtagcagcaggaacacacaacaattcccttactcagacctcatacttacagtcctttaccttacagacctaatagctacaacattctatccaaggtatttcaatatacattagtatttttttaggaaaaaaaaaaaaaacttcatgatgctcctgttgttgctttatgaagggcatctagatgtttttgtaaagagggggctattaaatttaagcaggacctgcctgcattggaagaatcacatactccatatcatatacttggcatatacttggtacaaatttaagacagaaccatggaattacactaactggaattatcaatacaaggattggtaaaattattaacttagctataatacatgtcaagtattaggtttaacctgtgattcatttctgaccaaaacactcattttctctcagcttctgggtatgaaaattacattctcaaaaattaatcataatttttaaatctcagatcatatcaggggttaaggagtatagtacaaaatctcatgaggtcatattttcattctgttaaaagaatatttcaccaactaaataggacaaaaaaattttttaaagacaggcattatacttctttaaatatattcaacaactagggtaataaaagttttcattttttccaattactcatcaccatatagcatgtaacttcctgattttttccttttttttttttaactaacccacctatttaacatttcataaggtaaacgataggtttacagctcttagaaatttggaaactaaaatatcttactaactgaaaaaagcaaagcacagaataatacatagaatgatacttttgtgtttttaaaagcaagtatcttggttcctaaatttcctatttttatttatttatttctttatttttaatttattttttttttttaagaggcagggtctccctctgtcacccaggctagagggccgtggcaccatcatggctcactgtagcctcaaagtccctgggctcaagcaatcctcccacttcaactgactgagtagacggggctacaggtgcatgccaccatgcgtaggtaatttttttttaatatatttttgtacagacggggtctagctatgctgccaaagctggtcttgaactcctgggcccaagcaagcctccttccttggccttccaaactgctgtgattacaagcgtgagccacagcatccaatggctttcacatttctaaagcttaagtaggtgagttattttatataaatatttttagttaataggaataggaattaataacttttattaataatggttagcatagagtgggagcagaagggagaagtatgacaggggaaatttttactcttcataatttaagacacgcaagatatataatacaagaatctcagatacattatgcaagaaacttgtattttttctttgccttcttctataaacttttaaaaaaatatagaaagttcataaattatctggaaaacctccaccactaatctgttcaatcaatctctccagtagagggcatggtaggttcaacacagaaaatgtatggttaggttatcagccactctcaaactgaggttttgttgtgcaacttttacaacccactgcattgtttcttcctctaccacaggatggaaaatatgtgtcatctttatgtggagcaattctgtttacctaaaagccagttgcaacaacaaaaagggaagtcatcaaagattccagcttttgttttacctatatatacgtaaatatatgtaatgcatatgtaaatatacatgtaatacatattacatatatgcgtgaaatatatgatgtatatattcatgtcacatatattacatgtatatgtaaatatacatatattggcctgtcttttaaaagacattaacatggcaagtttttgaggaaaaggtttctatagcaggtactgccttaactcttaaaattacatatagatacaaaaattacaagttgatttatatccagatttattaaccaaccacataattttcagagaaaaattaattttctgccacctaacatcagtcactgatctggaagggtttatgaaaaaagcaaagaattatattaaacacaaaaacatcaagaataatctatatttaaaccagttgcttatgcaggtacatgtatattcactttcattaatatattgagatgattaaacttccttggcttggagatatctgaaaagtgtaattaattattattattattttaagagacagggtctcactctatcactcaggttggagtgcaatggcacaatcatagctcactgtaacttgaatgcttgaacctcgaacttctgagctcaagccttccacctgcctcagcctcccaaagtgctgggatttccagcatgaaccacaatacccagcctgaaaagtttaaatgttaatcagtttccttatttttcctacgtattatccagtgagcatttattaaatatctataatgagcttaatcttctacaaatttgtgtatcttgtgtatttgtgtacctacaaattgaaacatcttgatatttaatagtacctacatatttataacctaattacgtctgagttaatcctcgtacgattttttccatcttgaacagctatgatttgaacatttccttttgccacacatatgcaaatcagtaataaacttccgtacagtactttagagcttagaaaagacctttcatgtaagagtcacataatatcctatgaggctggcaagaaaatacatgttactcttattacagatgagaaactgggactcaaagaggtgtgaagctagtgtcccaacagttacttagcatttactggataagcccaggctctaactgggtctcctgacagaagtccagctctctctctctgctgcctctttgtcagaactcctggcctgccagcgaatttaactgtctatgagtaaattctaacatctaaggttctaagtataaaatatattgaggtttacagtggtgagaaaaagcaagtgtctgcgtattacagacagctgataaatacgtattgagtcatcagaaagtgaaaatagatgtaggactattatgcaaagcataggagaggaagagcatatgcttaagaaaaaatggcattcctagagttaacaagcatgtttcaaagtatctattactgaaatctacacgattttcctttccacaataaagtccacaactgttgtcttaaataataactgcaggttttgccctccaagtcaaacttggagctccaactactggcagctcaccgtaagaatatattaattatttccaatttccttttaagaagtcgaatacaaagtagagagaatatctgcagcttggttgcaaagccgcttaaacatttcactggctagttctggtaatattatccgaaatcaactcattttgtggttgaggtaatctatttgtctttaccaatcaagtcgttttaaaaccttcaggagtagagatgatacttgaagaattaacaaataaaacttaatcaaggaaactgttaactcattctcccccctactttttgccagttattaaatgttctggtaaatcctaactcaacaagaatgactcatgaggaaatcctgactccttgaactcactgattctggtgcattacagctatgaaatctctatgtctgcagctttctctcccaccataaggaaatctgtgatttctattttggcaggagatgtgaccaaggactcctgaggaatgaccctatagacagacccagccacgtgcctagtagtgatcaaaaatgcaaacccaattaaagcactgtcttctgataaagtcactttctcttgttcaatccctaatgttcattctcaaagtgttccaagacgccccagcaagctgcagagcagatcccaccctgcccctgggcaatcaacgtttcaggttactccttccttaagttaagtggcagagagaaacgggcgagggtctccccattgcctcagttcacagaccagggggtgtcgaatgagtcctacagcaggacagcaaacaagaaatgaggcgcggggtcagggaacgcgctcaaaaaaggaagaaaaatcccactcttcattcgaaatcaggccactgcactccggcctcgtggcgggcgacctcctcctgccagggaatcgccgctctggcctcgggctggggagcccgtcagggtgggtgagggagcgccggcgcccccgccgggccgccgccaacttcggctccctccctccgtcgcaaagccctcgagcccgcccggccgccacgcttcagcaaaaggtcgtgcgcagcggcccacactgaagactctccatctgctcccacacctgccccagctggccgctgctatgtggcccgagtgcgcaagaagccggggccgcagacgtcagcagcgccccggcttcgagacccttcggcagcagccgtgactgccgccggcgggcgctgacccatccccgtgccagtctgcagccgaccaatccgcgtcctcttgaggcggggccggagccgcgaggccccgcccccaagccgaggcctcataaatgctgcgacgcacgcccagccgcaaacagccggggctccagcgggagaacgataatgcaaagtgctatgttcttggctgttcaacacgactgcagacccatggacaagagcgcaggcagtggccacaagagcgaggagaagcgagaaaagatgaaacggaccctgtgagtatggctttcttccctctcccgccaccccctgccccacactgcaagctgcaaacgcggtactttcgggctcgcctttgacgttaggaaactagcctgagcctatgcagggaaaaaaaatcgaaaaggtcaatttgttaagtaaggttaaatctgggtgatgctcgggtacagtttaagaaccgagggagacagttgatatgagggcggtggttgatgcgctaagaaattgcgggttggctttttgtcctcctgcattcaaaatgacatcagaatcctgcggctgaagcgcgtccccagcattcatacgttgcatgatgagttctcatcagcttacacagctactggaaggtgatgctcttgctggttctgaatatactcgtttaaaatccatttttgttttttaattatagagcagatctcacccagtccgaatgtggaacaaataattgttatgcagcgtctgcttaaaagaagtgtcgtaggtggggaaggaagagcgcaggggaatcagtcacccacctctttgtacagtctctggcgtggtccagaacctcctgctctaaagagagaagcgtgggccggctccagacagttccatgtctgtccttttcattaaagtgcaaaacgtctcggaattgtaattaaccttgcaaacaaactgatgccctttgtgagccagaaatagtgtctgccttttgaactaaattcattaacaattctttaaaataccctagtgattataggtagccctgcccttagttgtaaaactagtagatacggtcagattaatggacgaaactgctcagtacatgaggtttaaatgttaggtggataagacttatttgaagagttcttgctttgccttatgcggtttgtctctagtta

SEQ ID NO: 1555 - DNA, 6000 bp, Homo sapiens
tactaaaaatacaaaaaattagttgggtgtggtggtgcacacctgtaatcccagctgctcgggaggctgaggcaggagaatcatttgaacccgagagacggaggctgcagtgagccaagattgtgccattacactccagctgggcgacagagtgagactccacctcaaaaagaaagaaagaaagaaagagagagagagagagggagagagaaagaaagaaggaaagaaagaggaagaaagaaagaaagagaaagaaagaaggaaagaaggaaagaaaggaaagaaagaaagaaggaaagaaaaagaaagaaagaaagactgacaaaatacaaccatataaaatgctcaattaaaaccacaaacagctgggcgcagtggctcaggcctgtaatcccagcattttgggaggctgaagcaggaggatttcttgagcctaggaatctgataccagcctaaaaaataaagtgggtccctgtctctataaaaaatttaaaaattagctcggtgtggtggtgtacacctgtagtctcagccgctctagaggtttcagtgggaggatcacttgagcccaggagtttgaagccgccgtgagctatgatcacaccattaggttccagcctggattacagagcaagaccctgtctctctctctctctctctctctcacacacacacacacacacacgcacacacacaggagaaaaactgtggcagatataaataggaacagagaacaagggcaacaaatagaaagcaataacaaatacggtagatattaatccaactttatcaataataactttgaacatcaatggtctaactgcaccaattaaaagagattgtcagagtggttcaaaatatgagacccaactctatgttatccacaaaatcccactttaaatgtaaacacgcatatagataaaaagtaaatgaatggagaaaaatacatcatgctaacaccaataaaaaaaagtaggattagctattttaatttcagacagagcagacttcaaaacaaggaaagtttgttggaataaagaagagcattatgtaatgataaggggtcaattctccaataagacagaacaatgcttaatgtgtacgtgcttaacaacagagcgtcaaattatataaggcaaaaaactgatggaactacaaggaaaaatatatgaatccattattatagtggaagatttcaacacccctgtatcagatatgaacagaaccagcaggcagaaaatcaataaggatgtaattgaactcaaccacaccatcagtcatcttgatatagttgacatctatagactattcaacaacaacagaataaacattcttcctaaacatgcaaggaacattcgccatgacagaccacattttgggccatagaagacacttttgtaaatttaaaattatataaagcatacaatatctactctcagaccacaatgaaactaaactagaaatcaataataggaagatagcgagaaaattctaaaatatgtcgagtttaaacaatacatttctaaataacatgagtcaaagaagaaatctcaagataaattttaaaatattttgagctgcaagaaaataaaaacataacttaccaaagtgtatgggaggaagcgaagtagtgtttagagggaaatttgtagcattgaatgtatatattagaaaagaagaaagacctaaaaatcaataatctaaacttctacctcaggaaactagaaaaagaagagcaaattaaatctaaagtaagcaaaagaagagaaataataaaagttaagcataaactggtaaaactgaaagtaaaaaaatcagtaatcacaccaaaagctggttctttgaaaagatcaatgaaatcaatgaacctcttagtcacgctaagaagagagaagacacaaattactaaaatcagaaataaaagaggggacatttctacagatgacatgaacattaaaaggataataacaaatgctgtgaacaactatatcccactaatttcataacctagataaaatggaaccccttgaaagacacaatctgccaaaactcacacaagaagaaatggacaatctgaataaacctatatatatcaaagacatcaagtaaataattaacccataattaagtacccaacccataataattccctggaataaactatgactatgtctgggttgttgtttgcttactctctggatggactgaggcttttccttgctagggagctataactccacacactgatttcccccaaactttaggaaaagtaaagagaactaacagagtcctaaaactaaaattatcaacagtttcgaaaaacaaatttcatggcccttcaaattgccattagtcatgattgattgatgacaataaatcaaccccttctgggacccacagattatctcttcttgaattaacagcctccccctacccatgtatttgaaaattttacttccaatcctacgttctaccattacagagtaatataaataaatgcttcatgagacttatgctacctgccgaattatccctagtaggttcaagtgcatttccaaaatacttacctaagcagactttgattgatctaaaacctggcaatttggtcctttggaaaaggaaccagaataaaactgtccttgggcactggtggaaagaaccttattgggtactgttagcaattgaggtagtggtttaaactccaaggtaatgatgttggatccatcgtttccaactaaaaagacataccactttcttctgattgctgggcatttactctaacagaagacataaaactaaagattttttaggaattcttcaggagctaatatctggagatgtggactgcttttgcccaagacaaagaaaccagactatttttctgtttttttctaattaattttctaatttttcagctctaccactaatcttgccttttattgtattttgacatcctccaatgaaccagtattggtagggcaattataagggtacttagataaaaacaaaaatgatctacaattgcttctgtagacacagggtctaggtatgttgcccaggctggtcaggaaaaaaatgatctacaaatttcaatgctttaactgttaaaagcaacaacttactaatgacttatcttaccactttttaaaattcattaacctaaaaaacataatttctctgaaaagagagactttaatcattatttgagtatgaaataaaattaagtatcgtttgaagggactatagtcgagcctcctaatcatgaaatcttggcttccttgagcttatctttccattcattacttcaacatttattagaagcctctatccatgtattaactcgatatttactaggagcttccatcaatttattgaattcatccatttattactaatatgtaccaaataatgttagacagtaggatatgaggacacagatctatggtgtttcagttttgtggatgcaggcaaataaactataaagggaagtaatatggtactgagtgctctgacacaggtatgaatagagaatgtggggataggtaattgtagccatttctttataatgtgtgtgcttggggtgagattcaggagaatactacggggtgaaaacattggtggaacagaaaaaaatttcacaaactaacagttgcagaatggctacagatcatatcggaaatgaaccacacacttctgtatctgtagtcctctgcgttgtgaaaagattgacttttttcaaaacaggtcaaggaatttggttatgtcaaacacaaagttgcctcttttttccttctgacatggtaaaagaaaaaaaacaatcccataggatgtgtttggttggccatagtatattgaacttatcttaaccgtctcaaaacgcatgtcaaggacaccactgagacttctgagtaccatttaaaaaattgggtagtctggaagtgttctaaattggaccgtttggggtttctgttagggcaactttcccatttacatcttggaacacagccttttgaatatagcccttcgggattggcggggagaagggaccgcgatggaaaaagtcatcatccaaagaatgaagagggaggatccaacatttaggatattttattgacttgctaggcgcgtttaccttatcttcgtattaaccccattttcttcattaaccaattgatgctgtgagaagctatgtaacttgacgagcagtgcccagaactgtttttttttttttctggactcggtcttttccactcaaaaccaacaaaaaaccaaaactcgttcttttccacatcaaaagcaaacaaaaaaccccaaccccaaccccaagagccccactctttcaaaagggcttctccggatcactaagtcctagaggtctttggctaggcctgggtccgatctaaataggaaggtaattctagtgttccgcaaatccttgccgaattccatcccggccaaagcagggacccgggggagcctctggtcgcacccgagacagttcgttaaatactcagtgcacgtgctggggatggaagtgctgacccactgctcaggtacgcgcgcacctgacgccgcttggtgcgcgccgcggggtactgggtacgtgctccgcgcgcgcgcgcccggcaaagttccccgtacgtgcgccgtacgtgggcgcggtgccccagcgctcagcgtttcagcgagtgagtgggctccgtgcccagctgaagtctgggaggggcacttttccaggcggtcgcggctccccctggcggcggatgtgcctcgctggaggggcgcagtcaggcgttctccgcgggcagccggcggcggggccttgccttacagcgcggggtcctcggcggcctgggtggctactgcccctgctgctgtcgtaggcgaggacggctgttagtgctgctgctgttggttcgtcgcggcggcgaaggaggaggaggaagagggcgaggcgacaagagaagaaggaggcaggcgcggcggcagcggcggcgccccgagccggcggaggcgaggggggggaagatggcggacgtgcttagcgtcctgcgacagtacaacatccagaagaaggagattgtggtgaagggagacgaagtgatcttcggggagttctcctggcccaagaatgtgaagaccaactatgttgtttgggggtaagtccggcatggctgtggcccaggggtggcagggcagagttgggcgcccccaggcgacctctttcttaacccctccccccgtttcccctggggatgggataaaacgggtgttcggggaaaagaaagtttctctctagagcagaagttgcacttttagggtaaggaaagaaggggcggagctctagagcagttcatcacttaaaatttttgagaagcccaaaggaaaggtaccgtgggagtttctgacttttacagttaatttttatcagtaggtatgtgtaccagcgaagtgtgggactggtgcgcaagggatacctgaacataggtgcacaaaggagcacaccgtctggtgccgtagacgcctctttttgttctttattttttttttctcttttccaggctgctatgtaactatctccgctggtctttgcaactcctggtttatttcatctcctttcattgttggggtgggggtgattcctgtagaagagaaaagggaatcaaccctgaagttaggaccggaaagaaatttggtgaatttggaagagtcataaaagtctgtgttagagaggtcttcaggagttggtgaaatgagtgagctttacagatctaagaaatagatggtgcgtgtgatttttcggaagtgtattttaaagggaaatgtttgggaatgttggtccatgtgaagttttatcagtttaagtcattcaggaaaacttctagagacggctctaacagtcattaggggcctttttaatgatgtcactgtcattggtgcatcgcttctagaattagaaccttgagctacaacttccctactcattttgtttctttgaat

SEQ ID NO: 1556 - DNA, 6000 bp, Homo sapiens
tttgccaaaaaaaaaaaaaaaaaaaaaagccaatgggtcagattcagcccttaggccatagtttgctgatccctggattaggtaatagttgataataaacagtttgtatcacagtcacttatagtcctttgatgaggcattcagtctctaccatacctaatagcataattaggatctgtttttcaaatgatagatgattttctgcagaggaaggcatagtcttattctccaaacctggaattttgtactgtgatacttctctggaaacttgccagagcttctattccacatcttggattgtcatggaatgagtgttttgggccattgcagcccagacctactgcagagatcttacttgttccaggcctaactcaaaaatgtcagtcttagagtttactaggtaaatggtttggtgagatgtgtcttaataatgcatgcattgcctccaaaatctaaagaggctttacaaatgatacaaagtacaagttgcctcttattttagaagagatagcctgacatgtctcagaccattggatccctaaaaactttacagatgtgataggaccctgaactttgtcccatctggtttacatttgttttattattggcatccacagtgcttgctcctgttgagagatgcaacttaccatgggctctgagcaggcctacacattcttgctggctatgctaagaatgtgaagcccttattaatttctacataggccatttctcaggattgtgtttgcagaaatcttgagggacgataggatgtctccctgcccaggcatagtactataaaaacagtcaaatctccaattcgctcttcctttcctgtaatacaacccactgtgtgtgcaggcatccatcaagggccctttgtatggtcccatgagacttaggaagcaggaggaatcaatgtgaatgaacatgctgacactctagctactgttttttctgtgaataataaagtcttgtctctaacccaaaactgtcatattttctgctggcctttatgaaactggcacgctaactctttagcttgcaagagggataaaatctcagactcacacaattcttgacaagtacttcttgctcaccaggtttaattagcaaatgtcatcaatataatggaccagtgtgatactaagatccaggtctctctgaacaatattacagtataggtaggaaatttgacgagccctgaggcaggacagtaatgctacagcattgtaccactacttaagtacaaagtgcttcggtttttcaatactggatgaatggggaaaaacaagaaaaatgcattttgcttgattcatagctgcaaaccagctgacaaaggtatgttgatttgtgtataaaaataacacatctgaaactgtagtgtaataattggcatcatcacctaattgctataatctactatcattttccagaatctatctggcttttgcactggccaaataagtggagaaagtgggtatatggacaaaatcactatcccaacatctctcaggtattcagaataatctctgaattgccgtggtgggaaaatggtgattttcaggggcttccacttggccctttctccaataattgcccttgttccttggatctaggaaccagtgtgagaatgtggtcagtaagtgttcctattttatattctggaaatgggtggatccaaaggacacttggtaagacagattctgacttagatgccatctgtcaccggttcttgagaagctctcactatgtctggtggtccacagtgacattttaggattctggagtatagcagaaaggcagagctattatctcattatctaataacccttaggaagtcaagttcctgcccccaatccatattcatgtgggtaaatgactgcagttccctctggggaattgttgagagaagatttatggtattcgtgttgcagggttctttctagtcaaggagctttgggtgtatgaactgtcttaagtttggaaagtgggtaaaaggcataactgccacaacattggcttcagttaggttttttgctttgcatatgtggtatttctctgcctatatatgttaggcagcaccatagtatatagctcatcttatttatagggcccttgagaaactggccattgccacagatccctgcctctaattacaattctgccattagcatattgtggtaagaactataccaccttgtctattaagtgccaatcgactttgaccacttgtggatcatataattcacatggagatcagagaacctattttcattattgatcctctatcatcatttctggcctataaaaaatagtcacccaggtcttttcatggatgctggagtcctttttattagttaatgcatttatcaacaccttggtaaaaggagaatgggtggagggtgtgcatgtttagatgtgacttggccaagcaggttgcacatgtagattttctccaacattcctatcttcctgagcttttggactccttcgtgtacagaatgccaggtagtttgagcattttgacctaactgcctgttttgtttttgtttttataaagaccatgtctcactttgttgctggtttttaactcctgggctcaagcgatcttcctgtctcagcctcccaaagtgctggaattacaggcatgagctaccgtgcctggccttgacctacctgactgtaaaccactactgagttcagttttcaattagtgaacctattaaactattaaagccattcccaggtacttcggacattgtattaattaaatgggtaaagtgcacccatgacaataaatttggccttattgttccttatgatttgtcctcttggtctaacaccattacattccaccttagactgtcaaaatcttttaactctttgctgtataggctgtttcctccctcccacagcatatcttgcactctcctccgtccaagttttattttttggagcctaactaagctaatggagaggtcgtggggggtagatgctgaggagaactggaaatgacttgtgaggctctgctccagggttttgttttgttgtttttttttttaagcctctatgaaagaattttttttttttttttttttttttttgacagcgtcttgctctcttgcccaagctggagttcagtgccatgatctcggctcactgcaaccttgcccccaccccccaccccaggttcaagcgattcttctgtctcagcctccggggtaggtgggattacaggcatgctccaccacgcctggctaatttttttatttttagtggagacggcatttcgccatgttggccaggctggtctcaaacccctgacctcaagaatccgcctgcctcagcctcccaaagtgctgggttacaggcttgagccaccgtgcccagtggaaaaatttcgtttaaatattgttaaggtccaacttcaggtgaaattggacaccattgaatataatttcatgtctcatcttccttattttgatttcccattgacttctctttttacatgttttgtgtaaccatacatacatccagacattatttttattttttaagttttctactgcctttagaggcaatatagtgtagtgggtaagagcaagactagggccaaactgctgggattacaggcatgtgtacctatctgggttatgccacttcctacttagctgtatgacctgtattcctcatctgtaagatacaaataatggtacctacgccctaagagatacctcgtaggtttaaggcaaaggttgagataaataggtaaaggatttttaaaaaatccctagcctagggtcgggcgccgctcaggcctgtaatcccagcactttgggaggccgaggcggaggcaggcggatcacttgaggccaggagttccagaccagcctggccaacatggcgaactcccctctctaccaaaaatacaaaaattagccagtcgtggtgaggcgcgcctctaattccagctacttgggaggctgaggcaggagaatcgcttgaacccgggaggcggaggttgcagtgaaccaagatcacgtcactgcactccagcctgggagacagagcgagactccatctcaaaataaataaataatttaaaaaatccctaatatgtaagctataattattattagatccctacaattgaaataaaaactaataagatatttgtgaagggcattgccagtcaaaacaatcatttatgaattactggtaatctcaggtttcatttgtttacctggttttgctcccagcgtcccgaggtaattaacagcatgtaaatgtactgagtccctgctatgttgtcactaaaataagcatgttcatacaaactaattatctttacatctctaccattcagccctggaaaccgcgacagtaaagttaatataattctgggcggggtatgcatatgagaggagtggcataaaccaatttttgcctacgtaacagttttatctatgattgttcctggaaaccgcaatgattactacatgtattgtggaaatgctgtgactcccttcccttcagcacaaccaaaaatataaagacgaatttcaattctaagccccgggttttagacggtggccaggattccgctaccgttctcacctcctccgcagatagcgattggcggccggatgcaatcattcaaatgaagcgccgccgtctcattggccaggggatgctgctcaccgattggtcccgtgacgaggagggcggtgcccggaggtcctcattggtggaggcggcaagtttaaacagagtcaaaacgccatacttgtttggctcctctttttaatttgcgagtttattgggcttgttttctgttttctagggagtaggttagtggaaaagaaaaagggccgaattcactcccacgacctctacagccgcccctgaggggaagcggtcagcgtaagtcccggatccccgctccggagccgcctcgtgggagcggggcaaggagatccaggaggggtctcgaatctgccatggcgaaccggcgagtggggcgaggctgctgggaagtgagcccgaccgagcggaggccgcccgcggggctgcggggccccgcggccgaggaggaggcgtcttccccgccggtcctgtctctcagccacttctgcaggtctcctttcctttgcttcggggacgttctcctgggagcctcacggacgctgtctctggccctagacaaccctaacgaggaggtggcagaagtgaagatctcccacttcccggccgcggacctgggcttcagtgtgtcgcagcgctgtttcgtgttgcaggtaggtctcaggaggagcgtgctccaggccggtgttctgcttctccgctatctttcctgccaccctcctcaggaaggttgacgattggagaagaaatcagaaaagacccttagagaataaagtcagttccctttcactcaataactgtgggtggctcttggaaaagaaatcagaaaagacccttagagagtgaagtcagttccttttcaataactgtgggtgggcccttgacgcatacacatgtgtgtgagtatatatatatgtgtcaatattatatatatatatatatatatattctctaattgaaggctaggatagacgctaacttgggcggggacaacacataaacgcgcgcgcacttagcatctttaggagcaagttatatagacttctctgttaaattgacaagcacttttactagacttaaggcgttgtgaaatagccttgccgttctaaattaatagacaatgcacttttttaacacttttttaagattgacaggagtaccttggttggttaaagcagctttttttaaaatttctatcagccatcttaatatgcattttagtttccatatgtacccttagagtcgaggtaactggtttttttttccggtgaaatagtgagctttgttctggctaaatgcctacaataaaaaccaaaaaaacctattcagagttgttttcaatatatacgtgtagta

SEQ ID NO: 1557 - DNA, 6000 bp, Homo sapiens
ctgttttggttactgtagccttgtagtatagtttgaagtcaggtagtgtgatgcctccagctttgttcttttcgcttaggattgacttggcgatgcgggctcttttttggttccatatgaactttgaagtagttttttccaattctgtgaagaaagtcattggtagcttgatgggaatggcattgaatctataaattaccttggacagtatggccattttcacgatattgattcttcctacccacgagcatggaatgttcttccatttgtttgtatcctcttttatttccttgagcagtggtttgtagttctccttgaagaggtccttcacatcccttgtaagttggattcctaggtattttattctctttgaagcaattgtgaatgggagttcactcatgatttggctctctgtttgtctgttgttggtgtataagaatgcttgtgatttttgtacattgattttgtatcctgagactttgctaagttgcttatcagcttgaggagattttggcctgagacattgggtttttgtagatatacaatcatgtcatctgcaaacagggacaatttgacttcctcttttcctaattgaataccctttatttccttctcctgcctaattgccctggccagtgcttccaacactatgttgaataggagtggtgagagagggcatccctgtcttgtgcccgttttcaaagggaatgcttccagtttttgcccattcagtatgatattggctgtgggtttgtcatagatagctcttattattttgagatatgtcccatcaatacctaatttattgagagtttttagcatgaagggttattgaattttgtcaaaggccttttctgcatctattgagataatcatgtggtttttctgtttggttctgtttatatgctggattacattgattgatttgtgtatgttgaaccagccttgcatcccagggatgaagcccacttgatcatggtggataagctttttgatgtgctgctggattcggtttgccagtattttattgaggatttttgcatcaatgttcatcaaggatattggtctaaaattcccttttttggttgtgtctctgcccggctttggtatcaggatgatgctggcctcataaaatgagttagggaggattctctctttttctattgattggaatagtttcagaaggaatggtacctgttcctccttgtacctctggtagaattcggctgtaaatccatctggtcctggactctttttggttggtaagctattgattattgccacaatttcagctcctgttattggtttattcagagattcaacttcttcctggtttagtcttgggagagtgtatgtgtcaaggaatttatccatttcttctagattttctagtttatttgcgtagaggtgtttgtagtattctctgatggtagtttgtatttctgtgggatcggtggtgatatcccctttatcattttttattgcatctatttgattcttctctctttttttctttattagtcttgctagcagtctatcaattttgttgatcctttcaaaaaaccagctcctggattcattaattttttgaagggttttttgcgtctctatttccttcagttctgctctgattttagttatttcttgccttgtgctagcttttgaatgtgtttgctcttgcttttctagttcttttaattgtgatgttagggtgtcagttttggatctttcctggtttctcttgtgggcatttagtgctataaattgccctctacacactgctttaaatgagtcccagagattcttgtatgttgtgtctttgttctcgttggtttcaaagaacatctttatttctgccttcatttcgttatgtacccagtagtcattcaggagcaggttgttcagtttccatgtagttgagcgattttgagtgagattcttaatcctgagttctagtttgattgcactgtggtctgagagatagtttgttataatttctgttcttttacatttgctgaggagagctttacttccaagtatgtggtcaattttggaataggtgtggcgtggtgctgaaaaaaatgtattttctgttgatttgggttggagagttctgtagatgtctattaggtccgcttggtgtagagctgagttcaattcctgggtatccttgttgactttctgtctcgttgatctgtctaatgttgacagtggggtgttaaagtctcccattattaatgtgtgggagtctaagtctctttgtaggtcactcaggagttgctttatgaatctgggtgctcctgtattgggtgcatatatatttggaatagttagctcttcttgttgagttgatccctttaccattatgtaatggccttctttgtctcttttgatctttgttggtttaaagtctgttttatcagagactaggattgccacccctccctttttttgttttcgatttgcttggtagatcttcctccatccttttattttgagcctatgtgtgtctctgcatgtgagatgggtttcctgaatacagcacactgatgggtcttgactctttatccaatttgccagtctgtgtcttttaattggagcatttagtccatttacatttaaagttaatattgttatgtgtgaatttgatcctgtcattatgatgttagctggttattttgctcgttagttgatgcagtttcttcctagtctcgatggtctttacattttgggatgattttgcagtggctggtaccggttgttcctttccatgtttagtgcttccttcaggagctcttttagggcaggcctggtggtgacaaaatctctcagcatttgcttgtctgtaaagtattttatttctccttcacttatgaagcttagtttggctggatatgaaattctgggttgaaaattcttttctttaagaatgttgaatattggccccactctcttctggcttgtagagtttctgcctagagatccgctgttagtctgatgggcttccctttgagggtaactcgacctttctctctggctgcccctaacattttttccttcatttcaactttggtgacaattatgtgtcttggagttgctcttctcgaggagtatctttgtggcattctttgtatttcctgaatctgaatgttgacctgccttgctagattggggaagttctcccggataatatcctgcagagtgttttccaacttggttccattctccccgtcactttcaggtacaccaatcagacgtagatttggtcctttcacatagtcccatatttcttggaggctttgctcgtttctttttattcttttttctctaaacttcccttctcgcttcatttcattcatttcatcttccatcgctgataccctttcttccagttgattgcattggctcctgaggcttctgcattcttcacgtagttctcgagccttggttttcagctccatcagctcctttaagcacttctctgtaatggttattctagttatacattcttctaaatttttttcaaagttttcaacttctttgcctttggtttgaatgtcctcccgtagctcggagtaatttgatcgtctgaagtcttcttctctcagcttgtcaaagtcattgtcagtccagctttgttccgttgctggtgaggaactgcattcctttggaggaggagaggcgctctgctttttagagtttccagtttttctgctctgttttttccccatctttgtggttttatctacttttggtctttgatgatggtgatgtacaggtgggtttttggtgtggatgtcgtttctgtttgttagttttccttctaacagacaggaccctcagctgcaagtctgtttgagtacccggccgtgtgaggtgtcagtatgcccctgcaggggggtgcctcccagttaggctgctcaggggtcaggggtcagagacccacttgaggaggcagtctgcccgttctcagatctccagctgcctgctgggagaaccactgctctcttcaaagctgtcagacagggacatttaagtcttcagaggttactgctgtccttttgtttgtctgtgccctgcccccagaggtggagcctacagaggcaggcaggtctccttgagctgtggtgagctccacccagttggtgcttcccggctgctttgtttacctaagcacgcctgggcaatggcgggcgcccctcccccagcctcgccgccaccttgcagtttgatctcaagactgctgtgctagcaatcagggagactccatgggcgtaggaccctccgagccagatgcgggatatagtctcctggtgcgccgtttttttaagcccgtcggaaaagcgcagtattcaggtgggagtgacctgattttccaggtgccgtctgtcacccctttctttgactaggtaagggaactctctgaccccttgcgcttcccgagtgaggcaatgcctcgccctgcttcggctcgcgcatggtgcgcgcacccactgacctgcgcccactgtctggcactccctagtgagatgaacccggtacctcagatggaaatgcagaaatcacccgtcttctgcgtcgcttacgctgggagctgtagactggagctgttcctattcggccatcttggctcctcctccccatctatggtgggccttagcttttctaagaggtatgaggagccattgaaatgcttaaagttgaagcatcacctggctagttaggcagtgctagagaaataggaagacaactgaaagcaaagccgtcagctggaagactatccaagagtgtggcagtggagatggtgtggcaggagcaaacaaaaggtttaaggagcctgagaccaataggactggttgctgacggttaggcaggtgggaaggaagtatgatgagatgtttgatatgaatttcaaatttttgacttaagaagttggaggtgctgttaggaagagctggttggggagaaaaaaatactaatatttcagttttaaacatgtttaatgtgaatatttacgtgcagctctactcagaaggcagttggaagtatgggaacagagcctgcaaagaggtctaggctggagacagataacctgtgttcctcagcatgttggtggttattgaaggcatgggagtaagtgcagttgttgaagataagaaggaagagtgaaacaggaaaagagttaaggaaaggaaaatatttagggcataccaacatttggtagatttttcaaaggaagataaacctccaaaagaaactaggaagaaaacgtcagggaagagaaggtctaggccggaattgaatgatgtaaatccaaaaggatagagctgaccaggatgaaagggattggaaatggtctcagtcaaatcaaacacaaccatactggaggaagggagggagagacacagaaggacagttgtgtgtgcttacatttctgatgtgacacagcattttaagaaacaggctgtgtccttggaagacagagactaaattggtatgaaggtgaagattacagtcaggtaatcaaagagatttatattgattcacatcaaataaatgtgaaagtgacccaagatgagggttgcagtacttggaatggagaaggatactgtcagctgtgtgggtatcgatacctccgtgtacgaggtgcaacaactcatagttaaacagattttagaaaaagaggaaagtaattatttcctcctctgggcagccacacttaatcttttacctttatctcacagatatctcttgagatacctatcactttgtagtttataatagaattatttctgtgatttcctcactttcacatttgtttctttgttctgtctatcttccgctagattgtaggctgtttaagggcctgtgctgtgtatttttcattattgctttatccttactacctaacaaagtgtctggtacataataaatactccattggaaactattgaatgaacaattgaatgaacggatgaaaatggaagagggggcaaaaag

SEQ ID NO: 1558 - DNA, 6000 bp, Homo sapiens
gtgtggccagatcataacgtgaaccaggtggaagtgtattaaatgggttgagaaataatacagaggttggattttattaaaaatgcaaataagaaaaatactgatagattttaagtagggacttatcccagcttgatttgtatggacagaaatcggtttgatttctctttggaggaaatactgaaggaagataagatggaggcttggaagttagtcaaaagcctgaacagtgatgatggtttgattctaagtggtacaattgtaaacagaacacaagatagatggtggagagagtatgaatgggatttgttaatgatttagtagttgtaacaggaaagaagaaataaaaaataaaaattaggcttctgttgcaagttactgtgtgtatactggtgcatttacagatataaataagattgagaattgggatgggtttaaagaaaggatgggtcaagacttctatgttctgttgagttggctctgagacaatctagtagactagttaagaatgtggtagcaaaatgtgaatctagagatctcaaatatatcatagatctgattggaaatataaattcgttagttattcccacgaaggagctcacacagaaagagagaggtgggtacagaattgagcttgtaatgtatcttagtagtacttaaaagttaggtagagactgggcaaggtagcccacacgtctgtaatcccagcactttgggaggctgaggcaggtggatttcttgagtccaggagttcgagaccagcctgggcaacatggcaaaactctgtttctacaaaaaattgagctgggtgtgttggtgtacgcctatagtcccaacttctcaggaggctgaggtgggaggatcgcttgagcactggaggtagaagctgcagtgagccctgatcgcaccactgcagtccagcctgggtaacagagagagaccctggttaaaaaaaaaaaaaaaaaaaaaaagtcgtctgggagcggtggctcacacctgtaaccctagcactttgggaggccaaggtgggcagattgcctgagctcaaggagctcagaccagcctggacaacatggtgaaaccccatctttactaaaatacaaaaagttagctgggcatggtggtgcgtgcctgtagtcccagcttctggggaggctgaggcagaagaatcacttgaacccagcaggcggaggttgcagtgagctgagatcgtgccactgcactccagcctgggcgacagagctgagactgtctcaaagagacaaaaagggcagacagaggaagaggacccaatatggcaactgttgaggaaaagccaataagggttaaggaaatttaaatttgtaggtaatgatgttttggaagctgacaaaacataatggttagagaaggaaagattttgtttaatgctactaagaagtcacataatatgagggtagagaaacaaatgatggtataaaatctggcaacatggagacgattggtaagaaaattcaagaacaatgtttataatgcttcataacttcctcatagctcttagggtaaatacatattcttggaacctgcaaggcctggcaagatttggccatcatctccctctgaaacctccttattttccaggctctgcttctttctacatcagcctcacatctcttcctgttccttgaacacagtctcctcctttaaatttattatttctgcctagaatactttccttctcctcatactcatttaacttattttcttcaggtctagctccattgctttttattccaggaaaacttcccaacctccagaatagaccaaatatcctattatatgcttaaatcacagtgtggaagtattgcctttgtgatgaaagtgtcatgatgactggataattaattattgtgtcttccactaaagtgtagataggaaagaaagcatgcctgtttttgctcaccattttttcctcatgtcaggtaaaatgactggattacattaggaacttgctctgtatttgttgaatgaatgagtgaatgaatgcatgaacaaatgagtaacatctgcctctgtagttaacttgtaatctgtttctgtctttatataacctctactgtaggtagccttaaaaatctggaaaatgactttattgatttaagtaaatattaagtttttaagcttttaaaaatctattgtaagttgattaactatgattattttgaaattttcttcatcaaaatttgagatgactttggatacatactgttttcagctactcaacaagtgccattgtatttactatgtatgaaatctggtgttacttcctgcccatttcctagactcagttgttctttgcaaaatacccatttatcagcaaccagcccaccctccctctgggaatcagtgagagtggatcacatcagtatgtcataaatactcctcctgttttctttgagagttttctgctgatgcaagcggaaggcttggatgccaggcctgtatgtgatacagtagaaatttccccagatgccctgtggaaagacaagctgctacccggagtccttcctggatgtctggcttagtgtagtataccatcaaggacaacctggctctgtctcctaacaagctgctagggccttccctcttgcctaccctcctgacagcctggacctcaggctaacaaacctctgggttgccactgtctccattctgagccatcagaattgtatatacattcatctgctgatgtctctgtatttcaagctgtatgtctttacacctttataatacacagtacagattttgctgcttaaaattctagtatttcctatagacactaaactcaattttaacacaatgaatatgttaaaacattatatatgtgttggattaacacatataatgcaactcatttgttgctaatctatcttggattccttgggtagaatctgtcttctcacctgtctgaaatggaattgaatctcctaacttcttactatttttttaaagccacaaatcccttttaaaatgtccgtttaaggctgctaaactcacattgttatagagtatattttatatacttttcttccttttaaaagatcatatacacttttctcctggcctctaattttgccaaatattctgccataacagcaagctcacagaacacaagtatttgcttaaagatatttaaagcaaatccccaaagagttttctgttgcaaatgtattttaagacataggctgaggagctgagtattcaaatccatgagttctgacactgatgttttattaggcctacccacatgaaaattagtgcttacttgcacagttatcttatttaaaaatacatttgcaaaaagagaataatttcattttcactgattcaaaggtctatcttttcgagtattataaacttacatagtacaaaaagattggtaaaagggatgagaaaaataaagggcaatagtaaggtgagtaaggaaagcaaaattaaacttggagacttgggttctaaatatagcttgtctacatcctagctgcaagatcttaggcaactcaactaacctctctgaacatcacagataaaatggggaataataacattatctagctcaagggtatcgtacaaattatacaatatatgtaaagtgcaaagcatagttcctgcacatagtaagtgctccataagttaaatataataataatcatagtaaaataatattcttaactacaatcttattaaaaggttattacctagagtttaagctgtggggttatttccatttgcacaaagtgtgatagaaatttggctctgtagttcctagcagccaatgtaagagtaaaacaaaaaagtttgtaagtatcaaaagatttatttacttaaatataagaaccctacaataatgcttccaaactagggtttgcagaattaccacaagggctctgtctgtctaaaagtcccccaagcattatctattgttcaaataaatgagttgcacatgtgtgtacttttatttttaaaggcatatagatattgtattaataaaaccaattcatctaattgtattgttgaatttatactttttgccagtaagcattttcctaatagatggacttaactaagaacatcagaatggtgaagagcattgtgttaatacaattcattgtcttatttgttaaaaaagttgaaaaagtattgctgagaaaaaggaaacaagttaacttttgttaaaggtatctcttggttttcactgtcctttccctcatcagtagcgccaagaacatcttaagtcacagaaacattagtttttggaagcagggtttgctgtaactatagtagaaatgacattctgattccactcctagcttcacaaggatatctgtgaaagatttggggcaaaactgttaagctgtctgaaagtgcttttgcataagaaatgggttttactgctaaaactgtcatattgctgagttttgaatgccctaatggtaaatgatactgggttgccaaaaataaccagattagtagttttttcattcatttggccgtctcagtaagtcaaatattgatactttctactaagtcatcttgccaacacccattttgttatacttatgctgaatctgtttgtcatctcttaagtaagaaaattattgattattttgtggggatttaatttaaaaaaaatggtaatggatactgtaaaggagcattatttggatggtttaaaaacatcttccttgatgggaaaatcttttaaaaggctttctaacttggtgtaattacttgaattaaggaagtgcaatgccattctactgacttagaacaacttttttgacttcctgcaaagaggacccttacagtatttttggagaagttagtaaaaccgaatctgacatcatcacctagcagttcatgcagctagcaagtggtttgttcttagggtaacagaggaggaaattgttcctcgtctgataagacaacagtggagagtatgcatttatttatttacttttacatttttgattcgtttttacagagaaaaacttctacagagataacaattattttgcttttcagaaggacgcatgctgtttcttagggacacggctgacttccagatatgaccatgtatttgtggcttaaactcttggcatttggctttgcctttctggacacagaagtatttgtgacaggtaagtacaaggatattaatattttttaaattattttttctcttttggaggaatgtttgaaatagacataaaaataatttaaatgtgttggtaactggaagtgagaagcctgctgtaaaccatcaagattgttgtctcagggagacatagctagttgtgtgacagaatacattgtttctgtttacaaagacataaatgtttcgggacaaaaaatacaattttaaaaggaaagcaatgtctatctgtatctttatttacaactgttcaaagatattacaaaagcaacattattacttaacttccaaagtgacaataacacacatttataaaagcctgagaattttttaatgataaaataagtgagtttttattcttttaacaaatttgatcttttaaaaagtcataaaacagctttggttgtatgtaagccactccctcttttcagacctgaagtttgcttcctcaaattttgaatttaattgacatattttattgaatacttgggtatataatagttcaaaaatatattgagatatttagtaaaatattaactttctgcaatttttatcacagaatgtattttaaatcaagtttttagtttcttgttaatagttttaatacatttttgctttagaaattcttgtggagccaccgcccttcctgggtggtgggtaaatattacagccttgatgagatagaaatatttaaactcttaaaaatcatgcaaatgctgtattcagtaggaaaatgcaactagttggacttccagtgcctattaaagtttgaaatctttgcacatttatggtctattcaatggata

SEQ ID NO: 1559 - DNA, 6000 bp, Homo sapiens
tgtaaagtatattgtttaatctggaagtggtatgtaggcagcagggtgcaggtaattctaaccacaccacccatggctattcaaggcttccagcacagtctgcatgccccagcagctggtggctctgcttgaccaaaagttatgaaggacaaaagcagaatgcctataaagtctgttcctttgccttgatttgtaccacgggcaggctggagggtgcccagagtgagccaatggctacaatgtcagacactaagttgggagtggaagtgaaaggtgaggagaccagagtggaggaaactaagccaagttgccaggtcttgggcaatttcaacaccaaggctctgagccaaggacaggctactgtgcttgaaataacttcccaagagagccttaactggtcactttgccctctctatctcagcactgacttttaggtcaatgtaactaatattgattagcctcctattctatgttaacaccatgaaagatacaaagcttttgtcttccacagagctgaggcaagcccacaggaaacaatgacagagttgtacaaaacggtaatccatccagtgccagcctgtagagtacaagccccaaaggcaactgaaattcacagaaaggagagatcaaggtgtgctgccatgggcagtggtagcttcttggagcacaggaaattgaacttgacctcaaggaagaaaggaagacaaagtagaaagaggacagcatttcaggtagaaacaactgtgtgagcaaaaataaatgaagcagcagcaatgcgaatgaattgtttcttggcctgtgaagaaacctctctgtggagcaaagggctattgtgggagaagaacaggagaagatcggaccatagagagcctgaattccaagaatactaaatcaagcaaattcaacatgcaggatccaggagtccattatgtgggcaatgagaaatgatcttggcctttaaacaggcagttgacaataaaaaattaaattttaggaagattcatttggtggtagtgtttaagatggattagaggagaaaggattaaaagcaaaaaaactgtcccctcaaaaacctgaatgcttctttaagcatctactaaaagttggactgcattcaaaaacaaacaaacaaacaaacaaaaaacagtcccttccctgccaggcttcacagtccatggaaaagccattcattaatcccatagttacccattaaggacctattatgtgctaagaattatactgggcactggggacacagtgaggagcaaaccaaagtccctatcctcatgaagcctatcctccaacgcacatggaagacaatataaaaccacaccattaagtacatccacatagaatcaggtaaccaagtgctatgaagaaaaagaaagtagggcactgggtggagagtggtgggatgcagtagtcagggaaggcctctccaaataacttccatgatatttcaagcccagagaacaaatgaaacggagatgtcactgctagaaataaggatattgagaagaagacttagcttgtaagagtatagagaaggtaaggagtcttgttttaagtgtgtcaagctgtgataatagcagtgtatccacacagaaatatttagactctagaactctagtctataagaccagaggagacagtggctacacatataaatttcagtgtcttccactgatatccgagtgataagcaacttcctttctaaaactatgaaagtaactaagggtctaaaaaaaatttctagtgcggtagtcttaaaactacaaatagttttgtcatatctcctatgatgactccctcccttcagctgcctggagccccaggggtgggcagtgactttgtgtaggcagcaagcagccggtaacaaaataataattattattgttattattatattataataattgtaacaataacaattattattgaagctcatttacaactaaccatccaaaagacctctttcccctgtgtcttcaatccccaaggcagaggggtagggacagttctatccctcctctgcacttaacccttgaaacacatgcacccctttgtgactttaccctctgcagatggctctgaatgtcttaatgtctgagagaaagggatttagaaagcaaaatataaaaattttaaactagtccttcctaccttcctagaagtggcaagagttaaatgttgagatagactcaagggtaggatgactatttcagtttgcctggaagtgtttcagtttgcctggaagtatctcagttttagtgctcagttttagcaggagtcctgcatttcagagaacccctcaaccctgagcaaaataagatggttggtcaccctatggcttggtttgaccatcatcgctataacctgtatcttacctgcatgcatgacacaacacagtgctttacttccctaaaaatgacatcagccccactaaaatatatgtttagtttccaagccctacctagtcaccttctaccctaggagccaggttctcttttcccacccagacagaggagctgcactcagaaattcctagacatgagttaacactggattccttagccttctactcccatcatctcctgctcagccccagctaccacctaaactaggaagatcaagtctaccagtgacctccgtccatggcacttgctgcccctcctctgtccagctcttaccaatatagctgctggaacctggaggtcaaagtcaaattatcaaaaaaaggaactgagctggtgatgtgcactaacacagcaaatcacaggaaaggggaaccccaggtaaattacagccttctgacctaggaagacgtgtggtttgcgtctctgagttacagaaacacaggaaatgcttactggaccagtcaatttcagaattttgggtcccaagctaggctgactcaccttcagaatggaaaccacgtgacagcccttatatcagggcacacatcacatgctcttccagaagtcaatgggtttggaaccctcacagatattgggaaagctcactaatcatttctgccagttatcagaggttgctctgaaactataaggaagattcaaagaaaatgccaagactgatattaaacttggcaggaacccttgttacagaattttcctgcctgacaaggttaaaagaacaataagcaggaaacacagtcctccaggaataatcaattctatttggcccctggtcaccttcactcagactaaattctaaaacatagaatttcaaataagctatttagataaccttgaccattctccacacacaagcccttgcctgaactattaatagtcaaggcaaagggtagttgttattgctgcctttttaaactgaatcatctgagaaattgcttcagacccccaaagaaagattactgttaacaattcaaaaactaaaatatttgatccctgagacagccttttcccccgacccgcccttcagggctcagtccgaccgactgcaaaggctgttgcaagattgcatcactgacctttgcaattttctggccagtttgatttccccttctttcccctgccccctccctttctctgcttaaaggcctttggccaatttgcctctccttttccccaagtttgctaaccctttggccaatttgcctctctttttccccaagtttgctaactctagcatatccataaccaaagccaaactagaacgctccctcagccccaggtgattacagctaaccctggtcaaaatcaatcctacatcttcacacgtccaagagtactcacactctggattcttacctaagctgtctactacacgcccttctgcccacaaactgcttcaaagctgaagttgagctggagcagtgaagttgtacccccaaacccaggagggtggcagagaattattgaggagagcatgaaatacttccattctaaaatggcagatgaacttctaccaacagccccttccatacttgaccccctacccccaagctcccaactccacttctcaagtggaagtgagaacaatttgaatttgaaggctcttccctgatacacggaagtacataaggaaacagctcgcaggcaaagagactaatctctctctctttctctctctctctctctctctctctctctctcacacacacacacacacacacacacacacctctgtgcataaaagcaccatcaatgaatagttttctatcaactgactctagttatacatgcatgtacctctaaataaaaccaaccaggcaggaaagaaacaatattagcacatattgctttatccaagcgtaacctgttctgtcctgttacccagatccttcccccttgccttctcctctctgatccattgccacacacgtgggaaggtgacaacccttccgaataaaaatgaaagctttcttctttagatggaacccccaaattccctcattatttataatgtcaggctgtcctggacaagggaagctgtgcacccgctgacaccagtaagaaggttgccgccatgtcagagatgtccgcggacacctccctgggctccgggtcctcccctgcgctcgcctggagtgggaccttcgcgtgcacactggccttcccacgcgccccgctgcgatggcacccgcgccgggccccctagctcacacagtcggagcgtgctcagcgcgtggccacctcctgccaggtcccagccgggttccaccccctccttttcccctcctcttcttcctccccctccgagttcccctggctctgaccgcgctggcctgggccggagagcccaggaggcgtgtctcagagaaaagatataagcggcccccggacgctaaagcggtgccagcggcggagtctccaactgggagagctgcagctgccgagaggaggagaacgctgaggtcggtcggaccaacggacgcgctgaccgctgccaactgcagctcgcgctgcctcctgctcgcgccgtgccactaaggtagtccgcctttctatgagccctccccaagattagctgggtgcggggtggtgggagccgttctttggtggctgaagcccctctcctgctgctcctcctgcaggtcattcccgcctccgagagcccagagccgagatggaaacggtccaggagctgatccccctggccaaggagatgatggcccagaagcgcaaggggaagatggtgaagctgtacgtgctgggcagcgtgctggccctcttcggcgtggtgctcggcctgatggagactgtgtgcagccccttcacggccgccagacgtctgcgggaccaggaggcagccgtggcggagctgcaggccgccctggagcgacaggctctccagaagcaagccctgcaggagaaaggcaagcagcaggacacggtcctcggcggccgggccctgtccaaccggcagcacgcctcctaggaactgtgggagaccagcggagtgggagggagacgcagtagacagagacagaccgagagaggaatggagagacagagggggcgcgcgcacaggagcctgactccgctgggagagtgcaggagcacgtgctgttttttatttggacttaacttcagagaaaccgctgacatctagaactgacctaccacaagcatccaccaaaggagtttgggattgagttttgctgctgtgcagcactgcattgtcatgacatttccaacactgtgtgaattatctaaatgcgtctaccattttgcactagggaggaaggataaatgctttttatgttattattattaattattacaatgaccaccattttgcattttgaaataaaaaaactttttataccatatctcatgtaattcctgagaggtgtggtgtcctggggtgggaagcagggagggtgagcaggtgggcgatggtgatgggttcttacctgagcactgcagagggagcagcttcctgagggtcagacacttgcttcacacctaggaactgtgtaataagttactacatgcatataagtctgttgaggac

SEQ ID NO: 1560 - DNA, 6000 bp, Homo sapiens
tggctcacacctgtaatcccagtactttgggaggccgaggcgggtggttcacttgaggtcaggagtttgagaccagcctggtcaatatggtgaaaccctgtctctactaaaaatacaaaaattagccaggcatggtggcctgcacctatagtgccaactactcgggaggctgaggcaggagaatctgttgaactcgcgaggcggaggttgcagtgagccgagatggcgccactgcactccagcctgggtgacagagtgagactctatcacaaaaaaaaaaaaaaaaaaagaaaaagaaaattaaaattaaaattaatcaggccaggcgtggtggctcacgcctgaaatctcagcattttgggaggctgagaggcttgagcccgggagttcaagataagcctaggcaacttagtgagacctcatccctacaaaaagttaaaacaattggctaggcatggtgatgtgcaccggtgatcccagctaactcaggaggctgaagtgggaggattgctttaagcccaggaggttgagactgcagtgagctgtgatcgtgccactgcactccagcctgggccatagagtgataccctgtctcaaaaaataataataatagcaatcagtgtctctatggacatgtacagagtgcctgtgggagaaaatgcaagtgcaaatactctcttatttgagatttcaccaaatttaaatgaaaactgacaacatgagcacagttagcaagaaaagtgtgaagacagtgaattagaccatgggtgtggggagagtggttatcgagaagttcaagggttggccccactcttatagagttgctcatcttctttctctgtttaaatggaatcatctcagttcttcgtttgttttcttcttaattcttgccacaatttgtcacagtggagtttctctgtgtacttaggttacatccatctcttccacctacaggactatatgtctgtcctattcactgtggtatcctcagcatctggcacctgactcagcctctatttatacttgttggaggatgaattttccatttaataaggcagagaagatacatgcacatgagaagctagtaatatggcctagtataattctaaatgagtaaaaacacagttgattactcttaagagtaattagaagatagatcatagtgggttgaagtcaatcaggaaaaatttcagagaagaaattgggcatgagctgagacttaaagaatggatggaatatgaaggaaaaaggaaagaagttataggggaaaggatgttccctgtaacctgtccctgtttgactcccacatgcttctcatctcccagtgtctctttctattctggtgtctagtggtctctgctgggctgtcctgccctcactcatgatgcgggctaactctggccaacctttagggtttgtcatgtgagtgattcctatgctaccctttttttttttcttttttttgagacggagtcttgctctgtcgcccaggctggagtgcagtggcgcgatctcggctcactgcaagctccgcctcccgggttcacgccattctcctgcctcagcctccccagtaactgggactgcaggcgcctgccaccacacccagctaatttttttgtatttttagtagaggctgggtttcaccatgttagccaggatggtctcgatctcctgacctcatgatccgcccaccttggcctcccaaagtgctgggattacaggcttgagccaccgtgcccggactttttttttttttttttttttttttttttttttgagacagggtctcggtctgttgagcaggctggagtgtggtagtgcaatcttggctcactgcaacctctgcctcccaagttcaagcgattctcctgcctcagccacccaagtagctgggactacagacgtgccaccacacccagctatttttgtatttttagtaaaggcagggtttcaccatactggccacacccagctaatttttgtatttttagtagaggcggggtttcaccttattggccacgctggtcttgaactcctgacctcaggtgatccgcctgcctcggcctcccaaaaggctgggattacaggcatgagacaccacacccagcctcctgtgctactctttattattgtctttggggctccactgtctttttttaaatgaaaagccagcatgtcaatacctatcatacctgggccatagcaagtgctcaataaatacttgttaaatgagcatatgtgcgtaggagccacattccatactcttgggatggctcctttccagatatttcgtctctgcctagagctggggcatttggcaattgagtacttgagggcccactcaaaatccttgcataattattaataaggggctttcgcagatttttatttaacgaagctttattgcatgccttctctattacaggacttatgctggctataagcagttcggagttcagctactgtgagagccatgtaaacaaataatgataagttttgatttatgtataaagtggtctatgaacactgtagatggaggattgactgtccaagtacgccagagaggcttctcagattacaggagaaaaagttggaattgaatcttgaaggacacgttatgtcctctgggcagacatgactggagtggataagggagtgggttggacagtattctggacaaatgcaatcacaggtgcaaagatggtggtggtggtgaggaactgagaaagtgtgcgtttagagcaaaagcagaagtggccagagagaaggtgcaggactggatttggggcaggataaccaaacggctcatttttttttttttttttttcttgagacggagtctcactctgtcgcctaggctggagtgcagtggtgtgatctccactcactgcaacctctgccacctgggttcaagcgattcttctgcctcagcctcccgagtagctgggattacaggtgcctgccattgtgtctaatttttgtatttttagtagagacggggttcaccatgttggccgggctgatcttgaactcctgacctcgtaatccacccgccttgacctcccaacgtgctgggattacaggtgtgagccaccgtgcccggccagggctctgtcttatacagtttcatgttgctataataggatgccacagactggacaatttataaacaatagtttatttggctcacggttctggaagctaggaagtccaagatcaaggggtagcatctggcagcagccttttctctgggtcataaaatagcagaaggcatcacatggtaagagaaacagcaagggaaagccaaactcatttttataaccaaccgactctcaagataacccactcctgtgattacgttaatccattcgtgaggggtagccctcataacccaatcaatttaaaggtctcacctcttaacacttttgcattaagaatagtttccaacacatgaactttgggggatacattcaaaccacagcaagctctatggataccaatctgtaagaggcacaaaaataaaaaaatgatgctaattaacacagccacttgcagtgccttacataacttttgaaacctaaattggtcctattcccctgaggtaagacagtgcccttgaatgttaatttaaaaattctcctggttggcaattccaattatcttatgttatattcagggcatgtaataagtcccttatttttacataaagagcttttaaattcttattaatagaaaatcaggtgtcttttaatcctttgctgaacagatatttaaagaaaactggcctgttcatgcatttccaaattattagctttctggtaatttacatattcctctaacaagccctggatggaggcctctaagtcctccttccctggtaaacatggggctgttcatttggctgggtaagctgagaacgttggtgtgtgggtgcgtaaaagagaatctgtgttcaatgaagtattgtcgatagggttaattgtgtatttggcacacataaacgggacaagacgtgtaaagtacttggtaggagagcgacagtatttctccttttttttttttttttggagactgggtgtcactctgtcgcccaggctggagtgcagtggcgcacggctcactgtaacctctgcctcccaggttcaagcaattcctcatgcctcagcctcccaagaagctgggattacaggcctgcaaccccatgctctgttacttttttttttttttttttcatttttagtagagacggggtttcgccatgttggccaggctggtcttgaactcttggcctcgagcaatccgcccgcctcggcctcccaaagtgctaggattataggcgtgagccacagcgcccggcctaattttcgtattttcagtagagacgaggtttgccctgttgcccaggctggtctgaactcctgggctcaagcgacccacccacctcggcttcccaaagtgctagggttacgggcgagcgtgagtcaccgcgcccacccgggagtctgtatttctaatttgtattcagctctcagcatatcctcaacgtgaccccacccaggttcagggtactggaacctgagcgaggaatgcgtgtgccggggagagtaggtagtgtgaggggccagagtgcaaaggtcagaaggcatctggtggaagcggtgtgcaaagaagcctgaggggaggaccttagatctcggttaccttggcgatctctatcagagggttagagttgccgagaggcgccagctgccgcttcctctctcccgccctccgtttggcttagctcgccgggttctcccacaggttaaaagcagacgccgacgcggttgcctagtgacacttttcccaaaatgcctagggtattgttgtgttcttcttagccaatgagagaggcgaagcggcccaccgcctgccaatagactgcgagatcagggcccgcgacggttaaacggggcccaaggcaggggtggcgggtcagtgctgctcgggggcttctccatccaggtccctggagttcctggtccctggagctccgcacttggcggcgcaacctgcgtgaggcagcgcgactctggcgactggccggccatgccttcccgggctgaggactatgaagtgttgtacaccattggcacaggctcctacggccgctgccagaagatccggaggaagagtgatggcaaggtgagcgtgggacctaccctgcgcctgcccctgcttaggtttcgtcgcctcggggcgagcgccctgcgccaccgaagggaaccgacagggctgaggaaatgggtgcccggaagactaaaccgtctttcctgggtctgcatctgacagcctgtcctgggtggcttaaaggatgggagaccgcttcttttgatatatgtatttccatcttttcccgtttctctccccatttctctctttctcctgctttggcttgctaaggaccttccattggtgacaggtaactaattcctgagctgtttttagagctctaagagtggccctctcaggcacaagaaaggggcaggactaccagaacccgaagctttgtatctgcagtcagactccctcaaaatatccattattaggattattggattcatatttcccaatgtatataggtagaacttttacagaaagtaacattggacaggaaactgcctggctgctgatggagggatctttaccaaggtgtctcatcctgggaaaacacgactggggtggaatggggcagggactttgaccaccttcaccccaattttgactatagtaccttttagccaacttcccactaaccaactgagggtaggggttgggggagtcctcatgtgcctcattcccgtttgtctccccacaacatacatttactgcttagaactggaggaagattatggaagtaaactcacagctccttaagttcattgaactaaattagataatgaccttgattgtaggatataattaaaagggaggtaatttgttaaatcttggaacttt

SEQ ID NO: 1561 - DNA, 6000 bp, Homo sapiens
atgggaatgtaagatattgaaaaggattttggacatttcttaaaaagttaaatatccacttactatttgttgttttgttttgttttgttttgtttttgagatggagtttcactcttttttgcacaggctggggtgcagtggcacaatcttggctcactgcaacctccgcctaccaggttcaagcgattctcctgcctcagactacggagtagctgggattacaggtgcgccctaccacgccaggctaatttttgtatttttagtagagacggggtttcaccatgttggccaggctggtcttgaactcctgacctcaagtgatctgcccgcctcggcctcccaaagtgttgggattccatgtgtgagccaccacacccggcccccacttacttatttgacccagcaatttcactttatgtgtttcccaggataaatgaaacctatgtcaatgcaaagacttgtacataaaagtccatagaagctttattcataaaagcttcaagctggaaacaacataaatacaaatcaacaggtgaacggataaaccaattgtatatccatgcaaagaaatactactaagaaattaaaaaaacacagtcatgtgcaacaacaaggatatgtctctaaaacattatgctgagtaaaagaaacagacataaggccgggcacggtggctcatgcctgtaatcccagcactttgggaggccgaggcgggcggatcacgaggtcaggagtttgagaccatcctggctaacacggtgaaaccccgtctctactaaaaatacaaaaaaaattagccaggcgtggtggtgggtgcctgtagtcccagctactagggaggtcgaggcagaagaatggcatgaacctgggaggcggagcttgcaaggagcctagatcgcgccactgcactccagcctgggcgacagagtgagactccgtctcaaaaaaaaaaaaaaaaaaaaagaaacagacataaaagagtacacactgtaattccacttctacgaaactctaggaaaatatgaatttaatgtgtaagtgacagaaaacagatcaatggttgcttgtgtctgggaatttttggggtgcataactgggaaggggtataaagatacttgtaatatcaagaaatgtttatattcttactttggtggtattaatagaggtgaatatatttgtcaaaatgtattgcactgtacacttaaaatgagtgtattttatcttatgtaacgtctatctttttaaagttttttttttttttttttttttttttttgagacctagtctcactctgtcgcccaagctggagtgcagtggtgcgatcttggttcactgcaacctccgcctcccaggttcaggcgattctcctatctcgccctcccgagtagctgtgggactacaggcgtgtgccaccacaccaggctgatttttttttatttttagtagagacggggtttcaccatgttagccaggatggtctcgatatcctgacctcgtgatctgcccgcctcggcctcccaaagtgctgggattacaggagtgagccactgcgcccggccctaaagttttttttttgttttgttttgttttaaagataacagattttcagccaggtgcggtggctcacatctgtaatctcagcactttgagaggccgaggccggcagatcacgaagtcaagagatcgagaccatcctggccaacatggtgaaaccctgtctctactaaaaatacaaaaattagctgggcgtggtggcgtgcgcctgacgtcgcagctactcaggaggctgaggcaggagaatcacttgaacctgggaggcagaggttgcagtgagccgagatttgccactgcactccagcctggcgacgcagcaaaactgtctcaaaaaaaaaaggatacagattttcaggccgggcacagtggctcacacctgtaatcccagcactttgggggctgaggctggtgggtcacttgaggtgaggagttcgagaccagcctggccaacatggtgaaacctcgtttctactaacaatacaaaaattagctgggcgtggtggtgcgtgcctgtaatctcatttactcgggtggctgaggcaggagaatcgcttgaacccgggagacagaggttgcagtgagccgagattgtgctactgcactccagcctgggtgacggagccagactccatctcaaggaaagaaaagaaaatttcagaatagataaaaaaataaaatcgtgtaattataaaatatttacagttctaataagatgaaaaataatatgaaatgaaaagtaaactgctgcttaaaataatagattatattgtcttcatgatgcagctatagagacggctctcatttattgaaagtactcgtggggtttttttggagaaaaataattgatgaaaagtagtatcgcaacttatttaatcaaatctgaaaaggaaatggaatgtgaggggagatatgatgattccttcaggggatcatgagattgagaaaatatttctctttaaagggaaatatttgagcagtttaagtgctactaggaagacttaggaaggtagaagcagttaaagattcttgtttacaagtgcataactgggagagtgaagttcctgagaagcaagttgcctcaaaacacagtatgattgttcagttttaggagtagtcagaaagacatttcccatggttgtaacaggaagaaaggaggtaagaatgggtatagattttcacacatttgtagatttgggtctcagaaagttgaaggtgttcctgtcagaaatcttatgttttctgtgaactagaaaataaagtcatcttctgagagtaagaatggagatggttgttgcagcggattagagaaatcctgaaactgggagaaagggctgtggagcagcattgaggcccagctagacatcctacatttaaagtatttgcacagtgctgggatttttttccagccccattctgcagcaatagtgcaccaagggatgatatggacatttgcacacatacaagtttgggagatagaacaagaggcaagggagttgaggacactggcaaaagagtgatttcagtgatgaacctgcagtctaatctgtagaaaagatgggaagactcaaagacactggtccacaagcagaatatcgaggtagtggatgaacaatccagagagagtagactggctaactgagggaaaggacttaaaaagagaagagcagagagccaaaaatggacccttagagaacatctgtctttggttggacgggatcctccccctacaaaacaaacaaaccaaccgggggaaaaataaagggaggggaagggaagcataaaattaaagtcagagaaatatcacaggagttactagaatggtatccatcctatttcccttgttcaagaaatgaatgtatttctttattgttcattgtagaaaaacgaagcacaaggcttgactatacagtggccactcaatagatatctgctgaagaacgaatgaatgaatagtaaatgcaaatttcttattcaaaccttaaaaatatcctctattatctgtctttctagctgtttatttttccttaaacagcctatacatagttgaataattactctgggaagcaatggaattgtaatttgtgttgaagccagacacaatttggttcaaattctaaaactaccagacactagactgatcatggcaatgtctgacaaaagttttcctcccctacctgctctctcccctccctttggggattcgaaggtagaagatagtaagaacaaggcctttccccaaatagcagttttatctcccaagatgatctggattttaaattactatgtgcaaagttactagggatgcaaaaatgaattaaaacagattttactgtaaaggaatttttgagtctgatgggggagtcagacgtagacataaatacaagacaagacacggcgaaaatcctaaacatgaagtttgcaagttccaggaaaggtctaggaaataattatctctaaggagtgggtgggattagggaggttttataaaaaaagtgacacttgaattgggtactgcaggaacagtctaatgaaaggtaaagtcagggggctggaaagtttggtacctattgaggcagacaacagcattagagatctattactttaacaattaattgttttgcttctgcctttagaagcttatttatagtttaatagggaaataaaacgagtatataacatacatagaaaactagtgggcttcacgaaaagcattacaccccgttttgaggattcttctgaattttaaattctgatgcagtgtcctccccccacgccttaatcccggaaaataagtgttcagaatcacgtcttagaaatatgaaccataaaggacagcatttaagagcgacatcctgcattgcgtagattcaatttcaaattactgtacttagcttctatgagcctgttaactttttaataaaatgaggataatactttcctcaaagaattgttaagaacgacaccggataaagaatgcatgacaaacacagcacctagtatctatgtcctaaatttacgtttaattaagtagattggtacgtgcagtttaaaagaggtttcaccaggcagcacagttcccctggctgtaggcgatagaccacgccttcctaatcagcgggcgcattccctgacttttgcggaaatagcggtccaaaaccgcgtctagcattagcaaaagcacgtggtctccgtctccccgcaacaacaaaaaagaacagtaaactccggcgcaggcacctccagtagagggcttgtttttaaaatccatccgaaagggccaatcagacgcggcagtctgagtgcgcaggcgcggattggtccgcagctacttagagtgaccaataggcgtggaggtaagtttggttgagaccagaagcgggcgaattgggcaccggtggcggctgcgggcagtttgaattagactctgggctccagcccgccgaagccgcgccagaactgtactctccgagaggtcgttttcccgtccccgagagcaaggtgagcgtcctgactgggtccggatcctggccctggcggcgggcggtaggcggcgggcggcgtgggggtgccgctggctttttgccggcgggtactgggcggggaggcctctgggatcactctcccggccctgtaggtgccggggaccgccccctcccacccgaccgaactggagaatccgccccgggatgtggttcgtaggggtgtctgcgcccttctgctcgggttcaaactggtctcggattagtgtcccagaccctactcggtcacggactcacactttaggggatcattttcttcctccgtaaaagaattggagatgactaggtatttccaagccgccttcccagtcccgtaaccaaccttattgaaattcaggccctggtcctttgttttattgagtagatgtaagcttgagttttgatctggttggcgacgtggggtgcctatggttagttacgcgagcatttctctttcccctctcttcttcctcccgtccacatttttttttttctttttttaaatagagataggcctccctatattgcctaggctggtctggaacccctgggctcaagggatcctcccgccttggcctctgtaagtgccaggattacaagcatgagccactacgcccggtcctcccttccacatttatttgaacgcgcctgtgtgcccggctcggctgtgtaatgaggacccagaaataaaaggcatgggtcgtgtccttgagcctgacctagaggagaaggcagggttatcattctcagacccagccttggtacagtgcacggggactctggctttttggaggaggtggggaattctgacaacgggaaagcagtggtggaggtggggcaggaggaggtcacacaagagcttccttggggactaagggactgggtagttcgggcatgaagagtgccctccacgtatttaagagataaa

SEQ ID NO: 1562 - DNA, 6000 bp, Homo sapiens
atgtatctctgatggtgatttttagaatatgctgcataggcaaaggaaaaaaaaggtcttggaagtatgcaaaatataatatcaccactgtaaccgaaaaaaggtgaaagactaacagatgtattcttacagatttaaagtggcttcattttaaataaggtaattatctgggagagtcctgatttacccctgttgtcttagtgtatcaatgagtggcatcctctttactgcaaaaaatgtttggatttgtgtgacaaatgatgtagctaccctagttatgagaactttattttctactaagatttcaaataatcatcagtgagagtttgtggtctgtagtctcccgttttataaattataaccatctatatagctgtgcttttcaaaatacttacatacttaggcttttaaaaatacttatttactaatttttccctctatcataaactacactgaggttttctttttttatgcaattactattgacccttggtttttatttatttattttttttttaattgcaggctaatcgaggcagcagaacggcatatttgtttgaaatgtaggttggtaattttggcagtggaaatttagacatttggaattttacccaatctatgaagcccactgagatgatgacagacacataaattcatttaaagaccatgtatctttaaaaaaaaaaaaaaaacttttgttatattatactcattttaattatgagaacacagtcatatttttctctatcactcaccttctctttttctttctcatcttttgtgtttatttttagttggccaaaacactctctccatttctccccagcaacctcattctggtttcttgctttgtgaagtctatctgtgaacttctgtggtgacagagtaaatgaaggaggagtagagattctgtaaaggtgagtgtcaagtactgccctaaaaaataaggaaaattctgctgctggtttctttttgtcaacattaggattttgttaagcacttatccatagcgttatgctgtgtcccaactattaccatatgttcatttatttatatcagttactaaatgctatcttagtgggtgaatttcaccaggggcaagaaaccagaggctgcagctacagggatgacatagcacaggccactgtgagactgcctcccaaagaaagactttcctggagagctaaaattgtagagttatgagtggcccaaaagccacaagcagtaatcaatcaactaatcataattccaaagggtgagataatgttcccacagtgtatcattagtgtgatgagtttatctctttaaagcctcacaacctgctgatatgctgtggtttttcttggtcctatctctttatcttttaccacctctgatctctttaaacccaccctgtttccattttcctccccgcccattgtttcctcatttttccttaacacttcttccttagattaacctttaaatacaaatggaaataataatcggattattttttgtaaggaaaccacctttctgtttcattattcataactagaataatgaaataaagctgtttatagaaatgcatctagaacatgagacaaaattgatatagaccaaacattgttcttgaatagtggtatcaaatataaaattataaataaaatcttaaaagacttttggtgtattttcatattaaagggttattttgcatttatcaagtatcactatttggggggaaatgtaatcaattaccgtcgttccatgtatttctttttttcacctcctgatttttcatgcttgaaaccgttctggaaagcttccagaattgttacaaatgaagttatgctttggtcaatgttagtaaggacctatgatccataggcgtaaaactccaggacagggatgagtagttttgttttcttcagcctcttgtagaaatcccacattacttaagtgaatagacccattgatgagtggagaatggctaagagtggaaacagctccactctctacctctgtaatttcaaaacaaaagattccatttgagggctttaataagagactttaatcgtgaatgcttaactgaactttgatagtcatttagcattttattcaccaaaagtgtattttcttgtccttccctcctataattactgggggcaaaataccataatatttaaaatgtgcctacagaaactactaggaggcagaactagaagcaaattcttcttgggttctttcctggcttttcagagagagcgagagagagagagagagaaggccagatatttttattataaattccttgacagaaataaagacatgataggataagaaactcacagagtcagtgagtaacttgttcaggatcacaaagccagaaagtgacagaaatctgaacccaaaaaaccatgactggagcctgccctttaaaccactgtgctctcctgcctccttgaagtaatcaagatgggtgtatatcatttaaatacccttttaccatgaagactgtagagaccccggcacataagacctccattaaatatagagatgaaaaggcattataagagccatttaatagaagaaatgattcatttacggttaccagggagacagctctagcaatcttgccggttaggtcttcaaagaactgatcatttgagaggtggaaaggggctcctcctctcctgctatactcacttactgcacttacccattccagaagcttttaccaatacctcccgtcttaccctcctgggctttggggaaattaaagtagcctcttatgagtaagtcaggggtctcaggtctaaggagttgttaagtgagcaataggtactcagtaaactaagtattatgaacaaaagtgtgtatgtctatgtcaggaagaggggtggccatcagaatttatggcttgcgctgttttcctagaagtgatgtaaatgaacttttgctactctatccacactctaatctgaatctacttaaggtgcatcagtgtctgtaccaagaaggttgtctataaacatgaaagatgctcactggcttgtggaagctgaacctgtatcctcagcaaaatacagtgatagctaattcaggtaaccagccatattccacagcagcatcttctctcagtagctctggtttggagctcctgctctgtgtctataatggccacaggtgtaagaatattcactttttgtccaatctgtagagctagcctactgcagttctcaaactgaactcagagggaggacctaactggatgaaactactagtctgacagtagcgcctcttgattatctttttcttgggctactgggatggtagctttgcttcaactcaaaactggtatcaaggaaaggaacctgctggtgctgatttatacataatttttagaattattcagaagtgggttggaacaattattttattccagagtttttcaatgtgtgataatggaaaaaattctgtattcaagggagtttggaaaatgctgggttaaaagagtgaaaaggttttctcttctacaggagtttcagagcctttaacatgataatgttccagaatgaggaatctaagaggacaggagagtacccagtatctcccaaacttgtttgactccagaattcctgtttgtcagaacatattctgggaccattgtttctcagaagtacatagtaggtaagaacatagtggatcctgactgcaaaaatccagctctaccacttactgtggtctcgaacaaagtacttaacttctttgtacctcagtctcctcatctgccagatatggataataagacccactttataggttcatagtgaagattaaatgaccatacacaacacacatcaaattactaagtgtagtatatgttagctattattattttatttattcagtgctctactaataacctaggccccatacacaactgaagtataaattccaaaagtgatagaaagttctttgtgacttttctgaactcaggaacatctgaagtagagaacagtatagagatcttgggtttgggagtacattcaacagagtttccagtttaaatcatctgtctggtcagtatggctgcagagtcatgccgaaatgaaaatgttgactttgagtaactaaaggtaaaataaaagaaaaagggaaggtggaacagtggtaagagttattcttgtattcatctaatttagacttagttgaaattgaaaatgtcaagttatgagtagtgtagaacagtagacatcaaacacttaaaattccagcttcctggattaatgctatggaaagaatgaagttggttgataatgtttagcctagcaagaaggtgaagaagaaagccatacaagaagtggcttaggcagcaaattataaaggtgaccattcattcaaatcagtaaaacaaacaagtataccttattctttaggtaaaattgatggatctctgttttccagcagttcacaaacagaggggtacattgtaaacaacaaactaacaaaataaattctgggatggcaacctgctaaggtatcccagaaaataagaggtaggacatgaatttaaaagattggaaggtatgtcttcagtactggcctggccctgagtagactagtgctccctcccataggggtgcgtgtgcacacataatacaggagggaagccttcccttctagagcaagtgattcagcttgggaggctgtgactgagctacactaagtaaaaacgggagacttgattgtccttccttcaacagacctgtccaaaatgactggaaagtaaataccgtaaatcactgttgtcagggcgcacattccacctccttcctcccttacccacagcggtcctcatttccacactccctcaacggttcggggagagctcgtggtctaagtaacgagaggacttctgactgtaatcctagcacgtcactttgttgaaggcagacacgtggttcagagagaacttataaatctcccctccccggcaagatcgtgatgttatctgctggcagcagaaggttcgctccgagcggagctccagaagctcctgacaagagaaagacagattgagatagagatagaaagagaaagagagaaagagacagcagagcgagagcgcaagtgaaagaggcaggggagggggatggagaatattagcctgacggtctagggagtcatccaggaacaaactgaggggctgcccggctgcagacaggaggagacagagaggatctattttagggtggcaagtgcctacctaccctaagcgagcaattccacgttggggagaagccagcagaggttgggaaagggtgggagtccaagggagcccctgcgcaaccccctcaggaataaaactccccagccagggtgtcgcaagggctgccgttgtgatccgcagggggtgaacgcaaccgcgacggctgatcgtctgtggctgggttggcgtttggagcaagagaaggaggagcaggagaaggagggagctggaggctggaagcgtttgcaagcggcggcggcagcaacgtggagtaaccaagcgggtcagcgcgcgcccgccagggtgtaggccacggagcgcagctcccagagcaggatccgcgccgcctcagcagcctctgcggcccctgcggcacccgaccgagtaccgagcgccctgcgaagcgcaccctcctccccgcggtgcgctgggctcgcccccagcgcgcgcacacgcacacacacacacacacacacacacgcacgcacacacgtgtgcgcttctctgctccggagctgctgctgctcctgctctcagcgccgcagtggaaggcaggaccgaaccgctccttctttaaatatataaatttcagcccaggtcagcctcggcggcccccctcaccgcgctcccggcgcccctcccgtcagttcgccagctgccagccccgggaccttttcatctcttcccttttggccggaggagccgagttcagatccgccactccgcacccgagactgacacactgaact

SEQ ID NO: 1563 - DNA, 6000 bp, Homo sapiens
ttatgagtggcccaaaagccacaagcagtaatcaatcaactaatcataattccaaagggtgagataatgttcccacagtgtatcattagtgtgatgagtttatctctttaaagcctcacaacctgctgatatgctgtggtttttcttggtcctatctctttatcttttaccacctctgatctctttaaacccaccctgtttccattttcctccccgcccattgtttcctcatttttccttaacacttcttccttagattaacctttaaatacaaatggaaataataatcggattattttttgtaaggaaaccacctttctgtttcattattcataactagaataatgaaataaagctgtttatagaaatgcatctagaacatgagacaaaattgatatagaccaaacattgttcttgaatagtggtatcaaatataaaattataaataaaatcttaaaagacttttggtgtattttcatattaaagggttattttgcatttatcaagtatcactatttggggggaaatgtaatcaattaccgtcgttccatgtatttctttttttcacctcctgatttttcatgcttgaaaccgttctggaaagcttccagaattgttacaaatgaagttatgctttggtcaatgttagtaaggacctatgatccataggcgtaaaactccaggacagggatgagtagttttgttttcttcagcctcttgtagaaatcccacattacttaagtgaatagacccattgatgagtggagaatggctaagagtggaaacagctccactctctacctctgtaatttcaaaacaaaagattccatttgagggctttaataagagactttaatcgtgaatgcttaactgaactttgatagtcatttagcattttattcaccaaaagtgtattttcttgtccttccctcctataattactgggggcaaaataccataatatttaaaatgtgcctacagaaactactaggaggcagaactagaagcaaattcttcttgggttctttcctggcttttcagagagagcgagagagagagagagagaaggccagatatttttattataaattccttgacagaaataaagacatgataggataagaaactcacagagtcagtgagtaacttgttcaggatcacaaagccagaaagtgacagaaatctgaacccaaaaaaccatgactggagcctgccctttaaaccactgtgctctcctgcctccttgaagtaatcaagatgggtgtatatcatttaaatacccttttaccatgaagactgtagagaccccggcacataagacctccattaaatatagagatgaaaaggcattataagagccatttaatagaagaaatgattcatttacggttaccagggagacagctctagcaatcttgccggttaggtcttcaaagaactgatcatttgagaggtggaaaggggctcctcctctcctgctatactcacttactgcacttacccattccagaagcttttaccaatacctcccgtcttaccctcctgggctttggggaaattaaagtagcctcttatgagtaagtcaggggtctcaggtctaaggagttgttaagtgagcaataggtactcagtaaactaagtattatgaacaaaagtgtgtatgtctatgtcaggaagaggggtggccatcagaatttatggcttgcgctgttttcctagaagtgatgtaaatgaacttttgctactctatccacactctaatctgaatctacttaaggtgcatcagtgtctgtaccaagaaggttgtctataaacatgaaagatgctcactggcttgtggaagctgaacctgtatcctcagcaaaatacagtgatagctaattcaggtaaccagccatattccacagcagcatcttctctcagtagctctggtttggagctcctgctctgtgtctataatggccacaggtgtaagaatattcactttttgtccaatctgtagagctagcctactgcagttctcaaactgaactcagagggaggacctaactggatgaaactactagtctgacagtagcgcctcttgattatctttttcttgggctactgggatggtagctttgcttcaactcaaaactggtatcaaggaaaggaacctgctggtgctgatttatacataatttttagaattattcagaagtgggttggaacaattattttattccagagtttttcaatgtgtgataatggaaaaaattctgtattcaagggagtttggaaaatgctgggttaaaagagtgaaaaggttttctcttctacaggagtttcagagcctttaacatgataatgttccagaatgaggaatctaagaggacaggagagtacccagtatctcccaaacttgtttgactccagaattcctgtttgtcagaacatattctgggaccattgtttctcagaagtacatagtaggtaagaacatagtggatcctgactgcaaaaatccagctctaccacttactgtggtctcgaacaaagtacttaacttctttgtacctcagtctcctcatctgccagatatggataataagacccactttataggttcatagtgaagattaaatgaccatacacaacacacatcaaattactaagtgtagtatatgttagctattattattttatttattcagtgctctactaataacctaggccccatacacaactgaagtataaattccaaaagtgatagaaagttctttgtgacttttctgaactcaggaacatctgaagtagagaacagtatagagatcttgggtttgggagtacattcaacagagtttccagtttaaatcatctgtctggtcagtatggctgcagagtcatgccgaaatgaaaatgttgactttgagtaactaaaggtaaaataaaagaaaaagggaaggtggaacagtggtaagagttattcttgtattcatctaatttagacttagttgaaattgaaaatgtcaagttatgagtagtgtagaacagtagacatcaaacacttaaaattccagcttcctggattaatgctatggaaagaatgaagttggttgataatgtttagcctagcaagaaggtgaagaagaaagccatacaagaagtggcttaggcagcaaattataaaggtgaccattcattcaaatcagtaaaacaaacaagtataccttattctttaggtaaaattgatggatctctgttttccagcagttcacaaacagaggggtacattgtaaacaacaaactaacaaaataaattctgggatggcaacctgctaaggtatcccagaaaataagaggtaggacatgaatttaaaagattggaaggtatgtcttcagtactggcctggccctgagtagactagtgctccctcccataggggtgcgtgtgcacacataatacaggagggaagccttcccttctagagcaagtgattcagcttgggaggctgtgactgagctacactaagtaaaaacgggagacttgattgtccttccttcaacagacctgtccaaaatgactggaaagtaaataccgtaaatcactgttgtcagggcgcacattccacctccttcctcccttacccacagcggtcctcatttccacactccctcaacggttcggggagagctcgtggtctaagtaacgagaggacttctgactgtaatcctagcacgtcactttgttgaaggcagacacgtggttcagagagaacttataaatctcccctccccggcaagatcgtgatgttatctgctggcagcagaaggttcgctccgagcggagctccagaagctcctgacaagagaaagacagattgagatagagatagaaagagaaagagagaaagagacagcagagcgagagcgcaagtgaaagaggcaggggagggggatggagaatattagcctgacggtctagggagtcatccaggaacaaactgaggggctgcccggctgcagacaggaggagacagagaggatctattttagggtggcaagtgcctacctaccctaagcgagcaattccacgttggggagaagccagcagaggttgggaaagggtgggagtccaagggagcccctgcgcaaccccctcaggaataaaactccccagccagggtgtcgcaagggctgccgttgtgatccgcagggggtgaacgcaaccgcgacggctgatcgtctgtggctgggttggcgtttggagcaagagaaggaggagcaggagaaggagggagctggaggctggaagcgtttgcaagcggcggcggcagcaacgtggagtaaccaagcgggtcagcgcgcgcccgccagggtgtaggccacggagcgcagctcccagagcaggatccgcgccgcctcagcagcctctgcggcccctgcggcacccgaccgagtaccgagcgccctgcgaagcgcaccctcctccccgcggtgcgctgggctcgcccccagcgcgcgcacacgcacacacacacacacacacacacacgcacgcacacacgtgtgcgcttctctgctccggagctgctgctgctcctgctctcagcgccgcagtggaaggcaggaccgaaccgctccttctttaaatatataaatttcagcccaggtcagcctcggcggcccccctcaccgcgctcccggcgcccctcccgtcagttcgccagctgccagccccgggaccttttcatctcttcccttttggccggaggagccgagttcagatccgccactccgcacccgagactgacacactgaactccacttcctcctcttaaatttatttctacttaatagccactcgtctctttttttccccatctcattgctccaagaatttttttcttcttactcgccaaagtcagggttccctctgcccgtcccgtattaatatttccacttttggaactactggccttttctttttaaaggaattcaagcaggatacgtttttctgttgggcattgactagattgtttgcaaaagtttcgcatcaaaaacaacaacaacaaaaaaccaaacaactctccttgatctatactttgagaattgttgatttcttttttttattctgacttttaaaaacaacttttttttccacttttttaaaaaatgcactactgtgtgctgagcgcttttctgatcctgcatctggtcacggtcgcgctcagcctgtctacctgcagcacactcgatatggaccagttcatgcgcaagaggatcgaggcgatccgcgggcagatcctgagcaagctgaagctcaccagtcccccagaagactatcctgagcccgaggaagtccccccggaggtgatttccatctacaacagcaccagggacttgctccaggagaaggcgagccggagggcggccgcctgcgagcgcgagaggagcgacgaagagtactacgccaaggaggtttacaaaatagacatgccgcccttcttcccctccgaaagtaagtacttattttgacttccatcccctgaggtttagctctgcccggagctctcaaaaccgcagcagctcccgggatcgcccttccctctcgcggttcccgttcgctcttttcccgttctcctgtccttcaccccaccacctccttttcagttgtatgcttgaggccatcaggctttaaaatgtttactttctactttattttctccatctttcccttccccctaacaattcggtgctttaaaaggcgttattctctttttctcttccctgaagttctttagtcggccaccagctaggagtcagccccactctgtcaaactagaggtgctcccaggggcagagttaaactgaggaatcttggtaggtttgttttctttgctccgattggcgtggagcgcgccgaactggtgcacgaagggttaaaaaaagtgtctcaaaactagcctctccggaaggcgccccctttccgtgctgacctatcagctggttccccaagcc

SEQ ID NO: 1564 - DNA, 6000 bp, Homo sapiens
taaaatcttaaaagacttttggtgtattttcatattaaagggttattttgcatttatcaagtatcactatttggggggaaatgtaatcaattaccgtcgttccatgtatttctttttttcacctcctgatttttcatgcttgaaaccgttctggaaagcttccagaattgttacaaatgaagttatgctttggtcaatgttagtaaggacctatgatccataggcgtaaaactccaggacagggatgagtagttttgttttcttcagcctcttgtagaaatcccacattacttaagtgaatagacccattgatgagtggagaatggctaagagtggaaacagctccactctctacctctgtaatttcaaaacaaaagattccatttgagggctttaataagagactttaatcgtgaatgcttaactgaactttgatagtcatttagcattttattcaccaaaagtgtattttcttgtccttccctcctataattactgggggcaaaataccataatatttaaaatgtgcctacagaaactactaggaggcagaactagaagcaaattcttcttgggttctttcctggcttttcagagagagcgagagagagagagagagaaggccagatatttttattataaattccttgacagaaataaagacatgataggataagaaactcacagagtcagtgagtaacttgttcaggatcacaaagccagaaagtgacagaaatctgaacccaaaaaaccatgactggagcctgccctttaaaccactgtgctctcctgcctccttgaagtaatcaagatgggtgtatatcatttaaatacccttttaccatgaagactgtagagaccccggcacataagacctccattaaatatagagatgaaaaggcattataagagccatttaatagaagaaatgattcatttacggttaccagggagacagctctagcaatcttgccggttaggtcttcaaagaactgatcatttgagaggtggaaaggggctcctcctctcctgctatactcacttactgcacttacccattccagaagcttttaccaatacctcccgtcttaccctcctgggctttggggaaattaaagtagcctcttatgagtaagtcaggggtctcaggtctaaggagttgttaagtgagcaataggtactcagtaaactaagtattatgaacaaaagtgtgtatgtctatgtcaggaagaggggtggccatcagaatttatggcttgcgctgttttcctagaagtgatgtaaatgaacttttgctactctatccacactctaatctgaatctacttaaggtgcatcagtgtctgtaccaagaaggttgtctataaacatgaaagatgctcactggcttgtggaagctgaacctgtatcctcagcaaaatacagtgatagctaattcaggtaaccagccatattccacagcagcatcttctctcagtagctctggtttggagctcctgctctgtgtctataatggccacaggtgtaagaatattcactttttgtccaatctgtagagctagcctactgcagttctcaaactgaactcagagggaggacctaactggatgaaactactagtctgacagtagcgcctcttgattatctttttcttgggctactgggatggtagctttgcttcaactcaaaactggtatcaaggaaaggaacctgctggtgctgatttatacataatttttagaattattcagaagtgggttggaacaattattttattccagagtttttcaatgtgtgataatggaaaaaattctgtattcaagggagtttggaaaatgctgggttaaaagagtgaaaaggttttctcttctacaggagtttcagagcctttaacatgataatgttccagaatgaggaatctaagaggacaggagagtacccagtatctcccaaacttgtttgactccagaattcctgtttgtcagaacatattctgggaccattgtttctcagaagtacatagtaggtaagaacatagtggatcctgactgcaaaaatccagctctaccacttactgtggtctcgaacaaagtacttaacttctttgtacctcagtctcctcatctgccagatatggataataagacccactttataggttcatagtgaagattaaatgaccatacacaacacacatcaaattactaagtgtagtatatgttagctattattattttatttattcagtgctctactaataacctaggccccatacacaactgaagtataaattccaaaagtgatagaaagttctttgtgacttttctgaactcaggaacatctgaagtagagaacagtatagagatcttgggtttgggagtacattcaacagagtttccagtttaaatcatctgtctggtcagtatggctgcagagtcatgccgaaatgaaaatgttgactttgagtaactaaaggtaaaataaaagaaaaagggaaggtggaacagtggtaagagttattcttgtattcatctaatttagacttagttgaaattgaaaatgtcaagttatgagtagtgtagaacagtagacatcaaacacttaaaattccagcttcctggattaatgctatggaaagaatgaagttggttgataatgtttagcctagcaagaaggtgaagaagaaagccatacaagaagtggcttaggcagcaaattataaaggtgaccattcattcaaatcagtaaaacaaacaagtataccttattctttaggtaaaattgatggatctctgttttccagcagttcacaaacagaggggtacattgtaaacaacaaactaacaaaataaattctgggatggcaacctgctaaggtatcccagaaaataagaggtaggacatgaatttaaaagattggaaggtatgtcttcagtactggcctggccctgagtagactagtgctccctcccataggggtgcgtgtgcacacataatacaggagggaagccttcccttctagagcaagtgattcagcttgggaggctgtgactgagctacactaagtaaaaacgggagacttgattgtccttccttcaacagacctgtccaaaatgactggaaagtaaataccgtaaatcactgttgtcagggcgcacattccacctccttcctcccttacccacagcggtcctcatttccacactccctcaacggttcggggagagctcgtggtctaagtaacgagaggacttctgactgtaatcctagcacgtcactttgttgaaggcagacacgtggttcagagagaacttataaatctcccctccccggcaagatcgtgatgttatctgctggcagcagaaggttcgctccgagcggagctccagaagctcctgacaagagaaagacagattgagatagagatagaaagagaaagagagaaagagacagcagagcgagagcgcaagtgaaagaggcaggggagggggatggagaatattagcctgacggtctagggagtcatccaggaacaaactgaggggctgcccggctgcagacaggaggagacagagaggatctattttagggtggcaagtgcctacctaccctaagcgagcaattccacgttggggagaagccagcagaggttgggaaagggtgggagtccaagggagcccctgcgcaaccccctcaggaataaaactccccagccagggtgtcgcaagggctgccgttgtgatccgcagggggtgaacgcaaccgcgacggctgatcgtctgtggctgggttggcgtttggagcaagagaaggaggagcaggagaaggagggagctggaggctggaagcgtttgcaagcggcggcggcagcaacgtggagtaaccaagcgggtcagcgcgcgcccgccagggtgtaggccacggagcgcagctcccagagcaggatccgcgccgcctcagcagcctctgcggcccctgcggcacccgaccgagtaccgagcgccctgcgaagcgcaccctcctccccgcggtgcgctgggctcgcccccagcgcgcgcacacgcacacacacacacacacacacacacgcacgcacacacgtgtgcgcttctctgctccggagctgctgctgctcctgctctcagcgccgcagtggaaggcaggaccgaaccgctccttctttaaatatataaatttcagcccaggtcagcctcggcggcccccctcaccgcgctcccggcgcccctcccgtcagttcgccagctgccagccccgggaccttttcatctcttcccttttggccggaggagccgagttcagatccgccactccgcacccgagactgacacactgaactccacttcctcctcttaaatttatttctacttaatagccactcgtctctttttttccccatctcattgctccaagaatttttttcttcttactcgccaaagtcagggttccctctgcccgtcccgtattaatatttccacttttggaactactggccttttctttttaaaggaattcaagcaggatacgtttttctgttgggcattgactagattgtttgcaaaagtttcgcatcaaaaacaacaacaacaaaaaaccaaacaactctccttgatctatactttgagaattgttgatttcttttttttattctgacttttaaaaacaacttttttttccacttttttaaaaaatgcactactgtgtgctgagcgcttttctgatcctgcatctggtcacggtcgcgctcagcctgtctacctgcagcacactcgatatggaccagttcatgcgcaagaggatcgaggcgatccgcgggcagatcctgagcaagctgaagctcaccagtcccccagaagactatcctgagcccgaggaagtccccccggaggtgatttccatctacaacagcaccagggacttgctccaggagaaggcgagccggagggcggccgcctgcgagcgcgagaggagcgacgaagagtactacgccaaggaggtttacaaaatagacatgccgcccttcttcccctccgaaagtaagtacttattttgacttccatcccctgaggtttagctctgcccggagctctcaaaaccgcagcagctcccgggatcgcccttccctctcgcggttcccgttcgctcttttcccgttctcctgtccttcaccccaccacctccttttcagttgtatgcttgaggccatcaggctttaaaatgtttactttctactttattttctccatctttcccttccccctaacaattcggtgctttaaaaggcgttattctctttttctcttccctgaagttctttagtcggccaccagctaggagtcagccccactctgtcaaactagaggtgctcccaggggcagagttaaactgaggaatcttggtaggtttgttttctttgctccgattggcgtggagcgcgccgaactggtgcacgaagggttaaaaaaagtgtctcaaaactagcctctccggaaggcgccccctttccgtgctgacctatcagctggttccccaagccttctctattgtctctaactaccctaaaaatgtcagcatcgccgagacaaaacccggtttggagacccctcgagaaacctacctggccctcagtccttgatgtatcatttgctatcactaggtgtttcattacccaaaggcaaaatcctataaccacgttcccttttcacttaacctggagtgtagaaaggacaactccgtttctgactgtgttttaaaaggttttgttcacgttatttttcagaatacactcaaacctgccttcttcacatctccagtgtagcagatcatttttcttacgggtctgttatcctgctcctgccttttcgtaggcttcctgcagttacttcaatgcattcctaaaactcagagtagacgacagccgtattttttttttttttttttactggcttctctgagaacagtgtcctcaaaaccagctggcat

SEQ ID NO: 1565 - DNA, 6000 bp, Homo sapiens
ggaaccaggtgactttgaaatgctatttatacacgggcacggtggctcacgcctgtaaacccagcactctgggaggctgagaagggcgggatcatgaggtcaggagtttggaggccagcctgaccaacatagtgaaaccccgcctctactaaaaatacaaaaaaaaaattagctaggtgtggtggcgggcgcctgtagtcccagttacttgggaggctgaggcaggagaatcgcttgaacccgggaggtggaggttgcagtgagccgagattgtgccactgcactccagcctgggcaacagtgagagactctatctcaaagaaaaaaaaaaaaaaaaaaaaggaaaagaaatgctatttcctttaccaaggatatcttcttcacttcatcttgccttgtcatcctaaatttctcatgaatcgtattttgatgagcaaagcctatattttagtttcttagggctgccatcacaaagaaccacaaactgggaagcttaaaacaacagaagtttattgtctcacagttctggaggccgggcattcaaattcagagtgctgacagggtcaaggtctctctgaaggctcaagggaaggatccctccttgcctctctctagcttctggtggttgccagccaccccttggcactccttggctggtagatgcatccctccaatcttggcctccatcctcacatctctttctctctgaatgcatttgtgtctaagtttccctcatcttataatgacaccagtcactgaattagggctcaccataattcagtacgatgacctcatcttaacttgattacatctgcaaagaccttatttccaaatgcggtcacattcacaggtactaggggttaggacttaaacagatattttggggaacacaattcaacctgaacagcctaaaatgatacatttttaaggaaaatattctgataattctcaaaattatatggcaaatactgtaatactgtgctgttttcaaaatgaagcacaaaataaaaacattaagagtatattttaataaaaatgagcatagaaccagcaatttgaattgtattcttctgtttcatttgttattcccattgtagacggcataaactctaatatatgtagagattttgtattagatttttcctcactctcgaactgccccagcacttaatttcaaaagaaattcctggcattttcccactacatatacttttcagctcctttctgaacatcgctgcttagcatcaaaattactttcagccaatttgtaatctcccaggtctcagatggctgaagcagagttccttgggaagtcccaagccatactaactggccagggctttaagaatgtagtgtatctaatggcatttggtagaactgtttcatattcagactaagggtttcatccaaaacctaagatttcaatttgtttcacgatattacataaagtacagtattcatgtggtgacttcaaagcaacaaaaatgttcaacactactcagtctatggaaggtgaaatactgttttaatatgttaaaaagcatattaaatgaacacattaatgagaggtagctcataaacagtacatttcagcagggcacagtggctcatgcctgtgatctcaacattttgggaggtggaggcacgaggatcacttgagcccaggagttcgggatgagactgagcaacagacagagacctcgtctctacaaaaaaaattaaaaaaaaaaaaaaaattagccaggtgtggtggcatgcacctgtggtcccagctactcaggaggctgaagtgggaggatcacttgagatggggagatggaggtggcagtgagccgtgattgtgtcactgcactccagcatgggtgacagagcgaggtcctgtctcaaaaaaaaaaaaaaaaaaaaagggaaacaaaaacccagtacatttcattcctcatctctctgtcaagctacacagagcctccttttacagaagagcaaataagcacagagtacaaaggagtttaaaggttaggcaaacattccttcaccagctcagaggcaaatgtccagaagagagcctgactgtttcacttttaaggaacaatgctgtataaatatggccactgatacgtcaaagtgacagcctaggacttggttctaggtgacttttacttcagcttggcaaacttcaactgtcctgcttgctccttctaaaactcattttctttttttgagacagagtctcactctgttgcccaggatggagtgcagtggcacaatcttggctcactgtaaacttcacctcctgggttcaagcaattctcatgcctcagcctcccaagtagccgggactacaagcgtaccaccatgcccaggtaattttttgtatttttaatagggctggggtttcgccatgttggccaggctggtattgaactcctgagctcaagtgatccgcccaactcggccttccaaagtgctgggattacaggcgtgagccatcacctctggcctcattttctatttattagtttctactagttttcgattaatttcctctattagaagaaaagattcaattcagagttgcaaagtaaaaacatacttggaagttaccatgaaataagaatactaatggtcaaagccttatgatcagaatgtaatcaatctgtgaagctcaaaagttcagttaactgtgtctgaagtggagatgccaaagataagctctattttatcagttgttatcatgcgtatacgaaaaatgaaacataaaagctctatctcctgaactcttccaatcctttcttactgattcatgacccccacttgcttttcttatttggacattccacccttcccctagtgctccgtgctccttactcaggttaaagaaactaagcctgggctaaagagcacttgaaaataaagaagtgcaaagatgtaaccaaaaattgctaaagaccatgttttccttacaacatttctgactgtggttctctacaggaagaaccagaccactgccatttgcagaaacatttgcaaacacttgtcctgatgaaggcatcgacttactggaggatttcctacgccttctaggaacagatgtcatgcccctttgtcaccaagaacagggcagtaccagtcacaggagtcactcactgaaggtggaccaaatgcactgtgaccccagcatggaagcccttccaaaagttcccattttttcttacaagacaaactgacgccttcctcaagaccctctcctctctgcctcctcatccacctctccagcgtggtactcaaaacacacccttcttgagttacccttcccacaggcctgagatgttctgcgtgctgcctggttaatgcctccctgacacccctgtctgggtcatctttctttctaacacactttcacggaccacactccttcagaactcttgcctggtttttaattattcactcattagtatcacaattggattaatactgcattccctcaatagactacgctccatgagaccagagccgtgtctgctgtgtttctgcaggatgtacagccctcccagcacggtgctcgcttccctaatgccattccacagtatttgttgcagagaaggaagcagcatgccaggacagatggagacaggactaatttggcttgaggtatgtaattttgaacttgagcctctctctgggactgtaaaactccaaatcaaagtcttaatctgagaatacatacatctgaaagagtgattagggactggtaaacatctattaatattcaactctgatacaaagtacaagttgtttattcttaccacgcaaggccaaaaaaggggagaaaaaaaaaaaagcacacagcatatgcactgggaaagctttcgcttattcaaaacagtatttgtcaagcacctccaggtctgggtgctgcaggggaaacaaagattaaacagccagggctttgcttccaaggtgcttacggtcttaagaaggagacaagacatgtttataaatagccaaaatgcaacccagaaaaggctaaaaaacactgagagggagggagaaataaacgaagcaagaggtctccggaggaagagatgaatgaattagcctattaataactcctcactgtaatcccaatgtaaagcaaggaattccaaaccaggaaaggtcaaactgaagtatttgaggaacacaggcgtcgccctaagcccttcacaggctcgctggggataatatcgcagctgaaaccgaacatcaagctggcttttcaaaccttcagttatttacattagactgagaggggaaaagcgctaagagtgcaagagcagagaaagagcaagaggaaacttgaaaaggcggatcacgccaatgcgctgtgcacagcgcccccgcgccccgcgcacccgctaccccacccgagcccccagcggcccgcgtcccccatcccggtcccaagcccagacacctccgagatccgtcccccggctccggccggcgccaccgccaccctcaagacccccgcagcccaggcccggccccgcgccaccgacgccccccgcggcccgacccgcgcgccccgccagcccgggcctcgtaccgtaggtttcggacatggccgtctgcgacatcttgggagcggcgccgcctctcgccgggtcaccggctgcactcgcccgcggtccgccggcgcgtctcggtggggaaggacctggggcgggggaccggaggagggaggggcccgaccggtccccacggcaaccgccggtctcccagcggctgcggcccagccggactccagctccgcgcaggcgcagggccctccaccctccgtccggccgcgaccgcgaggaggaagaggagatgggctacgcgaggcccggcccaccccgcgttcgcgcgtgcgcacggggaggccggggcggggcgcgtgaggacttcggcgcgcgccggaagcacgtgcgcgggctgggcgctctggcggtgtgcgctgaggtgggcagagcggcaggtgggggcgttgggggctgagtcccgatttccctgagggagggtcgggtagaggcgggcggtgggcaggtttgggggtgacagagggctggggacagtggggtccagttgccggacagaggaggaaggtgcccgcactggggaggaaagcagtccatttgccaaattggcccgtctcagttaagacgttgtcttcggtcatcatctgcggctgtcagccaggaaaaaacttccctgacgctgttacgatggaggccagaacttggttaatgtgtaacaaggaggcagtaggccccaggtgtccagccagaggccgccctgtgaatgggaggcaggttcatttacccgttgggaagctaagctttcactccaaactgccgggccctcttggatggagctgagcgggtgtgggcggaatgacagaagcgcaagatgcccaggtgctaaaaggtcatcgcaagactacaggctgcagcctctccacatcccattttagagggttctggattacggttgagaagtatctcccggccctcagctggggatgtgtttccaaatttaggagtttttttaatttttattttttaacagggtctggcactgtcagcccagcccaaccgattctcctgcctcagcctcctgagtagctggggctaggggctcacacgaccacaccgcgccaatttttaaattttttgtagagatggggtcttgttatgttgcccaggctggtcttgaactcctgagttcaagcatcctccctccttggcctcccaaattgctgggattacaggcatgagtcatctcacctggccttggatagtttggtttcagaagcaaaactgagttagaatccccttctgtgggaaatgtagagataaacatttatgggaaagagaattttggttgaggatttggcccatctgagcttgatcagggccacatagcgcctcatagttcccaaccttgttcacaataggtagtcgaatgctcaaaatatccttg

SEQ ID NO: 1566 - DNA, 6000 bp, Homo sapiens
tagcaactataaactcaaagaccagagaagttcagtgaaactcaaggacaagaactttaaagaaaatcaacaccaaggcacatcataatcaaattgcttcagactagtgatacagatgaaatcttaaaaccaagcagagataaaagacacgttgcataaaagaaataaagataagaatggcagttcactccttatcggaaacaaaatgagccagaaaacactgaaacagtatcttcatgttagaaaaaaaaaattgaaaaccctaaaaatcgaaattgagcaaaaatagcttcaaacacagaagtgaaataaagacttttttggacatataaaagctgaaagaattagtcaccaggagatctacacttcaagatctgtcaaggaaagcccttcagacaaaagggaaatgagaccatggaaatctaatctatacaagagaataaggagtcttagatatggtaactatgtgagtaaatataaaacacttttttcttattgtttaaatctattgaaaagaattggctgaaaatgcagtatatatgtacaaagtattgaatagtattcagtcttaaacaggaaggaaattctgacacattctacaatgttacagatgaatcttgaggacattatgctaagtgaaatacgacagtgaggaaaagacaaatactgtatgactccatttatatgaggtactgtacctagagaagccaattcctagacaggaagtaaaatggtggttgccaggcactgtggggagaagtgaatggggagttgttgttaaacaggtacagagtttcaggtttgcaacatgaagcgttctagagatggatggtggtgatggttgcacaacaatgggaatatatttaatgccactgtacatttcaagatggctgagttgctacattttatgtctattttaccacaattaaaaggaaaagagagacagagaattagtagcttattaagtaaaaacaataacaatgtatgtgggtgtacaacatatgtagaagtacaacatccccagcacagatgctgggggaggatggaagcaaatggttgtcagtttcttatactctgtataaagtagtgtattatcacttggaggtggactgtgatgaagacctatactatcaaccccaaaaccaccactaaacctcacaagaagttattcttcctaagtgacaaatgagataaaacaatcacaaaaatgcctctgtccactgaaaaggcctagaaatagcggtcccctggagcagcaagcacaagcgtacatatatattaaaaattgtcaaaatgtacactttaaatatgtgcaggccaggtgcggtggctcacgcctgtaatcccagcactttgggaggctgcccagcactttgggaggctgaggcaggcggattacctgaggtcaggagtttgagaccagcacagccaacaaggcgaaaccccgtctctactaaaaatacaaaaattagccaggtgtggtggcgcgtggctgtaatcccagctactcagaagtctgaggcaggagaatcacttgaacccgggaggcagaggtcatagtgagctgagatcacgccactgcattccagcctgtgcaacaaagcaagactacatctcaaaaaataaaataaaataaatacatacgtatgtgcagttatgcctatacttcaataaaattgtttcaaataaaagcacgatgagctgcctggacaggtgaaaattccagtggtagtcataatgtctttccatagactttctcttctcctttctttcagggacataacaatattgcatttcctgtcctctttgaaattaagtgttgccacatgacttgctttggcccatgaaatgtaaatagaagttcttatagcaattcctggtaagtgcttctctaactaatgcacaatcagtcctaatgcatagccactcctacctgagtgattgtggagatgcatttagataaaacacactcggtcagcctgggtctaggagggcccatgagcaagtctctgctcgtgggagtggacaggtagtctgagcgaggaactttgctgcgtaagtcataaatgggttgagagatctgcattactgcagttaatctagcccattctgactgaatattccctagcaacagaggtatctgatcatggacatagttttgacagtggaaggtaaagtggcccagtgacctctgaggtgtctactttcttgaagatgtgagttatatgtcatagtctccaccagcctgggtgtggaattgagcttccattttcaagtctccacttgtatgtctggaatttggctccttctcaaggtaacacccagggattgctgagttcccaagtgctcagacacaagtccactcattttcttcaattccagttaccaaagaaagtcaccattccaccgaggctgtgaccagtgccctccaccaggcctagctccaagaatctcatgcatcaagccccagggctcctcacgttgggcattaaatgtaaggtcatgccacattctttaacattgtcaggaagcaggaaggaaagtaccagatacttgaaggacccactgacctggaaaaaagtgggatctagtttcagcttgaaaaaatccttcttcataattacatttcccttaggcaaatctctaacatgcctaggcttttgtatatctgtttttactgcgtcacaaacctcccccaaagagaagggagacgataactggagaaaaccacaaattaatcttccaatatttttttcttccatataatcagcagtgcctcagaatcaaagcagtctctaaaaatattttgaagaaatttattttcttggatcttcaaagatccaaagttactgagatgcaaagaatcttccacagtatcatccaaggatactgaagggctccttcaaacctcgcccttgtatatttcttcttccagttgtgatactgcagttacatttgcaaaccaaatgatccctttgggtggtttttccaaaacaaatcgtctttcccaaaggcctacctaagtcttcattttccacaaagtagaaaactgcccacagctttgaaatggcagcataatttgtatttctaccaccttgtccaggtttcagggatctctggtccagtttcagtcaataatgctaactatcactgcagctcactgacttctttcttgtacatagcagtttttcgcaggaagaaaacaaatctaacgaataggaataacttcaggtgatgctgttttcttcccgcttcctgggatcactgtctttcctctgaaatggttttaatcagaaccaatctgttatactcaggagcctaaatcaaacacgacatgcagagagacaaacaagaaagcaacaaatgatctgagccactgaacaagaaatatatataaaacagttttaggaattacagctgtcacaacttttcaccatggggccttctctgtgatttagaaaaaactgcatttatttgttattaggatcggagacaagagaaaaataccgacccaaatagccactggggaagagggaagctctgatgccaatttatgtggaggatggagccaaactgactcacacacacacacacaaaagtatgtactggcattttccacacagtccaggtcacttgggagcttagccaaggatattttgagcattcgactacctattgtgaacaaggttgggaactatgaggcgctatgtggccctgatcaagctcagatgggccaaatcctcaaccaaaattctctttcccataaatgtttatctctacatttcccacagaaggggattctaactcagttttgcttctgaaaccaaactatccaaggccaggtgagatgactcatgcctgtaatcccagcaatttgggaggccaaggagggaggatgcttgaactcaggagttcaagaccagcctgggcaacataacaagaccccatctctacaaaaaatttaaaaattggcgcggtgtggtcgtgtgagcccctagccccagctactcaggaggctgaggcaggagaatcggttgggctgggctgacagtgccagaccctgttaaaaaataaaaattaaaaaaactcctaaatttggaaacacatccccagctgagggccgggagatacttctcaaccgtaatccagaaccctctaaaatgggatgtggagaggctgcagcctgtagtcttgcgatgaccttttagcacctgggcatcttgcgcttctgtcattccgcccacacccgctcagctccatccaagagggcccggcagtttggagtgaaagcttagcttcccaacgggtaaatgaacctgcctcccattcacagggcggcctctggctggacacctggggcctactgcctccttgttacacattaaccaagttctggcctccatcgtaacagcgtcagggaagttttttcctggctgacagccgcagatgatgaccgaagacaacgtcttaactgagacgggccaatttggcaaatggactgctttcctccccagtgcgggcaccttcctcctctgtccggcaactggaccccactgtccccagccctctgtcacccccaaacctgcccaccgcccgcctctacccgaccctccctcagggaaatcgggactcagcccccaacgcccccacctgccgctctgcccacctcagcgcacaccgccagagcgcccagcccgcgcacgtgcttccggcgcgcgccgaagtcctcacgcgccccgccccggcctccccgtgcgcacgcgcgaacgcggggtgggccgggcctcgcgtagcccatctcctcttcctcctcgcggtcgcggccggacggagggtggagggccctgcgcctgcgcggagctggagtccggctgggccgcagccgctgggagaccggcggttgccgtggggaccggtcgggcccctccctcctccggtcccccgccccaggtccttccccaccgagacgcgccggcggaccgcgggcgagtgcagccggtgacccggcgagaggcggcgccgctcccaagatgtcgcagacggccatgtccgaaacctacggtacgaggcccgggctggcggggcgcgcgggtcgggccgcggggggcgtcggtggcgcggggccgggcctgggctgcgggggtcttgagggtggcggtggcgccggccggagccgggggacggatctcggaggtgtctgggcttgggaccgggatgggggacgcgggccgctgggggctcgggtggggtagcgggtgcgcggggcgcgggggcgctgtgcacagcgcattggcgtgatccgccttttcaagtttcctcttgctctttctctgctcttgcactcttagcgcttttcccctctcagtctaatgtaaataactgaaggtttgaaaagccagcttgatgttcggtttcagctgcgatattatccccagcgagcctgtgaagggcttagggcgacgcctgtgttcctcaaatacttcagtttgacctttcctggtttggaattccttgctttacattgggattacagtgaggagttattaataggctaattcattcatctcttcctccggagacctcttgcttcgtttatttctccctccctctcagtgttttttagccttttctgggttgcattttggctatttataaacatgtcttgtctccttcttaagaccgtaagcaccttggaagcaaagccctggctgtttaatctttgtttcccctgcagcacccagacctggaggtgcttgacaaatactgttttgaataagcgaaagctttcccagtgcatatgctgtgtgcttttttttttttctccccttttttggccttgcgtggtaagaataaacaacttgtactttgtatcagagttgaatattaatagatgtttaccagtccctaatcactctttcagatgtatgtattctcagattaagactttgatttggagttttacagtcccagagagaggctcaagttcaaaattacatacct

SEQ ID NO: 1567 - DNA, 6000 bp, Homo sapiens
gtgaataatttgttgggtttgggacgtactgcattcagatgcctgtaggccacccaggtgtagttaggtagctgaaaaaaagatctgtagtttgagtgaaggatgtgactagaaatatagatgttacagtcatcagagcatcagcagtaaagtcacaggcatggattggaatactttacagttcaaatgaccatgagaaagaatattttgttttttcaaaaaaccatgctttcaaagttctcgagcatggagtcattacatgcctccctggaccaacagcacctgcacggcccgggagctggtcagatgccgatctccctcaccctccaagtcaggatctacattttaatacaccaggggactcgtgtgcacattagtttgataagccactggtgcaatgtttcccaaactttggtacttgaaatgttcaccagctttcagtgaatgagaaaaagaaaatgacaaacatgtataatcatatatttattcaacttgaagaaatgtcctttgttttggtgttacaggattcctttgttgacatgtttacctgttccatctttcatgaaattaaggtaaagggcaattggggtgatttccctaagagcaagttatttcatactttattggaaccaggtgactttgaaatgctatttatacacgggcacggtggctcacgcctgtaaacccagcactctgggaggctgagaagggcgggatcatgaggtcaggagtttggaggccagcctgaccaacatagtgaaaccccgcctctactaaaaatacaaaaaaaaaattagctaggtgtggtggcgggcgcctgtagtcccagttacttgggaggctgaggcaggagaatcgcttgaacccgggaggtggaggttgcagtgagccgagattgtgccactgcactccagcctgggcaacagtgagagactctatctcaaagaaaaaaaaaaaaaaaaaaaaggaaaagaaatgctatttcctttaccaaggatatcttcttcacttcatcttgccttgtcatcctaaatttctcatgaatcgtattttgatgagcaaagcctatattttagtttcttagggctgccatcacaaagaaccacaaactgggaagcttaaaacaacagaagtttattgtctcacagttctggaggccgggcattcaaattcagagtgctgacagggtcaaggtctctctgaaggctcaagggaaggatccctccttgcctctctctagcttctggtggttgccagccaccccttggcactccttggctggtagatgcatccctccaatcttggcctccatcctcacatctctttctctctgaatgcatttgtgtctaagtttccctcatcttataatgacaccagtcactgaattagggctcaccataattcagtacgatgacctcatcttaacttgattacatctgcaaagaccttatttccaaatgcggtcacattcacaggtactaggggttaggacttaaacagatattttggggaacacaattcaacctgaacagcctaaaatgatacatttttaaggaaaatattctgataattctcaaaattatatggcaaatactgtaatactgtgctgttttcaaaatgaagcacaaaataaaaacattaagagtatattttaataaaaatgagcatagaaccagcaatttgaattgtattcttctgtttcatttgttattcccattgtagacggcataaactctaatatatgtagagattttgtattagatttttcctcactctcgaactgccccagcacttaatttcaaaagaaattcctggcattttcccactacatatacttttcagctcctttctgaacatcgctgcttagcatcaaaattactttcagccaatttgtaatctcccaggtctcagatggctgaagcagagttccttgggaagtcccaagccatactaactggccagggctttaagaatgtagtgtatctaatggcatttggtagaactgtttcatattcagactaagggtttcatccaaaacctaagatttcaatttgtttcacgatattacataaagtacagtattcatgtggtgacttcaaagcaacaaaaatgttcaacactactcagtctatggaaggtgaaatactgttttaatatgttaaaaagcatattaaatgaacacattaatgagaggtagctcataaacagtacatttcagcagggcacagtggctcatgcctgtgatctcaacattttgggaggtggaggcacgaggatcacttgagcccaggagttcgggatgagactgagcaacagacagagacctcgtctctacaaaaaaaattaaaaaaaaaaaaaaaattagccaggtgtggtggcatgcacctgtggtcccagctactcaggaggctgaagtgggaggatcacttgagatggggagatggaggtggcagtgagccgtgattgtgtcactgcactccagcatgggtgacagagcgaggtcctgtctcaaaaaaaaaaaaaaaaaaaaagggaaacaaaaacccagtacatttcattcctcatctctctgtcaagctacacagagcctccttttacagaagagcaaataagcacagagtacaaaggagtttaaaggttaggcaaacattccttcaccagctcagaggcaaatgtccagaagagagcctgactgtttcacttttaaggaacaatgctgtataaatatggccactgatacgtcaaagtgacagcctaggacttggttctaggtgacttttacttcagcttggcaaacttcaactgtcctgcttgctccttctaaaactcattttctttttttgagacagagtctcactctgttgcccaggatggagtgcagtggcacaatcttggctcactgtaaacttcacctcctgggttcaagcaattctcatgcctcagcctcccaagtagccgggactacaagcgtaccaccatgcccaggtaattttttgtatttttaatagggctggggtttcgccatgttggccaggctggtattgaactcctgagctcaagtgatccgcccaactcggccttccaaagtgctgggattacaggcgtgagccatcacctctggcctcattttctatttattagtttctactagttttcgattaatttcctctattagaagaaaagattcaattcagagttgcaaagtaaaaacatacttggaagttaccatgaaataagaatactaatggtcaaagccttatgatcagaatgtaatcaatctgtgaagctcaaaagttcagttaactgtgtctgaagtggagatgccaaagataagctctattttatcagttgttatcatgcgtatacgaaaaatgaaacataaaagctctatctcctgaactcttccaatcctttcttactgattcatgacccccacttgcttttcttatttggacattccacccttcccctagtgctccgtgctccttactcaggttaaagaaactaagcctgggctaaagagcacttgaaaataaagaagtgcaaagatgtaaccaaaaattgctaaagaccatgttttccttacaacatttctgactgtggttctctacaggaagaaccagaccactgccatttgcagaaacatttgcaaacacttgtcctgatgaaggcatcgacttactggaggatttcctacgccttctaggaacagatgtcatgcccctttgtcaccaagaacagggcagtaccagtcacaggagtcactcactgaaggtggaccaaatgcactgtgaccccagcatggaagcccttccaaaagttcccattttttcttacaagacaaactgacgccttcctcaagaccctctcctctctgcctcctcatccacctctccagcgtggtactcaaaacacacccttcttgagttacccttcccacaggcctgagatgttctgcgtgctgcctggttaatgcctccctgacacccctgtctgggtcatctttctttctaacacactttcacggaccacactccttcagaactcttgcctggtttttaattattcactcattagtatcacaattggattaatactgcattccctcaatagactacgctccatgagaccagagccgtgtctgctgtgtttctgcaggatgtacagccctcccagcacggtgctcgcttccctaatgccattccacagtatttgttgcagagaaggaagcagcatgccaggacagatggagacaggactaatttggcttgaggtatgtaattttgaacttgagcctctctctgggactgtaaaactccaaatcaaagtcttaatctgagaatacatacatctgaaagagtgattagggactggtaaacatctattaatattcaactctgatacaaagtacaagttgtttattcttaccacgcaaggccaaaaaaggggagaaaaaaaaaaaagcacacagcatatgcactgggaaagctttcgcttattcaaaacagtatttgtcaagcacctccaggtctgggtgctgcaggggaaacaaagattaaacagccagggctttgcttccaaggtgcttacggtcttaagaaggagacaagacatgtttataaatagccaaaatgcaacccagaaaaggctaaaaaacactgagagggagggagaaataaacgaagcaagaggtctccggaggaagagatgaatgaattagcctattaataactcctcactgtaatcccaatgtaaagcaaggaattccaaaccaggaaaggtcaaactgaagtatttgaggaacacaggcgtcgccctaagcccttcacaggctcgctggggataatatcgcagctgaaaccgaacatcaagctggcttttcaaaccttcagttatttacattagactgagaggggaaaagcgctaagagtgcaagagcagagaaagagcaagaggaaacttgaaaaggcggatcacgccaatgcgctgtgcacagcgcccccgcgccccgcgcacccgctaccccacccgagcccccagcggcccgcgtcccccatcccggtcccaagcccagacacctccgagatccgtcccccggctccggccggcgccaccgccaccctcaagacccccgcagcccaggcccggccccgcgccaccgacgccccccgcggcccgacccgcgcgccccgccagcccgggcctcgtaccgtaggtttcggacatggccgtctgcgacatcttgggagcggcgccgcctctcgccgggtcaccggctgcactcgcccgcggtccgccggcgcgtctcggtggggaaggacctggggcgggggaccggaggagggaggggcccgaccggtccccacggcaaccgccggtctcccagcggctgcggcccagccggactccagctccgcgcaggcgcagggccctccaccctccgtccggccgcgaccgcgaggaggaagaggagatgggctacgcgaggcccggcccaccccgcgttcgcgcgtgcgcacggggaggccggggcggggcgcgtgaggacttcggcgcgcgccggaagcacgtgcgcgggctgggcgctctggcggtgtgcgctgaggtgggcagagcggcaggtgggggcgttgggggctgagtcccgatttccctgagggagggtcgggtagaggcgggcggtgggcaggtttgggggtgacagagggctggggacagtggggtccagttgccggacagaggaggaaggtgcccgcactggggaggaaagcagtccatttgccaaattggcccgtctcagttaagacgttgtcttcggtcatcatctgcggctgtcagccaggaaaaaacttccctgacgctgttacgatggaggccagaacttggttaatgtgtaacaaggaggcagtaggccccaggtgtccagccagaggccgccctgtgaatgggaggcaggttcatttacccgttgggaagctaagctttcactccaaactgccg

SEQ ID NO: 1568 - DNA, 6000 bp, Homo sapiens
tgaagcttactgagcatgcctcaattataaaatgcctcatttttgtatttgcttattaaaataatttaaaataatcctaatgtaggcagctgacgaaatactgtgtagttgtcatttactaaagtaactatatatgggcatcaccttttaattgattcattcaaacatctgagtgcctatttgtcagatgctgggatacaaaaatgaataaatcacaccccttgccccccaagaaactgtctttcatgggagacagtcagaggataattataatatcacaaggctgatgtagtagctgagagatgcacaggctcagggtaacgtgaagaaggggacctgccccagccagaggatagaggaggtgtcagggagggctttcaggggaggtcttagatgagctcagtctttcagaatataaggaagagtgagccagcaaagggagtgaggaagagggaatagcaggagaaaaggttgaagaaaggcaggagccagccagtcctcatcaaggatctagaactttatcttgtagattaccaattgtcaaccctggatgagcactagagacactgagatgcattaaaagttctaatcccaggctctgcctctggagacgctgaactaattgggctgaagtatggtcgaggcaccagtgtttttaaatgtttactcatgctgttctaatgttcatccaagattgagaaccactgctgtaggtggtgggttgtcagcaggtgggtgatgtgattgggttgtgacttgagataagtcatgtatgtaggaggttatgttgaaaacaaactgaagggaggacaggcctggaggccaggataccaattataaggcatttttgagtaatcctagtaagagatgactgattaatgctttaacaaggatatggaagcagagatggagagagagatggatctaagatatatttaggcagtagcatcttatgactcatatgcccaatagtgggacaggacaactgactcttaggtgggacaaggtgaggaggaagggccagcaggggaggaggaaccaaggatgactcgcagctgtcacactggtgtctctagacagagatggggtggagccagaggagaagcagggaatgtgagggagtaaagatggctctgttgcaaatgtgcggcctttgcggtaacgctgagacatgaacatggagttatctagtaagcttggggaagagttcctggctggcagtataagtttgggaaccatcaatatataggaacagctaaaactgtggaagcaatgtgatcgtccggagaacagtgtttaaggagagcagtgatcaacagaaccctggagttggaggatgagcagaggaagaggaatctacaaaaaagatgaaaaaggaaatggtcggaaatgtgtgaagaaaatcaagggaatgtgggtgtcacttaagccctaattataagcaaatcaaaggagtgttcattatgtaatgtaatagtaacagagggaagcctcataagctaagactgagctgaaaaacacacattgggatggggaatagaaagtcagtgatcattttgatcaagaacaatttcagcagaattatgaaggtagaagatggctggccgtccgttaggaagaagtaggaggtgagcaagcagagtgtccactcctctcctgaggaagcacaggctggcactgtagggtgcaaagggttaatttaaagctggggttgtgggtgatgggagaaattccagcatgtttaaatgctgagggggaaggagagaagaatgggcaaggagagggcagggaagaaggagggtgctaggtgaagtaggagggaggagagtcgggcccaggtagaagggctgggtttcaacagaagtggacatgtcatctttttgtatttttttttatcagaaagaaaaaaaaattactaagcttggtacaaaaaccaagacactgttacataaatccttacagttggcttactgttgagtattattaagctcagcatgaggttgtatttacatgaccttgctattttaatattgtatccctgaatgcatcagatagaacaactcatatgcagtcttccaagatgtgtttttttctgagatcatcaaaatcataagtacctctaggtgaaaaaaatataagagtataaattaggattcttcagcagtactttttatttttttaatgggtaatacattcagaaaccattgttttcttccctttttttatataaaatgtatcatatgatagactaccacgccttgcttttttacttactattgtataacctacaaatcattacaaatcagcttatagtttccgtatatacatataatacataaggtacatatatataacataatgtcatacataatgtgtgtgtgtaatgtgtaatatgggttgagtatccctaatccaaaatgttccaaaatctgaaactttttaattgccaacattgccactgaaaggaaatgctcattggagcacttcaaatttcagattttcagattagggatgctgaactggtaagtataatggaaatatttcaaaatctgaaaaaatccaaaatacttctggtttcaagtattttggataaggactgctcaacctatatttggataaggaccgctcaacctatgtgttaccataattcatgagccagtctactttggacatttgggttgttgccagtattttgctattataagtaatgttacagtaaataattatatatatatatatatatatatatatatatatatatatatatatatatatattttttttttttttttacatgtgcatgagtctgtgtgtcagacaaatgcccagaagtggaattgctgggtcagagaacataagcatttgggatcttggtgtagaggctgtcacattttctcctagtgatgggcttatttcactaaagccatgtccacagcatgtagtatcatcatacttggacttttggcccatctaataagtgaaaaattatatctttgtaatttaattttaaattattttatataaataatgtattcacataatttgaaattcaagaagtataaaagagtatgcaatgaaaagtccccctgttaccaccccctcctgtcctcagccatctagaactcctccgaatcagccgttccttatgtatcctgctagagatgttttgtgccggtgcaagcaaacatatatatagttttttccctttattcagaatggtgggatatatacacagtgttctgtactttgctttttttttttttaatctatttttggaatcaaagaaacataaaagccttttttaaaagaagacttgcttggtccttaggtgagctggacccagaaagaatgggctcaggtattcagtacggagatgctgccttgagacagctgaggtcaccgcggcgcgcacaggccccgaacgctcaggagtgtggttgttaggagagcacacaggtgggtttggacacctccctgccctgagttcctggcaagctcaagtgcagaggcctgttaaagctttgggaagctgcagtatgaaaaagaggggatcccagccgggtgcagtggctctaattccagcactttgggaggctgaggtgggccagttgctttagttcaggagttcgagaccagcctaggcatcatggtgaaacatcatctctacaaaatacaaaaaattagccaggcgtggtggcgtgcacctgtagtcccagctactcatgaaacttaggagaattgcttgagcctgggaggcggaggttgcagtaagccaagatcataccactgcactccagcctgggcgataaagtgagaactgtctcagaaaaaaaaaaaagagaaggagaagaacccataagttaaagttggatgttctaactgaaagaatttatactctataggaaattcttatgctcttgttcagaaagaaaggaagggcaggtggtggttgatgggaagggtgagatatcctgattccttatgtcagtgaggagcccttcctggattgattgaggtctaaatgaatgtgccttttgctaaaacaggaggcctatttataaaattgacaaatgtctccctttaactttttaaagcttcttcttttttcccatttaccacagtggacgttttatttatagtcgacatcatgtagtaggcacaggcaagtgttaaaagacaagatattcacgaattctcttttaggctttaagctgtatttacttttgcatttatagttatgcagattttgaaattgttcttaatattttttaggtgttcatacagtggcatttgggacacaatcgttggaacctgaagaatctgaagttttttttaccaccatctttttctactctgtatggaagtagatctttatggggaaaagagaatttggggtgttctgcaagccagtcaaagtggcacagcaaatcatataaatcgaattaaatggacaacaccgttagatgtgtatgtaaaaattttctgtttcatatttttcctttcactttcggtttaaaacatgctatatgtactgtatgtcctgtagcccagtgcggctccacagcatggaatctgatgtatgatatgatagaatgtggcactaaatgcagtttcagattttattttttttaatcatatgaactaaaattgtcaattgtgaggtgtgcttttctcatcatgttggttatattgcacaattggttatatttatgacctgatattcaaagactctggcattgatagccagtgtgttttcttatttaactccgtttactacattctacatggtgtttacgtgatccacacttgaaatactagatcagtagacattcactaatataccaaaataaaatgaaaaattgagtttttccgtgaactttatactgtccagctctgttgattttaaagcctcttcatccaggtcagttcaggaagtatatctggagtacctgctctgtttttggctgtgagactagcactaaggattctggtacctttacccaaacctactgggctactaatacttctctcagcagttgatcaaatacaatagaccatgtaagctggggccgctcatccacttccagtttgctggtctccctgctagaaaacacattgtactgtgctttttctggaattcagtataatggcatcactgcctgtttttcacatcttttgtttcctgttcattttaaggaaacctactaaatccagttaatattaaatggacaccactcattaagaaatttctttatggcttctgctgaatacttaaatgccttactacagttatccagttgacatgtttttaattcatataaggtatattgggtatattgaagtatatattgtattacaaagacttgttcttgtattttaaaatgtcagtgcaaaaaatatatggtggaacctttctttaaagttgaaatgcagtattatttaaatctgaaaggttaaaaagctttcttcaccttatatatgttcttccactgtgactttttagttgaagactagtaaattaacttttagttagaagatgcctactgcttttgttgtttattttaatcagcagagcacagagacacataaaaactctgggaaatgactaggataaaaatatcagtatgtatctgttttagatattttgagttttgctttttttatgccttgaatattttatttcaaaaagtatctgaagcaaattctcagactgaactacttcttagacctcactgtaagaatattttattcaatgtctcatttatgatagatttgcaagctgctcatttttgaacagctttttgcatgggataggagcatgtctattctaacacatcagcttattcaaaagcaagaattttaaaaataagataaatgtaaagttgttttataaacgatcctgttaattaaaccacagacaccatatatccttctgcatcctttggccaataaaagttgctggagaaccaaaccatggtggttcttaatcaggctttgcct

SEQ ID NO: 1569 - DNA, 6000 bp, Homo sapiens
aatctggagcttggagaaacctaggttggaaaaataagtttggcaccatcagtatatcaacataaagatggtactgaaaatcatgggaatgaagatttcacctatggaaagataactgattgagaagatagttaagaaagggaatagcatgcataattcaataacatttacataaaaatttaaactgcacaaaacaactgtacaaattttacaagaatacatctaaacaaaaggatacaaaataaacacattataatagttttctaggggtttgaaaggagaaagggtataggagaataagaagctaagtgaagctaagctatgaggactcaaagtcataagaaccatataatggactttggggactcagggggaaggatgggagggggtgaaggatgaaaaacttaaacattgggtacagtgtacactgcttaggtgatgggtgcaacaaaatctcagaaatcaccactaaaaaacttatccatgtagtcaaaagccacctgtttccccaaaactattgaaatcaaaaaagagagtaaaaatatgaatagaaaataggaatagaaatgaaatatttaaataaaataagaatggatcttatactccataacatgtcataaggtcagtgtatttactcaacactctgtacctgaggtcccactatatttttaaaaatgaattaaagaggaaagactatttaggagtgagccctgaggcccttccctatttataagtgaaaatctgtcaaagaacagtgtgaaggaataggtagtgaaacaaagtggaagtttgggagagggaaatacggagactttgatatttcaaagagcgagaaagaggtatttccaaggagaaggggtgtcaattgtgtcaatgctgctgcaaacataggaaactaattgttcattgtatttgcaccttgcaggtcactggtgaccctggaaagggcagtatgaatggagtgacatgtactgaaggcagattgtaataggatgaagaaagaatgagaagtgaagtgaagatggtgatcaaatatgtcctggaaatgaggagggagttgaagtgggatgcaaagtcagagcagcttttgtttgtttttaacatgagagctgagacagcaaagttacagtattaacttattctatgggtcaattaagagaaataaccagacaaagtaagaaaaagagtgggtagtgtctctgaggggtaatggaatccagcacattgaggaattgaagtttttctggagaatggagagagaggttggttaactttctgagttggtaattttagtgttttgcaaagtttctgtacgtgcacttagtcttaggaataaaaaagttctgcaagacatccaacctaaacagtcatcacccttgctacctctccgccacttatccttgcacagaggcatcccttccagttcctgggtatatacttccacatctctaaagattacctcttggtttttatttctgtctgtccagtttatggttttaggtattagatcatgacttctcactactgaagacgaagattaatgttttttttttcaccgtgtctgaatctctccaaacttctacattctttccatctccccatcctttcagtatagttacatcaacatttcagttagatcaatattcaacgtttgatttattataactatggccattcaaatttgataatgattattttcccttttctgcaaaatacaactatctttatttgtcagtttaataactgtcatgctttttccctttggttacttttctaagacttataaatgtaaccctcaaactctcccccaatcagctaaattccttctcagtatattcaaggcattagcaattttatctttttgagtaaatctattccagaggctgtgacctgcttccatctgagatggttgctctctaaggtaagtgcacagctgtcatagcctcctccaggcaatatgccacatctgtctcttgtgtcgaagaccctattttctaagtccataatttcctcttcctttgtttactcctagttacggtggagcacttacttgaggcgttttcttgaaaagtgtagataagaagtaaattttttgacatcttgatcatgtgaaaacattttaattctcttcacacacttgatttctctgggtatagaatataaagttggaaataattttccgttaacaatttgaagacatcattcaactgctgtctggcttccgatattgttgttgtgaagtctaaggatttctaatcctttgcttatttatttttctctctgaaagattccagtctcttctctttgcccttggtattctaacatttcttgttgacataactcattctggctagttcatatctgctagttctacaatatatttttctgaatttatttttttaaggtttattccattttttcctaatgtttcccctacattattcacatgttggacatactgaactgtttctctaattttatttacttcttttattttccttctctttgaatatttgctctactttctgggagacttttatgggtgtatcttgcaaattttctgttaagcttcctctaggaaacccactggtaatctcccaggctgggaggtatcctaaattagaatttgcaaaagtctttagtttgaataaggagaacattttgattgatacaatttgaacctcgcaatcaattttgtcagccaggtgttgagatttagaacacaggcaagagaaaaccattgcacttttcccttgtccctcagcaggacaccaatcacatcccctaccttaaacagaaagcaaagtaaaacaaacaagaacaaaccaggcaagcatcaacaagaagaaagcaggtcaatattattatcagacaagtccaaagttaaaaaaaaaaaacccaaactctaagcaaagtaaaaacattatttcaaatagataacataagtcattctaaaatgaagatatctagcctttattaaaggctttatgtacgttttattacgaattaataaaaataaattagctaagttaatatttcctaaattttagtcatttatatagcatcttcatattatactgaatattttacttcaaataaaatgaataattaaaaatggaacttcatattactactgcagatagaaaatcagtttcactaataaatcgaagtaaaacacacaaataaatatgtggatgttcctgggcatcaatttttctcttctatgtacaggaataataataggacctatctcatagggttgtttttgagtgttccaagaattaatacatataaagtgctttgaaaaattctagaacataatatgtgtcataggtaatttttaaaagggattaaaataacctatttataaaaaggctattaatttgggttttgaaaagttaaactgtatggtagaaataagagacatgctcgaaacaaaaatgaaacaaaaaataaaataaaatgagaaatatacagcaggcaaataatagccaatatgaaattggtagagaaatatcaatattaaaaaaagtttaaaaggacaagcaacaataacaataaagaggggcaccacacaatgaagaaagagatgatctatgaagaaatgataaacatatgttcattaaataattttgtgtaatagcaaagaaaaatgttctttattaagaaactggataaataaaatatttcatattcatgtgatccaatatgattaattttaaaagatcatggctatatcttaaaagcatagagttcaattatgcaacagtaaaactttaaagtaaaatattaaaaccattgtttgtatattagtgtatgaagcaaaaaatacacagaactgaaaggatgcatcaaaataatgatatacacaataatgatacctgctgggaaggaggagaacaaaaacaaaacgtcattccattattagcaatgttttaaagaatttgcattcagttttctagtgtgttttgattgtagttcaactattacaatctcatttgaatttttatattttaaatatgtgtcaaatttataagtcacaaaataacataatgttaccaaaaggtttggcaagtttgtaagtttgactcataaatttggctttgcaggttctggacttttgattttaagaacatccgatcgctctctctttactgtcatctggttccaagcaatagaaaagagaaaagataaaactgtggttcagatgcaattttatatcaattcctgcttttctgtaatcaactattatattaaaacaatatgcctttaatttgaaaatgtataaattagctatgcaaaaaactgggagaacgatatacaaataataaaaattccgaggttccctataattgtgtacgtcttccacaatacattaaaaaaaaaaaaagagttctgagggtataggctaagaagagaaaggaaacggtagcgatctcaaaatgataagttaaaagaaataagtaagtagcttatttttcagttgtgggattatgaataattactatttcattatctacactttgctgcacttcccaaaatttctacacagaagatacaatctggaagaaatgaagaaagatttcagtagtaagaacgtgtaatgagtgattacatgataaataaaacaataaatatttctttctaggatatttcaccaaccaaacacgacctgattcaccaactaatactcccgccttctaacagccacacgtaaaaatcagaccggctccaagaataacctgagcctcctttcccataattcccttctttctagtttcccatgaatccgaaggccttacaccccacactactactagaaagttaacccgccccctcattctttactggtcattcacgattggtcctgccccacctgtcggtgtgaggctgttgattggataagagcggaggccggtgggcggaacggtttctgacaaccggcgtggaggcgtggccacagccgcccagaaattctacccaagctccctcagcaccatgtaccgagcacttcggctcctcgcgcgctcgcgtcccctcgtgcgggctccagccgcagccttagcttcggctcccggcttgggtggcgcggccgtgccctcgttttggcctccgaacgcggctcgaatggtgagcgcaggccgccatcccccggcctccccgcagtgaccttcagccctcctgcctgccggcctgggcgcccgcgacttggcgggagagattccccgggcgtccgggccgcgccagactctgggcttagcgcccgtgccggcgtggcgggcctcccggcctcgggacgcctcttccggcgcagggatggagccgcagcccgggagagcgcttggggagggacgggggctgtcagagagggtcctactgggcccgctcccggcgcctcctcggagccgtccgtggcgggccgaggccggggcgttttgaggtaacttcgctgctgctggcgcgcaggcccccagccccggggcgctgccctcaaggacagtgccggcgtgggcggagggtgctgggagaggggcagctcccgcaccgtcctgccccatagctgggccttgctggccggacactggccgcctgtgcatctagtggtttctgaactgtggtttgtttcgccaaggggcactgcactgctttcaggccctccaggtggggtagaaggttcttcgaagattttacttcctttgaaattgcatgctcagtttgttaggctgactatggtttcccccgtaattgttgtaaaactcttcaattccgaataccgcgggcatagtgttctgaagcatgtttgagcagattggctaggagctgaatcggtactttttattcagaaagccagctaagaacttaaagatccaagttcaggttatgacatgcttacgtaagtcattttgctctttagagtgtcatctttaggaatgcaggcttttaaaaagctttaaatacatatgtatattgttaggaaacgtttgagaaatgatagttgaa

SEQ ID NO: 1570 - DNA, 6000 bp, Homo sapiens
gtcagaagcagagtctggggaagtggctgctggaactgcagttctgaaaaacaaacaacaaacaaacaaacaaaaaacctaagagagtcaacacaggctgaaattgtttcttctgttccaggtaatggcaattcatctggagctaaagatcaaaagccaggaggaaatccccaggatccagcctgggttgggctgctgggtctgtggggagcaatgaggaactggagatgcacctgcaattaatcaggtacattcttgtgtccttaggtgtcttcgctttgttgtgctgtgtgctcgactacgggacgtggtagaaggggagctccttttgtgtcaggcatttcacaatatttggcccgtttaatattcatcattaccattttacagataataataattgtagccactaatactgaagttattccaagcaggcagtattataattttacatgcattttctcatttaatcctctcaatgaccactatgaaatcgtatattattcccatttcacagatgaggaaaatgagacataaattggtaaataacttgtccaaggtcaatagctagagaatggtggagttaggactctaatccaagcaatctgatgttagaaaatcatactcctgaaaaacagggaaaccaaggttcaaaaaggtgaaatcacttgaatgtctcacagtgagttggaatttggactcaggtgcactagtgcatattcttctacatcatgctatagaagagagtcggggccgggcacggtggctcgcgcctgtaattccagcactggggaagccaagatgggcagatcacttgagctcaggagttcgagaccagcgtaagcaacatggcgaaaccccatctctaccaaaaatacaaaattagctgggcacggtggcatgcacctgtggtcccagctgctcgggaggctgaggtgggaggatcgcttgagcccaggagtggatgttacagtgagccaagatggtgccactgcactccagcctgggtgacagagtgagccctatctcaaaaaaaggaaaacagggaccagggagacagggaaaaggttagaatcacaattttgaaggaaagaaggcacacacatacacaaacatctgtttttcatcttgtgtgatgagttgcccttgaaaagacaggatcctacttttccttaaatgttttgaagcatattaacctgagtatgggaggacctacttctaacaaatactgtacattcatggacagaagtggggaactgaatttcagaagccacagctatggagccctgaagagatgcccggagcctgggtttcaaggcccacaggcactggaactaggcctggcaagcactgtcagctcagctcctcggttgctgtgtagtaaaaagctgccacttaagtattggaagaatcatggctttcaatggaaatggatttcttatactgacagtttctcctggagaacgtcttgctctgttgtccaggctggagtgcagggatgcaatcatagctcactgcagccctgacctcttgtgctcaagccatcctcctccctcagcttctcgagtagctgcgactacaggagtgagccaccacatctggctattttttttttttaattttgtagagatgcgtcctcgttatgttgcccaggctgttctcgaactcctggccccaagtgtacctcccgccttggcctcccaaagtgttggggttatagatgtgagccactattcctggctgaaagttttttaaaattaaaatatggatagtagcagtttcagtctgagccacagagggtggcagcatcaatgaatggtaactgctgttacagagttcggaccacagctttctagtttcaaaaacatgatttttaaaagcatccacaggtgactggaaatccttaagcaacattaataaacttgttatatagtaacttatatgccagaatgttaatctaatagaggagaagataaggagaaaccacaaccatattcaaaacatcaatatctaatactaaagactacggaaaactgttatcagaagtcagaaaggcatggaatgaaatcaaagaacattgtatagtcttagaaaatatttcattggggcaacccgttcgggtccccttccacgctgtggaagctttgttctttcgctcttcacaataaatcttgctgctgctcaaaaaaaatatgtaatataatatatatattttatatatatatattttattggtctctgagaaagtctccctttgcagtacgaactaaccttgtggagtggctagatcatgactgctcacttcagcatctgtctcttactgaatgtttcttatcctcttgctttcttgggggtctgaggatggggggctgtagcatgtgtaagagatgacactcactagacacacatttttgagggctgccccgcagcaggaagcggctctggaggccatgggccaatgaaggtgctgtgacgtttacactcacagccatctgcagcagtccacactttattacagttacagttaacattttcttccacagtatttcctgataatatttaacaaaataaataatgagactaaaccctaactcatgtcaaatgagtttgagcaattattaccttacacacactatactgtcccaatagccaggtaatgaaatctgatctggacactcattctagaaaatagagcagtgctgtctgattgggggcgggaggagtattcccacgtcttggtcctgcagagacagctccccgacagctctgagaagccccagggctcagtggcacccgctttgaaactcaccaatgcaaaaaggagaatcaagaagtaaaaatctgtctgtattcaattgtataaacagtatagctttgtcatgtaagatactagcacagcaattagttactggtcttctgggcttcctccaaacctcaaacctttggtccccagacccacacacacacattcattcagctgaggggcaaatgagataaatcaaactgttttaatggcctcttggtatgcatttcaagagagttgacatcaacccaattttctgccagcagtgtatataagcgttcatttcgctaaccatcagtagcattatcactggaaaagaattctgtcctttgaagaaaagcaatgttacgttgtttgaatgtgtcattactagtgaattagaatagctgtcagtatttattaatagttttatttcttctattgtacattatccatggcttttgcgttttatgtggggagggatattcgtattcatcttagtggataaataccaccttacttggaaaatagagccaagggttaaattctaggcaaaaccaacaggaaaatcagggtaagttatctaacttacattaggttgaatgagagatggtatctgcgtataaaattttaaatgatccctacaaagtataactgggaaaaaaatgtggagttatgctgccacttctttcctaaaaggtaagcttccttttattgatacgatgttgtcttactcgagtgccttctctaaaatacacagaaccatgcagtcctctattttacagatgaagtaacagactgtttaaaaaggtgactcactgaaagctcttcattgttggaattcctggcccaacattcaaaccaggcatggcttgcttttcttctgacacgttttaacccctctactaaatttttagcgatatatatttactcttaaaatgaattacaattattctgtgatgttctttgagataatcaaaaactctctgggatgtatcagattgagggctgtgaatagcatgaaagattgtgtttatttgactagtgtatatcacagacctattcaagtaccacccatttctaaattctaacagtcttagaaaccagctgtagaagcagattgatatattttatcagaatccccaaattcctacaaccgtctcttcctaatgacttttcaggtggggacacgtgccaagacggccaatagatacctgaaacccggggtagtgctgaaccttacttacactacgttttctcctatacacacctgcctataataaagtttaatttagaagtcaggcacaatgagagattaacaacactaataataaaccagaacaattataacactatactgtagtaaaagttatgagaatgcggtctccctgaaaacaccttgctgtcctgtactcaccgaatttcagagcagaggactctgactgacaggtgttccccgactcccagtggcgaaaggtcctcagggaaaacaggtgaacgctatcaaagtatgcttatctccgaacctttcttaaaccagagtcttaagggatcgtctctgattaggtctagaattcctctccatagaagataacctacttctcgcgcaaatctgcagtgttcttgcagggctgctgatgggtggtcctgttcttttcgcggtcctgtttgcgcagagatgaaacggggaacttagcgtatccctaccgctctttttgatgacaggagtaaagggctgttcagactacctaaacaatgttgttaagagaagcactcgtacttctcagacttcgctgttccggaccccgcgagccaggggcaggcaccgggtccacccggggctgagctgcggcggcgcctgacaatgccccctcgcgccccggcctcggcgcccgctcccggctccagcgcgcctgcacgtacgtagccttcacgtgtgtgtggatacggagtgcatgtgtggagacagaggaatatgctccaacaaatttcggatagaggcgccgaagacaggacgtggggaaggtaggagccgcgtgcacggctccggccccgggcgggaggcggccgcgagccgggccggccgcgcgcaagtccggcgccagccgctagagcccccagtgcgcggcccggccgcggggcgcctcgacccgacacaataaactccgagggcgggcgggccgaggggccggtggggccgagcggccgccccgcgcgcatcgccatgtgagcggctgccgcggcttcgcggggacccaactttcccgggcggcggcgcccaacttcccgccgcccgctccggccccgcaggcccgcggcgccaggggaagacgcgagtaagtgcgggcggcggtgccctcccggccctcaccccgcacgcggcgacccggccgcctagcctccctcgctcaggcgcgaccgcggcgttctctgaggtggagtattacaaacatggcgcccctcgagcccggagcccttcgcgcggagccggcggcggggtccgggcgggggggagccggggaggagggaggaggccggcagggaggaggaggaggcggcctgagcgtcccccccgccccccgcgcccgtcgccggctcaggcccgagaggcgccgggcggcgggaaggaggcggcaccggaggggagggccgggcgcggcggcggcggcggtggaggagccggagcataatggtggggaaagctcggcggcggggcggcggggcgggcgggggcgtccgtggagatggcgcggcccgcgcggtggagcctgcctggccgcggcctctggggcggcggcggcaccagtgggtgctgacggtcgctcgcccgctcgcgaagagctccgagctgccggggagctttgtggatggcggggcgggccgggccggcggggcctgcgagggcggcggcggggcctgcggaggctgccggcccgcgcccactcgccttgggcggccgcggaagaggccccgggatgaggccccggaggaccgcgcggggcctgctcgggccgggaagccgcggagtcgcgtgagcaccgcccgccgggccctgtgccccgctttcggtcaggcctcctgggcccgtgcgcagtccgggccggcggggaacgcggctccgggcgtgtggcgggcggagaggaagcgtttgtcggcgcggcacgtcgtgtgctagcccgggagcggcgggcagggctggccccgaggcccggggcggagat

SEQ ID NO: 1571 - DNA, 6000 bp, Homo sapiens
tacatgcattttctcatttaatcctctcaatgaccactatgaaatcgtatattattcccatttcacagatgaggaaaatgagacataaattggtaaataacttgtccaaggtcaatagctagagaatggtggagttaggactctaatccaagcaatctgatgttagaaaatcatactcctgaaaaacagggaaaccaaggttcaaaaaggtgaaatcacttgaatgtctcacagtgagttggaatttggactcaggtgcactagtgcatattcttctacatcatgctatagaagagagtcggggccgggcacggtggctcgcgcctgtaattccagcactggggaagccaagatgggcagatcacttgagctcaggagttcgagaccagcgtaagcaacatggcgaaaccccatctctaccaaaaatacaaaattagctgggcacggtggcatgcacctgtggtcccagctgctcgggaggctgaggtgggaggatcgcttgagcccaggagtggatgttacagtgagccaagatggtgccactgcactccagcctgggtgacagagtgagccctatctcaaaaaaaggaaaacagggaccagggagacagggaaaaggttagaatcacaattttgaaggaaagaaggcacacacatacacaaacatctgtttttcatcttgtgtgatgagttgcccttgaaaagacaggatcctacttttccttaaatgttttgaagcatattaacctgagtatgggaggacctacttctaacaaatactgtacattcatggacagaagtggggaactgaatttcagaagccacagctatggagccctgaagagatgcccggagcctgggtttcaaggcccacaggcactggaactaggcctggcaagcactgtcagctcagctcctcggttgctgtgtagtaaaaagctgccacttaagtattggaagaatcatggctttcaatggaaatggatttcttatactgacagtttctcctggagaacgtcttgctctgttgtccaggctggagtgcagggatgcaatcatagctcactgcagccctgacctcttgtgctcaagccatcctcctccctcagcttctcgagtagctgcgactacaggagtgagccaccacatctggctattttttttttttaattttgtagagatgcgtcctcgttatgttgcccaggctgttctcgaactcctggccccaagtgtacctcccgccttggcctcccaaagtgttggggttatagatgtgagccactattcctggctgaaagttttttaaaattaaaatatggatagtagcagtttcagtctgagccacagagggtggcagcatcaatgaatggtaactgctgttacagagttcggaccacagctttctagtttcaaaaacatgatttttaaaagcatccacaggtgactggaaatccttaagcaacattaataaacttgttatatagtaacttatatgccagaatgttaatctaatagaggagaagataaggagaaaccacaaccatattcaaaacatcaatatctaatactaaagactacggaaaactgttatcagaagtcagaaaggcatggaatgaaatcaaagaacattgtatagtcttagaaaatatttcattggggcaacccgttcgggtccccttccacgctgtggaagctttgttctttcgctcttcacaataaatcttgctgctgctcaaaaaaaatatgtaatataatatatatattttatatatatatattttattggtctctgagaaagtctccctttgcagtacgaactaaccttgtggagtggctagatcatgactgctcacttcagcatctgtctcttactgaatgtttcttatcctcttgctttcttgggggtctgaggatggggggctgtagcatgtgtaagagatgacactcactagacacacatttttgagggctgccccgcagcaggaagcggctctggaggccatgggccaatgaaggtgctgtgacgtttacactcacagccatctgcagcagtccacactttattacagttacagttaacattttcttccacagtatttcctgataatatttaacaaaataaataatgagactaaaccctaactcatgtcaaatgagtttgagcaattattaccttacacacactatactgtcccaatagccaggtaatgaaatctgatctggacactcattctagaaaatagagcagtgctgtctgattgggggcgggaggagtattcccacgtcttggtcctgcagagacagctccccgacagctctgagaagccccagggctcagtggcacccgctttgaaactcaccaatgcaaaaaggagaatcaagaagtaaaaatctgtctgtattcaattgtataaacagtatagctttgtcatgtaagatactagcacagcaattagttactggtcttctgggcttcctccaaacctcaaacctttggtccccagacccacacacacacattcattcagctgaggggcaaatgagataaatcaaactgttttaatggcctcttggtatgcatttcaagagagttgacatcaacccaattttctgccagcagtgtatataagcgttcatttcgctaaccatcagtagcattatcactggaaaagaattctgtcctttgaagaaaagcaatgttacgttgtttgaatgtgtcattactagtgaattagaatagctgtcagtatttattaatagttttatttcttctattgtacattatccatggcttttgcgttttatgtggggagggatattcgtattcatcttagtggataaataccaccttacttggaaaatagagccaagggttaaattctaggcaaaaccaacaggaaaatcagggtaagttatctaacttacattaggttgaatgagagatggtatctgcgtataaaattttaaatgatccctacaaagtataactgggaaaaaaatgtggagttatgctgccacttctttcctaaaaggtaagcttccttttattgatacgatgttgtcttactcgagtgccttctctaaaatacacagaaccatgcagtcctctattttacagatgaagtaacagactgtttaaaaaggtgactcactgaaagctcttcattgttggaattcctggcccaacattcaaaccaggcatggcttgcttttcttctgacacgttttaacccctctactaaatttttagcgatatatatttactcttaaaatgaattacaattattctgtgatgttctttgagataatcaaaaactctctgggatgtatcagattgagggctgtgaatagcatgaaagattgtgtttatttgactagtgtatatcacagacctattcaagtaccacccatttctaaattctaacagtcttagaaaccagctgtagaagcagattgatatattttatcagaatccccaaattcctacaaccgtctcttcctaatgacttttcaggtggggacacgtgccaagacggccaatagatacctgaaacccggggtagtgctgaaccttacttacactacgttttctcctatacacacctgcctataataaagtttaatttagaagtcaggcacaatgagagattaacaacactaataataaaccagaacaattataacactatactgtagtaaaagttatgagaatgcggtctccctgaaaacaccttgctgtcctgtactcaccgaatttcagagcagaggactctgactgacaggtgttccccgactcccagtggcgaaaggtcctcagggaaaacaggtgaacgctatcaaagtatgcttatctccgaacctttcttaaaccagagtcttaagggatcgtctctgattaggtctagaattcctctccatagaagataacctacttctcgcgcaaatctgcagtgttcttgcagggctgctgatgggtggtcctgttcttttcgcggtcctgtttgcgcagagatgaaacggggaacttagcgtatccctaccgctctttttgatgacaggagtaaagggctgttcagactacctaaacaatgttgttaagagaagcactcgtacttctcagacttcgctgttccggaccccgcgagccaggggcaggcaccgggtccacccggggctgagctgcggcggcgcctgacaatgccccctcgcgccccggcctcggcgcccgctcccggctccagcgcgcctgcacgtacgtagccttcacgtgtgtgtggatacggagtgcatgtgtggagacagaggaatatgctccaacaaatttcggatagaggcgccgaagacaggacgtggggaaggtaggagccgcgtgcacggctccggccccgggcgggaggcggccgcgagccgggccggccgcgcgcaagtccggcgccagccgctagagcccccagtgcgcggcccggccgcggggcgcctcgacccgacacaataaactccgagggcgggcgggccgaggggccggtggggccgagcggccgccccgcgcgcatcgccatgtgagcggctgccgcggcttcgcggggacccaactttcccgggcggcggcgcccaacttcccgccgcccgctccggccccgcaggcccgcggcgccaggggaagacgcgagtaagtgcgggcggcggtgccctcccggccctcaccccgcacgcggcgacccggccgcctagcctccctcgctcaggcgcgaccgcggcgttctctgaggtggagtattacaaacatggcgcccctcgagcccggagcccttcgcgcggagccggcggcggggtccgggcgggggggagccggggaggagggaggaggccggcagggaggaggaggaggcggcctgagcgtcccccccgccccccgcgcccgtcgccggctcaggcccgagaggcgccgggcggcgggaaggaggcggcaccggaggggagggccgggcgcggcggcggcggcggtggaggagccggagcataatggtggggaaagctcggcggcggggcggcggggcgggcgggggcgtccgtggagatggcgcggcccgcgcggtggagcctgcctggccgcggcctctggggcggcggcggcaccagtgggtgctgacggtcgctcgcccgctcgcgaagagctccgagctgccggggagctttgtggatggcggggcgggccgggccggcggggcctgcgagggcggcggcggggcctgcggaggctgccggcccgcgcccactcgccttgggcggccgcggaagaggccccgggatgaggccccggaggaccgcgcggggcctgctcgggccgggaagccgcggagtcgcgtgagcaccgcccgccgggccctgtgccccgctttcggtcaggcctcctgggcccgtgcgcagtccgggccggcggggaacgcggctccgggcgtgtggcgggcggagaggaagcgtttgtcggcgcggcacgtcgtgtgctagcccgggagcggcgggcagggctggccccgaggcccggggcggagattcgtcggtcccccggggctgtgagcgaccccggcagcgaggccgccgcctcaacaggtcctcgcggacctccgggacagtcctgtggggtccgccgccctcctcccacccagagctccggggagaagctgctgaggacgcggctgggacgagggggggcgccgggacccggactttcacttgcagtctctcctcgcgcttttctcccgagccgggaggaggaggagctggcgatgtgtgcgccgtgcccggtgtcttttgcagagtgaccgccgtacctgttttattcgtgtgtaccagtgctcgttgtgcagtgcggtgtcctatgcggtgggtacgcagtaccggggattatatatggtgtgtactctgtgtcatatgcagtgtgctcgaagtacccggtgtcgtaccggctatcatacacggtgtgtacatgtatcttcctcg

SEQ ID NO: 1572 - DNA, 6000 bp, Homo sapiens
ctcctgccttagcctcccaagtagctggaattacaggcatgtgccaccaagcccggcaaatttttgtatttttagtagagacagggtttcaccatgttggccaggctggtctcaaactcctgacctcaggtgatctgcctgcctcggcctcccaaagtgctgggataacaggcgtgagccatcgtgctcggccggttctatgggcattgtggaagtgaccgttaacaagccccaagggtaagtaaaggaaaatgaaaggtgattgattcctcaccacctctccccttttttcctctactctttgcccctgctccccaatctagactctaataaacagaaatgatttttgttgcaagctgaaaactcgttcttgtggttggggctaggggggtggcaagtcaagctttagagttgtctggataataaatgctgtcttcaaggactgtccaacattgtaggaacaagagaacaacccaagtgaacaactaactcctgttcacaaatgctactgcctctctgccatcccctaacctcagcctcacacacttgaatttcgccaatccatttgatgagctcaaatcagtgaattttctcctcgccaaagctcacaaattctgttccccgcttcttgccccacatccaggcattaccaactgcattttccctttgcctgatattctggcatcaagcctccttgccattccaatttatttcaccttcctccagtccttatgatttccttcctgaagagtatttcagcatctctatgcctcaatcttccctgcacaccacaccagctcggcctcatcatcacatcacttggctatgtcccgcctgggttagacagcttcagtggctgaagtccatagatcttattctgtttttcgaggtccacctgactctgaatccagctgatatttctgcccttagcttctacccctctctacttctggttaactatggaccacactctgcttcctcaggaaccacctaccaaggccgtatccatccttcaaggacaatacgtgggcctttcctgatcacatcagctcaacaacttttccctcctacatttcaattgctcttcttaccataatcattagtattcaccccactgtacgtctagaaagaaagtggtcttaaacctaagggaaggcagtctaggtcagaaatttgttgtccgctgttctgagcagtttcttctaggaagtaccaaacatttctgataatagaattgagcaatttcctgatgaagtgagactcagcttgcactgttgaccggctgtccctggatgaacctagttacttttaaccaaatgttcctttcttgaacttgttcctttcttgaacttaatctaccaatgttatctagataactttcctcaaaaaaaaaaaaaaaaaaaaaaaccctctactaggaaagaaatctttgaaccggacttattggaaattacctccttgcagcaggtttgaaacaaaactttgaatttgcctcacaaagaatttgtctgaaactgctttagtatatgctagttatatttgtatgcacatgtggcttcatacatagtggttggacacccatatgtgttatgcactttgttaggtgacgtaagttcacagataaactggacatagggctatcctctagaggcccacagtttgacaccttaacctgagatccttggacctttgaagttcagagtgcccacaaccgctgggtgtggtggctcacacttgtaatcccagtactctgcagggctgaggtgggaggatcgcttgagtccaggagtctgagaccagcctgggcaacatgacaaaaccccatctctacaaaaattacaaaaaaaattagccaggcctggtggtgcatgcctgtggtcccagttacttgagaggctgaagtgggaggatcacttgagtcaaggaggtagaggctgcagtgagttgagatggcaacactgcactccagaaaccccatctcaaacaaaacagagcaaaacaaaacaaactgcccataatgctcctgaaacttcctacggatttatccagagtatgtgctgatgtgcattttttccaaggagggaaaccaaaggttctatcaaattaagaaaagagtttttaccattgtggaagacagtatggcgattcctcaagcatctaaaatcagaaataccatttgacccagcaatcctattactgggtatatacccaaaggaatagaaatcattctactataaagtcacatgcacccgtatgtttattgcagcactatttacaatagcaaaatggaaccaactgaaatgcccatcaatgagactagataaagaaaatgtgatacatatacaccatggaatactatgcagccatgaaaaggaatgagatcatgtccttggcagggacatggatgaagctggaagccattatcctcagcaaactaacacaggaacagaaaaccaaatgccgcatgttctcactcataagtgggagttgaacaatgacagcacatagacatagggaggggaacatcacacgccagggcctgctgcagggtggggggtggggtgtgaggggagggaacttagaagacaggtgagtaggtgcagcagaccaccatggcgcacttatacctatgtaaccaacctgcacgttctacacatgtatcctggaacttaaattaaaaacaaaaaagagtttttaatccaaaaaagattaacagcaactagaagaaagaaagagatataaacagtgaattgcaatgcagcacggcaggtgttatgatggagtagaaaggactggaaaaggcctcctggaggaagggacactcaagtgtctttccatttcacctgtaaactcattaagggcaaaagctttgctacagcttcagtatgagatcctgggcaatccgtgacaaaatgggtctgcttttgcacccccaacttcttctcacatccctgcatcgtgccatgcagcatcaactggaaacctcagcatcagcaaacgacgacagagcgttcatccgtaaggtgaaccagaaaagccagttcaatgacttgtttaaccatggtccatctcagaaccaagagttgggcctcttatttaccagaaaaattgtgggggctttgtgatatggctttaaaaaaatcttgtaattgccaggcgtggtggctcacacctgtaatcccagcactttgggaggccgaggtgggtgaatcgcctaaggtcaggagttcgagaccagcctgaccaacatggtgaaactccgtctctactaaaaatacaaaaactagctggatgtggtgacgcgtgcctgtaatcctagctactcaggaggctgacgcaggagaatcacttgaacctgggaggcagaggttgcagtgagccaagattgtgccattgcgctccaaaaaaaaaaaaaaaaagacattaacataaatttaaatattttataatgacaatccacattaactacttaaagcataagctattttccaggagaggcagcaagtgcattctactcccatgcccaagaagaaaggagcgtgactttggtgggagtactaggagtttctactggagcacttgcccgcagagtgagaaacgttcctagagaggaagttatacctgctgtggaatttaagagaatcttgtcatattttgacaagttttttgagatggaagtctcactctgtcgcccaggctggagtgcagtggcgcaatctcagctcactgcagcctgcacctcctcggttccagctattctcttgtctcagcctcctgagtaactgggattacaggcgcccgccactacgcctggctaatttttgtatttttagtagaaatggggttttaccatgttggccagactggtctcaaactcccgacctcaggtgatctgcctgcctcagcctcccaaagtgctggaattacaggcgtgtgccactgcgcctggctaatttttttttttttttttttttttttttttttttagtagagacggtggtttcaccatgtcatccaggctggtctcaaactcctgacctcaggtgatccacccaccttggtctaccaaagtgctcggattacaggcatgagccaccaggcccagtcaacgtgatgtgttttggaaccctgaattccttggcttgcccggagggttttctttttgttaatatctttgcttgctttctagtatttaaaaaattgtgttttgctctaactatgcaatggctttaagtcttagacaaatttccagggagcaaaacacactcaaccatttcataataatcagaagagagctctgatcaataaataagcaagactgaattttacaaaataatccaaagtttaaaaccaaagcccactttttgcatgatcctttaagagaaagaaatctggaagcaaaacaccttataaaatgacaatgcactttcaggagcccagggcactgtggtgaaatgatgatggctagtacaggttataagccttggggaattatttatgaattctcaggatccttcagttcgccgcatccttctccattatttgaatattggaggctgcctgaccagaatcttgtcaggactttgctccttcatcccaggtggtcccggctgactcctgaggacgttacagccctgaggggaggactcagcttatgaagtgctgggtgagaccactgccaagaagtgcttgctcaccctaccttcaacggcaggggaatctccctctccttttatgggcgtagctgaagaaaggattcataaatgaagttcaatccttctcatcaaccccagcccacacctccagcaattgaacttgaaaaaaaaaacctggtttgaaaaattaccgcaaactatattgtcatcaaaaaaaaaaaaaaaaaaaaacacttcctatatttgagatgagagaagagagtgctaggcagtttcctggctgaacacgccagcccaatacttaaagagagcaactcctgactccgatagagactggatggacccacaagggtgacagcccaggcggaccgatcttcccatcccacatcctccggcgcgatgccaaaaagaggctgacggcaactgggccttctgcagagaaagacctccgcttcactgccccggctggtcccaagggtcaggaagatggattcatacctgctgatgtggggactgctcacgttcatcatggtgcctggctgccaggcaggtaagggcctgtgggtgcccccggaattccgggaaggctgatgggcatccctcttcccagccacagaaccagagggagtccccaggtagatggttccaagaagggagttgaatcttgggttccacctcttgcctgtgacccacggggaccccagtttatgcctcactgttccttggtctgtcaagagagcctgaaatagcattaggttctcctgtccttctcagtccttgacaattaattctgggaagaatagtgtggcatgatatttgggatatttggatgttaacagggtcccgatgagcaggtttctcaagaaattatcttttattcttcaatgaatttccttttattctctgcactcccaccccccaactaagaagctatcaggaagctctttaagttcaggttaatttgctggagacatgagtactcatatatcaaacactgggagaatttaagatctcagaaaagtttagcttcaaggatgtatacactgcttttacgtcttaggaaataacacctaggaatttccttacaagtgcaactttacagaaatttttaaaaatatgcatactcacttttagaacattactacttctcataatcctatgtatatacatgatatgtatatgtatacgtgtttatatatgcaaattttaaatttcattccttgtttcaaatggattttctcgaagattttttttttttgacactgtctctgtcagccagactggagtgcagtggcgcgatattggcttactgcaaccttcgcctcccaggcttagcgatcctccc

SEQ ID NO: 1573 - DNA, 6000 bp, Homo sapiens
gagaagtagaagaggcagtgatctgggggatgaggaatcacacttttgcgggaagcagactgtgactgaggtaagtaaaagaaagaaactgtaagcatttttgcagctgctgatggagtgaaataaaggctaaaagaacagattctacacacatcctccctgtgtctaagaatttctgctactctggaccaggacctcaggatattccctacccacacccctataaatggcttgcttaggaaggaactgactcagaaatttccacaaaaatgaaaaaaggtacccaacacagatcaactcaatgttaaaccaaaaaaaaaaaagggggggaaagtaaaatagccccagaaagagattgtgatggaacaggcaaacacctgggctgagtatacagtcatggattttgttaatataatagagcagtaacctctataaactaagagcttaaagcagagatctaagggacaatatggtgggaaaaggaggtgagacctgggctgattgtgctcagcaaattagagcagaagttgctgtgaaagtaggacatcagataacagaccctgccaaaaacataagaggcccagatggagagaccaagaaaagatagcaaacctcaatggacatggacagtcataattttagcaaactttccaggtgcactgggatgggatacctgggcaagggagggcactagctggtgtgtgatgttaggtgtttgagaagtgcgggaaaatggtatctctaaggaccatggaattcgacggctgttgctaggttccattgacgttctacaaaaggtagctgtagtccctgctactcgggagattaaggcaggagaatcacttgaagctgggaggcggaggctgcagtgaggcaagatcacacctctgcattccagcctgggcaacagagcaagactctgtctcaaaaaaaaaaaaagggtgtcagagacaactgggtgtgtcactcggtacgtgtgtcccagcacacccctgagcagtggattccaacatttttacggatgtggcagcctccagcatattattaagagtccctcccactctctgcagctcatgtgccttatggggacttccaacacgttagctacttcgtgctcatctggcctggttggcaaaatatccccgtgatgttcagcagaagagctggaccatccagttctcttccccattattacagagggcaggagaattaacgtaggcctaggataaaactgtgaatgtatattgttcccccttgcagctatttctgattctcttttatggttaaaaaataaatagccgggcatggtggctcatgcctgtaatcccagaactttgggaggccaaggcgggtggatcacctgacgtcaggagttcaagaccagcctgaccaatgtggtgaaaccccatctctactaaaaataaaaaattagtggggcatggtggtgcatgccttaatcccagctacttgagaggttgaggcaggagaatcacttgaacctgggagacaggttgtggtgagccgagatcacaccattgcactccagcccaggcaacgagagcaaaactctgtctcataaataaataaataaataaataaataaacttggccaaatcgtaatgctgcacacaagctacctgaggctgtgttaatctgctctggtggctatgactatggcttctatttcactgattttgtggtagtctgctgttgttttcaggatctctctggtgtcttccaaggtcagactggtgaatttaatggaaatatgatggggaccaccacccctgcatccttcagattagtagtccaccatctatgacccacgggccaaatctggcccacttcctgtttttataccacctttgctctacaaacggctttcacattttcacatagttggtaaaaaatcaaaagaataataatattttgtgatatgtgaaaactgtatgaaactcaaatgttggtgtccataagtaaagttttattcaaactgaaaaatgttcattcattcacagattgtctctagttgcttgagtgctgctatggcaaaggcaaacggttgcaatggagtctgcatgacccacgaggtctaaaattttaagcaagtcctgcttcagatccttaagcatggcactcatctttgccatccttgccagcccctgggctgtgatattgtctttgtttttttgtttgtttgtgttgagatggagtctcactgtgttgcccaggctggagcgcagtggcacaatctcggttcactgcaacctccgtctcccaggtgcaagcaattctcctgcctcagcctccagagtagctgggattacaggcacccgctaccacacccagctaattttgtatttttagtggacacggggtttcaccacgttgaccaggctggtctcaaactcctgacctaaggtgatccacccacctcggtctcccaaagtgctaggattacaggcgtgagccaccacacccggcttgtgacattgtctttaattttctatcttgattttagaagaggaagcttcagcatctctcttttggcttttctcactatgatgccttcactctacagaccaaggaaccgccttggggagtgtgccagttctctagaatgtcaatcccaattgcatattcagagactgggaaaatggaccatgaggtgggttcacgtaaactggaccttggcaaggaattcattattttctgctctctacacccacagtctaacctcagatctcaagataacaatgtcaacactaattcttcacatggttggttattttcctttccgtaggatgtttgcccaagtaaaggatcacaggcccatttggtgaatgactggggagttattattattattattattattgggatggagtctcattctatcacccaggctggagtgcagtggtacgatctcggctcactgcaacctctgccttctgggttcaagtgattctcctgcctcagcctcccaagtagctgggattacaggtgcccactaccacacctggctaatttttgtatttttagtagagatggattttcaccatgttggccaggctggtctcgaacacctgacctcaagtaattcactcacagcctcccaaagtgctgggattacagacagacatgagccactgtgccctgccgatggggaattattacactggatccttgcaatggtgttgcagattccttcctcctggtggggagggtggtcaatggatgctgggaccgatcatcgccttagaactgaatactggacaaaggatcatgattttctacggggatgactccccagctcacaggggagggaaaggcctgagcttgttttacataagcaagttcattataaaaatgcaagccaaaaatagacagcagatgcatcccagcttcactgaggagtggccttgaaaaatgacagtgagagaaaatcccttcaatgggcagagcattgaggggtacacccagccatccactctgtgtgggaaggagacgtggtttaagattccaatagacacctacttgtgagtggtatagaagacttggctctctggtcagagatttgggaaagactgggtgtggtagctcacgtctgtaatcccggcactttgggaggtcaaggtgggtggatcatctgaggtcaggagttcaagaccagcctgggcaacatggtgaaaccccatctcaactaaaaatgcaaaaattagctgggtgtggtggtgggcccctgtaatccctgctacttcgaggctgaggcaggagaattgcttaaacctgggaggcagaggctgcaggtgagccgagatcatgccattgcactactgaaaaaaaacaaaaaccaaaacaaaaaaaacaaaaacagagtgagtgtgaagcatgaaggtctttgtatctcatgactttgctcccaggaagcatccatcacagaagatgcactaaccaatcaagcagacagaacgacaaagccagccctggtgacaccagccagccctgtcattcattggtcacccaagtgctggcatggtagagccatgaaagaagtggcaggataagagacacagaggctgtcctggagccctgcagcatggactcccacttccctaggctgatcacaccacagcctgcaccacgcagaagctgccggcccaagcattgaaatagttggctaaaggggcactaaaatgtcaactcagaggtgacagtgtgtgatggtggtgcaccattctccagaatgcagtatacactttgaatcaaaagcctttacgctgccggccctggtggctcaggcctataatcccaccactttgggaggctgaggcgggcagatcacttgaggtcaggagttggagaccagcctggccaatgtggtgaaaccctgtctcctctaaaaatacaaaaaattagccaggcatgcagtgagccaagatcgtgccattgtactctaacctgggtgacagactgagactccatctcaaaagaaaaaaaaaaaaagctttatacggtctgaccccccccagtaggaagaacacatgggtctggaaaccaaacggcataagtggccttatcattgctcccgaagacccagcagtggaccttgtgtttcctagtcctgcaactctgggctctgcagggctggaggtcctgatccccaaggaatcacacttttgccaagggacacaaaagtctcagtggattatgagttgcacctgcaacctaggcacctccggctttttgtatgaccctgatcagcagatcaggtgcacctcagctcctcaagtcactccttgtgccatttgtgatgccaactggactagtgtatcctttctggcctaagaaggacatgatgaccagggacacagaccccccagggatgagggctgaccaccccaccaggtaagcccccaagaccagcaaagatggtggctgggcctgcggctctccgggacacagggtgcaggtgaggatgagcatctgctgtggctcagggacagcggcggcagcaggagttgcaggtcttccttttaacctccctctcctcactttccccagaagagaggtcagcagcaagctggagggcctgtttcttggtgtccatggagaagtctatccgagcagtgctgagatggatgaaagggaacacagaggtgcccaaccaggcccccaacgaaggacatagccagctgctgggagctaacagcagatagactttagccagagttgtattctggttggcctcagctgtagagaactacctcacccacttggatacccttcttcacaggatccaaaatgacagatagtggtgggagcagacagggtcggccatgccggcgcaccccaggatgactgacccgccaggtgctctgcagctcccatggctggcaaaggttgtgtggcagtttggcttctcccgctgcccagtcctgtttcttccttccccgtcttttcacagaggttgatcccaatcagtatcctgcaatcccaaatccatctccttgtctgccttctgagtgtctagacagcactgatgactatgtatgcaacatgctcctacacacttagaaaactctctggacaaatgcacaccaaaaaactggttcgtctcgggggagggtaagtgggtagcttgggacagggagtagaggggaatgtactttttatcgttttccccttttggatcatataaatttttgtacaataaacatgtatttcactcaaaaacaaaaattttaaaagtccaaagaaaagaaggtctaaattattagtataagttattgtttgatcttggtataatgagtgggatagaagttaaaaaagaagaaatgttcaaaatggaaaacagcaggagagaaagagaaaaagtagagataaaaagaagaggaaaagtaacagcaaagcagagaaaaaacattttatgtggtggtttggaacgtttgggtagtgtgaaaagcttgcccttggtgtcttccaatttcccctctcaga

SEQ ID NO: 1574 - DNA, 6000 bp, Homo sapiens
caccatgcccggctaatttttgtgtttttagtagagatgaggtttcaccatgttggtcaggctggtcttgaactcctgacctcaggtgatccacccaactcggcctcccaaagtgctgggattacaggcatgagccaccgcgcccagccctgtttaacagtatttaacatcagtgcttgcctaagccacaggccatgcaaacatctggccagggagaatcatcataggagctcttcaacatgtttacactactgagatttaccaattattttctaatattaaaagctattttacttatagtctcatttacataagcttattatatataagctcatttataaagcaaataggtacacgtatttgagaataaaactgactgggcacagtggctcacgcctgtaatcccaacactttgggaggctgaagcaggtggatcacctgaggtcaggagttcaagacagcccggccaacatggtgaaaccccatccctactaaaaatacaaaaattagctggatgtggtggcgcacacctgttgtcccagctagttgggaggctgtagcaagaaaatcacttgaacctgggaggcagagattgcagtgagctgagattgagccactgcactccagcctggctgacagagcaagactccatctttaaaaaaaaaaaaaaaaaaaaaaatgccgagtgcggtggctcaggcctataatcccagcactttgggaggccgaggcagccagatcacgaggtcaggagatcaagaccatcctggctaagacagtaaaaccccatctctactaaaaataaaaaaaattagccaggcgtggtggtgggcgcctgtagtcccagctacttggaggctgaggcaggagaatagcgtgaacccgggaggcagaccttgaagtgagctgagatcacgccactgcactccagcctgggtgacagagcgagactctgtctcaaaagaaaaacaaaacaaaaaaaattatatctgtaaatatcctaaagttgagacttatctgactttcctactgtttcctcagcctcaaattattcaaagttaatgaggcgctacattaataattttcaggttattgaggctctgtgaataccaaaaacagaaatataatccagaaaaccacactaaaaacccaacaggcaaaaatatggggtccagttagtagtactgaaaacacacaattcttactgtatttctatagttccttcatccaacaaatgtttatcaagcacttctgctatatcaggcactgttccatgagctggggtgaacaaatgggccaagtccctgttttcatgaaactgcattctaatggaacaattaacaattgtcaggtggaagtaagtgttatgcagaaaaatgaagggaggtcagggcatagggttactgtcaggctattttagaaaggctggtgagggctgaacactcataacgtgacttctgagcagactcgaattaaaaaatgagaacttcactaaatcctatgattcttcaacgttttcaagtttgcatccaaaagactgaaacacagtaacttcttccctttattctataaatagggaaactacctgaacagcttctagaaagtggagggggggccacggtagttcaatcgtggggaagaaaatgttgaggaattagatgataaagcctgtttgcaacagtgaatttttaatcgtcaaaactgaaggatctcaaagaattttaatatgtacttcccccaccctgctaccgtcagaaggaaaagttgtcatcataactgttttctaaagacagagatgaaaggaactgctcaatttcacaacttgtaattattagagggaaaagtacttaatgttgaaaatattaagtgaacattgagaaggaatatgagacaaagatcagcacatcattttggctaggagagaaaaagagctaaagggaaagaatggtgcctaagctaattcattcattttatgtgtttctttatgataaagtttaagaaatttttttctaaaatactttaccttcctgaaaccaccagagttccatcatcgagtaaataatccttcacattctgaggaagtggaagaatgacactaaaaaaaaaacaccaaaaaaggcatcattttaaaagaccaactataagcagagagaaaaatctctacacttgattaattttggaattgtctttcttttaatataaagtagaaaatgttaatgatgtacatttggtagcagtagacaagaaatcagaataataagattactgcggttcatcttattgccacaatggtctttgtagtaaacaaaaaccagccaaatccaaaccaccagatggaaatcacagtatgaaagcaacaagctcaaaaggattctgagtgagcacaacatttatgtgtctttaagaaatcagagaccagcagatatttgctgcaacacaggaaatgcagcaaacccaactagaagatgactagcatttggtcaccttctaaagatagagggcagaagtagagtcaagatctggaaaccattcttgggttggcagtgagcacctaccgctaagaattcatgatacttttggatgtgtcttgctggctttctattcaactgatcaccagagatataaagctgcttaaactaggcatgctttagcttaatttgtttcaggtaatcataattaaggatggcaaagccatacctgaagtctcttaaaaacttatgggataatttgttttttaccttgaaataataaattatcaaaaagccctaccacagatccctaagagtgctggtattattttgattttgaggcatatacatcttcaaaaagtggaaaagattacagcctgctttcccgaagttaacagaacatcaatgacttataacatgtctcatttatttatggaagaagttttttttggcacattacaaatggtttttttgcacaaaaaagagtattcatgggctacttcggttttaaaaataagtatttttatttatttttaaataaataaaagatcactgccactgcactccagcttgggcgacagagcaaaaacttcggttttaaaaataaatatttgatttatcaaaggtacaatttcacattcaaaaatctagttctggccgggcgcggtggctcacacctgtaatcccagcactttgggaggccgaggcgggcggatcacgaggtcaggcaatcgagaccatcctggctaacacggtgaaaaccccgcctctactaaaaatacaaaaaattagccgggggtggtggcgggcgcctgtagtcccagctactcaggaagctgaggcaggagaatggcgtgaactcgggaagggaagcttgcagtgagccaagatcgctgccactgcactccagcttgggcgacagaacaaaactctgtctcaaaaaaaaaaaatctagttcttcaggcttttaatttcttctaacaaatcttattacgtttgaaaatctactaaattttaaacaatttcaagcgaaactttgcaacttaaaagtctctttaaaattttaaattctattcataaaccactcaattttctttcttaatatgtctatttgctgattacaaataagccttcctaagtattttactcttacaaagctaacaagcgaaattgttaagtacaatgaatctaaggttctaccacacattccaatactatttaagaacttgaaacttttcttatacattttaaccattctaagccagttacacattttcaagtacatatccgatctttattgaatgaaaccatcatataatgaatcagcaattactgaaatgttggctcagaaaatcagttaagtgcaaagcccagattttctatcaacgcctttaaaaaaactgagagatgaaattgtatatattaatacttgccgcctacctgatgtttttaagtatatatacactgtggaataaatttagctaacaaatgcattgcctaacatagttatttttgtggtgagaacactaacatccactctccgtttttcaagaatacgtatatcgtcattaactatagcctccatgctgtacgacatatctgtgaacttgttctcgtatctaactgtaattacgtatcctttcaccttcccaatctccatcctctggggtgatggcgaaaagcaattaattctccgagtgcacttaggcagtgatcaccttgcgcctggggccattctaaaagtagtggtggtgaactcccaagcctaaactaggttaatccactattcctcccgcctccgaccctcactgaaaaccacaactgaccctcctagccagcacactcgctggctcgcaacaggacgcagacaattgctgatgtacttccctctcgacacactccctcccatgcagtcgctagaaggcctgcatttttttggatagcagtaagattcgctcagaagtcgcagttcccttttgccggtcgaccgggcgaaccccctcccatctcacctcttgatggtaacgcctcggaagaacgggtaccacgcggagaactggcagtgaagcacatgctccttcttcatcctccagctgccgccgctgctgcctttccctctcctgcctgcaccctcccggaactctgggcgccggccccggaagtgcccgccgagctattttggttcaaggactcttccggtccctaaagcaagaaggaagaccgagaaaaggaagcggaggagaatcccggggcatacgcttgacacacacgcatacaaaaagagctttagtctcgaaagaggaattaccgaagtgtcgagagaggaattttaagaagtttacaactccgtcttcgccctaaacgcacgctgacccggaaagtaatctcctgaagctaggtcaaaggcgggggttctacggatgccggaaggagggtgcgcgcccatccttttagcaccgcgagaggcgccggtgtttcgagccgtggcaccggcatcggctgacactgctgcctccagctagttatttcgtcctcttccgttcttcacccctacaccttggagtaagtaaccggggcaagccagtcacagcacaaaacctctttggggaggagaagaagaaggggaaagggaccacatctgcatggtgcgtgcagccgcgcggtgtctcccaggctgcggctgggcacgcgtccaggcgcccaagagggaaactggggattggagggaaattgtggattggagaggaagagcctgggctactccgagtaaagaaagcggggaacaccacagctaagtgttagttccagtgtaaagattgcagcatctgcagaggagtagaatgcttggtagagggaataccgcctgtacgatcctggagggttcgactttgggaggtaaaaggcgagaggtaaatgtgagaaagcagaggaaagaggagtctccttggagcgctgaattcgtttagtctggcctcgcaaaagttgtcaacctggaaaaaacgcagatttttatcagtattcctgcgatgatcgaatcataagactggaagaattcgaatcgaacttgtactatcgttttttcctttgcttcactcctgtcacccagcaaagttcagttttgtttgtttcgttaaaagaatgagaagtaactagctgcttttatttatttatttgagacggagtctcactctgtgcccagattggagtgcagtggcgcaatcttggctcactgcaacctccgcctcctgggtttaagtgattctcctgccttagcttctcgagtagctgagagcgcgcgcgcgccactacgccggctaatttttgtgtttttagtagagacggcgtttcaccatatttgccaggctggtctcgaactcctaaccttaggtgatctgcccgcctcagcctcccaaagtgctgggtttacaaggcgtgagccacggccccgggcctaccaaccagccgcttttaacccctagtcgtgtcgcttaccacacgagctttaggcttgcgcgaggcatctgcgtctaaa

SEQ ID NO: 1575 - DNA, 6000 bp, Homo sapiens
tggtggtgggcgctgtagtccgggctactcaggaggctgaggcaggagaatggcatgaacccgggaggtggagcttgcagtgagccaagattgcgccactgcactccagcctaggcgacagagcaagactccgtctcaaaaacaaaaacaaaacaaaacaaaaaaaaccacaaaggaaaaaccaccaccacaaaactcccaaaacaactccacatataatgatgatttgcgaacacatttctaaggccatacacagatttggctggatctctgcccccaaaactgcaggccaacaaagcacacaaagctaactggcatggcacaaattactgttgtgatatgaggtagttttgggggccagtgccatgcactgcatgtgcctatagtcccggctacttgtggaggctgaggtgggaggatcgcttgagctgaggaattcatgatgaccctaggaaacatagtgagatcctatgtaaaaaatgaaaaaacaaacaccaaaataaactaattttggggttaggcagcaagtacagccctctacagaaagggaggaagtgattaatttttcaccaacttcagtatgccagtattagtaacaacagctgcataaagagttaagtgggagtttagattccagaagttaaactatgaactcaaaagcctggttctgcagttggcactgaggctcattactcaatcaccgtacccgaatcccggccatctgctgaggctgcaaagtgaagcaaaaaatcctaacaagaaattgtatgttggctaggtctctcctgataaaagatgaatattgttaatatcaacaatactcaaccaaatacaagatgcaggagcccacatcataagtagagcctctgactgacaaaagagggtcaggcacttggaacagtttaataattgaatagggaaatcaacaaggcactttgaaagaaattaagtggggagctgaggcaggagaatcgcttgaacgagggaggtggaggttgcagtgagccgagatcatgccactacactccagcatggtgacagagtgagactctgtctccaaaaaaaaaaagaaaagaaaagaaaagaaattaagtgggagagaggatcaattttttttgcagtaataacttactttatgattgtcttgttaaagtcaggcatcaaattgggcatgtctaaagtggcaatctacattctggcagaataattacaaagaaaagtcacttgatttagaaggaacaaagaatcaaataatttgcagttatatttaataattttggtcatagttaaaaatttttaaattctatttttaaaagataatattctggccgggctcggtggctcatgcctgtaatcccagcgctttcggaggccaaggcaggtggatcacttgaggtcaggagttcgagcctaaccaacatagtgaaacccccatctctgctaaaaatacaaaaaattagctgggtgaggtggcacacgccagtagtcccagctacttgggagactgaggcacgagaaaagcctgaacctaggaggcagcagttgcagtgagccaagattgcaccactgcattccagcctgggcgacagagcgagactctgtctcaaaagaaaaaaaaaggataatattctgatgtatccttcttttgtgccatttatggtaaaaaatttgggtacccacaattgaattcacttatgggtttttttttcattctcttcaggtgtggcagttgggtgggcagggagtaattaacgtttactgaaattatgctacttggtgatctccaggaatcatttagcaggtggtttaaaatcctcacatttaatgctggttgagcaagagtgaactgactgtaatgacccttgggaaggtgaattggttacagacgtatagtaacgacactgtaaagatagtccaggcaggagatgacaggtctggagtagagtggtagccgtggcaaagtgacatttaatttccacgaagacagttttaagggagactgggacatcggaagaaaaaaggggtgatgcagagctcaaatctgtacacgcttgtttgaggtgatagcagacatccagatgaagaaaaccagcagacaggtgaaaatcttaatctaggatgattagtcatgctatggattcagagaaagaaatgtgttttttcattacttcattaggaattgcacaataaatctcctcccccataatcacatgactactgacttttcagcatgcaggagaaaaagcaaatatttccactgttgaaaggttttattggagaaacttgatgaatacaatgacttcatggcttagtgaagacaaccacggtggttaaaatacagtgaaccctcatttagctgtatccattcaaagtatttgagcatctcctatgtataatgtcaatttatttgatgctggttaaatgtgtaacaagttacttaaaaccaactgtaataccaaaaagtcattgaacacacttctaaagtatactgcctgaataaaaggtatctataaaaattccttccctgtagtatctatatatttaagcttacaaacttagctgcttttctacacacaactgcaattctatattaaagctttgcaactgccttaatctctacactcttttttttttttttcccgagacggaaaaaaaagagtctcgctctgttgccaggctggagtgcagtggcgcgatctcggctcatcgcaacctccgcctcccggattcaagcgattctcctgcctcagcctcccgagtagctgggactacaggcatgcgccaacacgcccggctaatttttgatattttagtagggacggggtttcgccatgttggacaggctggtcaaactcctgacctcaggtgatgcgcccgcctcggcctcccagagtgctgggatcacaggcatgaggcaccgcgcccggcctatgctcaaatgtttcttgggctgttaaagtactgctcctcgcagaagggctatgttcccgggatctattctcttccgtacattcattcctatcttcattagaaaacatctgacctaaataaatcccccatcgatgctaacatctccttccgcgcaattttttactttctaagtcaaatcaaaacaattatttgagcgactgctcctgtctgccattaagtctttctggcaccaccctccagacatatatacaatattgcttctttccctcaaatcagaaaggactgcatagttccggatcaaggcataaatgatgaatcatgactgtccatccccaccaacatactctgcaacattataatctatttacctctgctttgaaaatgtattctttaaagcactgcttccaactagccacttagccagtaacatttttgagaaaaacaaaacacaacccaaaacaatgtatatattcctggggggaagagtttctaactcaaaatacgcagataattgtttattattctaaggaacacccttctgaagaggcctgcagtcggtggggctgtttctaatttaaaactacttaggtgaaccaggaagaatgtacatttaaggagatacttttagacgcagatgcctcgcgcaagcctaaagctcgtgtggtaagcgacacgactaggggttaaaagcggctggttggtaggcccggggccgtggctcacgccttgtaaacccagcactttgggaggctgaggcgggcagatcacctaaggttaggagttcgagaccagcctggcaaatatggtgaaacgccgtctctactaaaaacacaaaaattagccggcgtagtggcgcgcgcgcgctctcagctactcgagaagctaaggcaggagaatcacttaaacccaggaggcggaggttgcagtgagccaagattgcgccactgcactccaatctgggcacagagtgagactccgtctcaaataaataaataaaagcagctagttacttctcattcttttaacgaaacaaacaaaactgaactttgctgggtgacaggagtgaagcaaaggaaaaaacgatagtacaagttcgattcgaattcttccagtcttatgattcgatcatcgcaggaatactgataaaaatctgcgttttttccaggttgacaacttttgcgaggccagactaaacgaattcagcgctccaaggagactcctctttcctctgctttctcacatttacctctcgccttttacctcccaaagtcgaaccctccaggatcgtacaggcggtattccctctaccaagcattctactcctctgcagatgctgcaatctttacactggaactaacacttagctgtggtgttccccgctttctttactcggagtagcccaggctcttcctctccaatccacaatttccctccaatccccagtttccctcttgggcgcctggacgcgtgcccagccgcagcctgggagacaccgcgcggctgcacgcaccatgcagatgtggtccctttccccttcttcttctcctccccaaagaggttttgtgctgtgactggcttgccccggttacttactccaaggtgtaggggtgaagaacggaagaggacgaaataactagctggaggcagcagtgtcagccgatgccggtgccacggctcgaaacaccggcgcctctcgcggtgctaaaaggatgggcgcgcaccctccttccggcatccgtagaacccccgcctttgacctagcttcaggagattactttccgggtcagcgtgcgtttagggcgaagacggagttgtaaacttcttaaaattcctctctcgacacttcggtaattcctctttcgagactaaagctctttttgtatgcgtgtgtgtcaagcgtatgccccgggattctcctccgcttccttttctcggtcttccttcttgctttagggaccggaagagtccttgaaccaaaatagctcggcgggcacttccggggccggcgcccagagttccgggagggtgcaggcaggagagggaaaggcagcagcggcggcagctggaggatgaagaaggagcatgtgcttcactgccagttctccgcgtggtacccgttcttccgaggcgttaccatcaagaggtgagatgggagggggttcgcccggtcgaccggcaaaagggaactgcgacttctgagcgaatcttactgctatccaaaaaaatgcaggccttctagcgactgcatgggagggagtgtgtcgagagggaagtacatcagcaattgtctgcgtcctgttgcgagccagcgagtgtgctggctaggagggtcagttgtggttttcagtgagggtcggaggcgggaggaatagtggattaacctagtttaggcttgggagttcaccaccactacttttagaatggccccaggcgcaaggtgatcactgcctaagtgcactcggagaattaattgcttttcgccatcaccccagaggatggagattgggaaggtgaaaggatacgtaattacagttagatacgagaacaagttcacagatatgtcgtacagcatggaggctatagttaatgacgatatacgtattcttgaaaaacggagagtggatgttagtgttctcaccacaaaaataactatgttaggcaatgcatttgttagctaaatttattccacagtgtatatatacttaaaaacatcaggtaggcggcaagtattaatatatacaatttcatctctcagtttttttaaaggcgttgatagaaaatctgggctttgcacttaactgattttctgagccaacatttcagtaattgctgattcattatatgatggtttcattcaataaagatcggatatgtacttgaaaatgtgtaactggcttagaatggttaaaatgtataagaaaagtttcaagttcttaaatagtattggaatgtgtggtagaaccttagattcattgtacttaacaatttcgcttgttagctttgtaagagtaaaatacttaggaaggcttatttgtaatcagcaaatagacatattaagaaagaaaattg

SEQ ID NO: 1576 - DNA, 6000 bp, Homo sapiens
ttttgctcctgtcacccaagctggagtgcagtggtgtgatcttggctcactgcaacttctgcctcccaggttcaagcaattctgttgcctcagcctcccaagtagctgggattacaggcacacaccaccatgcctagctaattttgtatttttagaagagacagggtttcaccatgttggccagactggtcttgaactcctgacatcaggtgatcacccgccttggcctcccaaagtgctgggattacaggcgtgagccccttgcacccagcctgagctaccacacccggcacaaatttctatttaacttttttaggcatcatctcctaccatgatctcatgcatattttgtgctctggtggactgctgtgccttcctttaaaatcaattctgttccttctgacttcagatattcctacaatgctagactccccctactttctgaatcagcattgtgtcattcattgtttaattctgtctttgatcatgtgtattgatgctcacattaagatgacactctgcttgaaaatgaaggggtagcatcaggggtgttattcatgtgcagagccaagatggatctcagcatcatacttattaactgcaatctggagtaagctacttaatctgtagtttccttgagaggcctcaacctgggctaaaatggtcacttaatgaaaactgatatccaaaaaagaaagtgtgtggtagaattttgtggaaatccaaatcatttatttcagttaatgatctgtctagaaaacgccaatcagtttttatcacatgacctacatgttcctcttcatttctgtggagtaaaagatgttgcggtgctccctctgtgtcacaccctgtgaggaagtggtgtaatatgcccacaatcagatggcctagatttgactttctgaggcattcattagcctgacccctgtgatcctccatttcctcatctggataattggggaaattgcctctttcttccttatgcagttgttcagaagctttaataccatagcggacagcttatggtcttgacccagaaaaagctaaaatttctgtttcttttagttgtgtgactttggcaatattgattgtttcctattttagttttcttatttgcaaaatggtagatgatagaaccgatttcatggacttcagtaaagataatgtaaaataatatggttcaatattaatcagtgttagttattttagttaccgtatgctagttcatgcaagcctaatataaaatttatttttcttctcgctgcttatccaatcctagtgattgctacaaatttttgatagtcatattctatcattaggaagtcaacttgctgcttaaaatggaaagccttgttagaataatataagtaaattacgtacaatagtctattctattctaagatattctaggttaggatttttaaaatgtagaaaaaatttggagtgtatgatcagtattatctttatatttctcatatgtgttagatggttatgtttttcatgtagtcatacatatggttaaaatcctttgataacaaaagaaaaaataccatatagccaataattcaagaacatgccagttggcatattctcagattgtactcaaatggtaaacactttcaataaggtgtttcttaatatcttactaagaagtactagcattatggctaagctgctttttgtaaataaaacagatttttatagccaggtgcagtgactcattcctataatcttagcactttgggagaccaaatcaggaggattgcttgggcctaggagttcgagatcagcctgggcagcataatgagaatccatctctacaaaaaaaattaaaaataactgggttaggctgggtgcagtggctcacgcctgtaatcccagcactttgggaggccgaggcgggcggatcacaaggtcaggagtttgagatcaacctggccaatatagtgaaaccgtgtctctactaaaaatacaaaaaattagctgggcatgttgatgggcatctgtaatcccagctactagggaggctgaggcaggagaattgcttgaacccgggaggcggaggttgtggtgaactgagatcacatcattgcactccagcgcgggcaacagtgcaagactccgttttaaaacaaaacaaaacaaaacaaaacaaaacaaaacaaaacaaaacaaaactgagttagagtggggctgtattcttagctacccagaaggctgaggcaggattatcccttgagcccaggaagtggaggctgtagtaacctattatcatgccacttgtactccagcctgggtgacacagtgagaccctgtctcaaaaaaaggaaaaaaaaaaaaaagatttttatttacttgtggttctaatgcttctcatctaggttaagttttgcttaaattcaaagaggtgtctagacagaagtaactttgtcactaaaaccttcattcatgactatataatatatatatacaatgaaatatcatttcatttcatgaatattttatccagcatacatgggatataaaaattcattttccgagtttctgagattttattttctttttcttctcatagaaactaagtctttttcaagttctgcactgtacctacttttggctttaaaatataaaaggaattaatttgtatgatgttttcaatgtgaattcatttacaacctgaatttataagcgttctactctgactatgacttctaaaaaatttccatatgcatactgtggttttaaaaataattgtttattgtttattcttttctttactacctccagtctgagcaagagttctttctttctttggtgcaccattttgcattgctaacaaattttccttgactgattcgtacttctattttggatgtgtgtatatatttgtgtgtttgtgcaagcttacataaaatttagcgttagtgtttctgcatgatttcctttagtttataatgtaggaaaaaaatagttcttacagtctctcaccccaccagtgatttgatttagcaaaaccactggctttataatccttcctggcccttttgtcccattggcagggctctaacctctttactccagagaaaacacagctgttgtcgtcttctttctgaacagtgaagggggctacatcattttcaactgtattttgaagaattaatttgtgcactaatataaatgagttttctaaatttaaatgtttgaaataaagacaatttatataattttaggcctcttttttcttttagagatgggatctcactatgaggcccagactgggtttgagtttctgggctcaaatgatcttgctgcctcagcctcccaactagctggaactgcaggcacacaccaccacacctggcttaagacatttttagcaataaagcaatttttggtaggtatttgtgagtagatgaagagcttttagttatgttgggctctttgcattgtctcttacgactaggcttattcataagaatcctataagtcatactgctttaaaatttttattatcactagagtcaggggaattgggagagattcttcctcagttagttgttctatcttgaagattggggaaatgctggaggtttgttgatcgggagagattcttcctcagttagttgtcctattttgaagatgggggaagtgctggaggtttgttgtgggatgatgtcgttttttgggagttgctcaccttgcaagagccttggtctaccggccttctctctcaggtagcatttgcccattgccatcacatattccacttcactgtccagctcccccattcctctacatggtgatatggtgtgtttgtgtctttgtgtctgtgctatgtagttgccacttccccctaccccttcatcgcctccacatatcgggggaacctgtccccgataattcaacgtagtttcttttatattttccctaagtgtcagccagtctgagaaataaagagaaagagtacaaaagagagaaattttaaagctgggggagacatcacatgtcggcaggttccgtgatgccccctgagcggtaaagccagcaagtttttattagcaattttcaaaggggagggagtgtaggaatagggtgtgggtcacagagatcacatgctttaagggcaacaaaagatcgcaaggcaggaggtcagggcgaggtcacaaggtcagggcgaaactagaatcactaatgaacttccatgtcccgctgtgcatgcattgtcattgataaacatcttaacagggttcaagagcagagaaccggtctgactagaattcgccaggctggaatttcctaatcctagcaagcctaggggcactgcaggagactagggagtgtttcatccctacctacgtctgcataaggcagacactcccagggtggccatttgagaggccccgcctgggaatgcattcttttctcagagctgttaattattaatattccttactggggaaagaattccgcaatatttctcttacccgttttcggtaataagagaaatatgcccggcccacaggcagccagactttcaggttatctcccttgttccctgaaaatcgctgttatcctgttcttaaggtgcccagatttcatattgttcaaacacacatgctctacaatcaatttgtgcagttaacgcaatcatcacagggtcctgaggcgacatacatcctcagcttacaaagatgacaggattaagagattaaagtaaagtcaggcataggaaatcacaagagtattgattggggaagtgataaatgtccatgaaatcttcacaatttatgttcggagattgcagtaaagacaggtgtaagaaattataaaagtattaatttggggaactaataaatgtccatgaaatcttcacaatttatgttcttctgccatggcttcagctggtccctccgtttggggtccctgacttcccgtaacatccacacgcctgggattctgggattgctcttcttctacttccttttctggttgtgactcatcttttaactgtaacttattgaaggtctcctacatttttaacactgaggtacttgtgaagaaaaaggacattcatttgaacaaatatttgccactagatattagtcttaaacttaagccgatatggtactattatttagaaatattttaacaagtaaattttttgaaataatcatgtaattactcattcttaagttgcctatcttactttttaattatagaagtggattctatagcactgtaactattttggttctcttttccttatctcttttctacaaaaaaataccattctccaaaaggacattttagcgtgaagtaagccaccaagcacatgcaaaaagtggatggattctgtttactgtgttttcagttgtttaacatttatattgaaaatgctatgagtaacgaggaaactcagtttgctgaatgttcaccatgtaccaaggtttgtgctaaatatcagtgttcatgatcttgtaggtaaagcaggcattactattgccatttaaaggtaagaaaactcatccttttactaaactgtttgcatgttacctacctagtaagtgatagagatacaatttaaaaaccagttgattctggtttttaaacctattacttgtacggttgaaaatataatactatatttgccattttgtttttgctcagttaaatatttctttagtattgactctaggctttggtgttcagtattgattaaaaaaaattcaactctgtcctcagatacctgatagtttattgggtccacagaagattggaatcattgttgtgtttatgatgaagtaatataggtggatgtaaagcatctgtgaacgtttcagtgactttgacagttgaatagaaatttgggtactctgcccaaaacactaaagctgctttgggtgaataaatagtattgactttaggctttgaagcacaagtaagagttaaactagaaggggattaaaatccttggcaaaaagtcagagtttaggtgaaaat

SEQ ID NO: 1577 - DNA, 6000 bp, Homo sapiens
tattcatgaatgaatgaacgacgggttctcactttgtcatccaaggtagagtgcagtggcgcacttatagctcactgcagccttgaactcctggactcaagatcctcctgccttagccttttgagtagctgggaccacaggcccctgccactatacttggtgctaatttttgcttttttttttttttttctttgtagagataagagtcttgctgtgttgcccaggctggtctcaaactcctggccctcaggcgtgatccttctcctgcctttgcctcccaaagcattaggattacaagggtgagccgctgtgcctggccttgaattttaaattgaaattaaaatttaggcttggcacaatggctcacgcctgtaatgcgtgcactttgggagaccgatgcaggaggattgcttgagttcaggagtttgagactagcctgggcaacaatagtgagaccccatttctacaaaaaaaaaaaaaaaaaaaaaaaaaaaattaaaaaaatgggcgggcatggtggcacgtgcttgtggtctcagctgcttgggaggctgaggtgggaattatcacttgagcttgagaggtcaagcctgcagtaagccgtgatggtgccactgcactccagcctgagcaacagagcaagaatctgtctcaaaatattaaaacaaaaacaaaacttgatggtagccctaccaagtatttagaacttacatgaataaaatgatactgtttggggaggagtctttcatctgtgacattgtttgaaattgctagtatgtggtgatcataaaaacaagactaattttcagactaattgttttcagattttcagtctgttccttagtgcctgtatctgggtcagtcagtccccttacctccctttccttggcttaaggtcctgctctgaacatgtccctttcaatattcatgtacagatattctggtggacacatggatgctgttttttcacatcctccctaacactggatattactgattttttttttcatttcagacattctgcatgtgttccataaataacaacaatattcctcttcctttccaatctttataccttttattttaattaattaatggatttatttatttttgagaccggggtctcgctctgtcgcccaggctggagtgcagtggtacaatcttggctcactgcaaccaccatctcccagactcaggcgatccttcaccttaacctcctgagtagctaggactaccggctggtgacaccacgtttggttaattttttttttttttttgtatttttgatagagacagagttttaccatgttgcccaggctggtctcgaactcctgagctcaagccatccacctgcctcggcctcccaaagtgctgggattatagccatgagccactgagcctggcccttttatttcttttttatttcttgttccgctgggtaggatctcatcacagtgtcaaatatggtgacagtagcatgtctctctttgtcttgttcatgagcctagaggaaaggttccagtttgacaaatgtaggcttctttgtagataccatttatcagattaaagaagttccaagaaggccttttattaaaaggaaaatttagttatgccatagtaaatttaaaacatggctttaatatgatttcatgaacatgttgtagtggaaagaaagggcattgctgtcttgtagacctcaggttgaatgtgggtcttactgtctgtgatctggacttctgaacctgcagagtaaccaagtaagcccacataaggtcattcgaattatgaaagtaaaatgagagaatctcttcagttgttggctatttttttcctgacattaatttgaatgaggtcataaagtaaaattttaaagttgaattttatgtagacttggttcattcaaatacttgaagataacaacattcctagtctgagttgtctcttaagaaagatttagtaggggttatgtttctcagttccatgccggcagtctgaattctaattataaatgcctgttctgtcataatcttccaatgagtggaattgaactgttcatatacattttattgatttatgtctgtatttaaagctgagtgatttaatcattttggacggtggagagagccgtggaatcgggtctggctgaagtgagggttagctatcatttgtttaaccctcatgtgtctggtgctgagtaagatgagttttagagtttatgaagggattaggtgacagcgatgaaaattccaagccatacttacgctaagagttatgatggagtcatcttcggaatgtgctgatgacggaagtggggatgcggttgcttgtgggttttgttttgtttgggggagtgtggggagagacgggtgatggttgtagagaatggggaacgctttcaggcatgacccttgtgttgattgggtcagtttagctgcaggggaaggcgcagggatattcctggtgttgggagaggtatccacactggcagaggctggggcagggttctgtgtgtgcagttctggaccatcaagggcagggtgggtaggggctggactctggaaggccatccttcatggtgctgaggggcttgggctttcagtcttgggaatgctttgccaagatatgccgaatctgagtgttcagatctgtaactgcaggtctatggcagtagcattgtctcctgtgttagaggctctttataactctttactgctggtacccccaggacttactgatggctcttgaacccctgcccttgttttccccagttttcaaatgtatttggtaatggggtgcaaccccatttactaatgaagtcctggtttaaaatgaagcatgcgtaataatagttcagcttaataaatgttttggaaaaagagccttgtttacagacattcactcttccctcgatttaaaaaaatattttttttcattctcatattgtcaagagagtgctctgaaaagttacagtgtaacagtaattgaatattctatttatttttgcctttgaatactaagatatataagtcaagggtggactattccttgtcataaagctgaaagtttaatttcaaactgacatctgctgccagttctgtgtttcagtattttatttatatttaaaattccaccttccctatatttgtaatatcatttttttgtggtaattgtgtctttgtgttcttcctttcagtaggtgttatttattaggctcacttttattctgcgggcaacttcagagatcccttgttcctcagaacatgctagaattccttctcttcttcagtgtcctaagtagatgatatgaatgtgcataattaactacgttctgcagttctcagctcaggaatacttttcagctcttacagatagacacttaggcgtaacagttgttacttatgagctcattttaaaagtagataaatgtctgaattttcaaagacaaagggtttcagagttcttgatagtttcttatagaggtgggtttagagcctgtgagaaagccactacttcagaatcttaacaaatagtaattgacacccagtggcaaaaatcagaatccgcttttctttcaacagcagatatttaaggcttaattgctgactgaaagtgcagttcgccctcctgcttctggagacagtgatgcccccagcccagctcactggacaatcagccagggtcaaggtgtggtccccatacccagagacgtcatcttctcctcttccgatctccacgtgtaccccagcttaccccagcttcatcttccctatgcacagaaaattaggataattctaagaattgtttttcttggaaacaatgttttcaatatggcaaagtgaaaattgtttttctaaacaagatattggctggatgtggtggcttacgcctgtggtcccagctacttgggaggctgagatgggaggatcacttgagcccaggagttggagggtgcagcgagctgttattgtgatactcctactccagcctgggtgacacagtgagaccttgtctcaaaaataataataatagtaaataaataaaaatttaaaaagttaaaaaagtaagatgttgatgccagcaaaacttattggtgatgattgaaagccaaaaatatattataaaacacacaagcagtatatcaatattatattatatataaatataaacaaaaacaaaaaaaagcgctaaaattatactaaaggaggaggtgcagttatgcttcttgtaggtcaggtgctctgagcagcagctgccatgccggtcctgccatcaccacaaatccaaggcgactgacaacaccaaacccttcccaactgttcttaactctagtatattcttgctaatgcctttcagtactaatgttttccctgctccagcgtaacacccagaatcttttccttgaccattctgataggagcctagaaccttctgtagttttcagtgtttctttggtgaggcaaattcttggaatatctttggcacgggggtgtaaaatttccactcgctatatttaagtctacagctgggagcaatttcttattgatgtacctaaaactagttaaatccccactctccttagcagtccctcttgagagttatttaagatttaggtaatatattacaaattgtgagtgcaaatctctgccactctctgagattgctgcactaaggaatcactagccctgcccttccctgtctcatcctcccagcgcctggaattggattagcacctgtggtgtgtgttggcattttctgcagggctgatatggtctggctctatgtccccacccatatctcatcttgagttgaaatccaaattgtcatccccgtgtgttggggaagggaactcgtggagggtgatgagatcatgagagaagttcccctatgctgttcttgtgatagtgtgtgagttcttgcgagatctggtggttttataaggggctttccccactttgctctgcactaattctctctggtgctatcttgtgaagaggtgccttccgccatgattgtaagcttgctgagtcctccctagccgtgtggaattgtgagtcgattaaacctcttttctttataagttacccagtctcaggtatttcttcataacagtgtgagatcagactaatacaagggctttaaacatttgtgtgtttgtgatagaaggaaattccatatgcaggtatggtcaactaagtgagtacatttccttaaaaaaaaaaaagtaaaaatttggatttgatggatattgcttacaaacttgagtgctcccaaagttatttccacaggcatgctgaatctcatctgatctgtagtgactctcacatttaacttgaattagagcttgggcacaaaagcaataatttgaacaaagtttgattcttaaagagtaatatggtatccacttccccacttccattgtttttcaagaaaaagttggtatgcaatacaagggtaatattaagcttttatcttcatcatttatttatttatttttataaagacagggtctcacaatgttggggaggctggtctcgaactcctaggcttaagcaatcctcccacgttggcctcccaaagtgctgggattacaggtgtgagtcactgcacctggcttcatttattcagtatttgaggcagaataggaaaaaagaaaaccaaggaaattctaatgtataaactgtgacagagtgtttttttttaacctaaataatgaattccttatatttgaaataactaagtgaaaataaaattttattttgtgtctgtttcaatgtaaaagcttatttcattccactacagcatacagaaactttattctttttcctagaaggttatagtaccagacacccttcttccttgaaatagtttagatgggactgactgaaaagaatcactgtaattggcatgtagagtgtcactgggtactcgttaggataagaaaatgtagtgaaatcaacttgaaatttaaccaaattgatggcattgtgccttgtaaggtgc

SEQ ID NO: 1578 - DNA, 6000 bp, Homo sapiens
gcacctcttcatatcactggactttccaaatcctgcctccagtcaaggtggcccgccagaaagtgagtggctgaggtggctttattccactctgctgcacatttgtctttaacagagttgagtgttaatatcacctgctctgccagcctccaccttgttctgccaactttcatggacttcaccaacaagctacctcattcttcagctctgggacctgggaaggagggagatatttgactggggacttgggctctgagtggtgggtcatggcaaacatgggtgcttactttctgcagggatgggccttttctggcattctgaggctgggtgacaccggggcttctagaagtggtgatctcagcctggactcaagtttttgcaaagtgggctctctcagcagggcagtgctgacataccttccagcagtgtctgggaaccagaacaggagaacgaaaatgcagagaagggccaggcatggtggctcacacctgtaatcccagcactttgggaggctgaggtgggtggatcatttgaggtcaggagtttgagaccagcttggccaacatggtgagaccctgtctctactataaagtataaaaattagccgggcgtggtggtgcacgcctgtaatcccagctacttgggaggctgaggtgggagaatcccttgaacccggaaggcagaggttgcagtgagccaagatcgtgctactgcactccagcctaggcaacagcaagactgcatctcaaaaaaaaaaaaaaaaaaaaaaaaggcagtggatactttggtgatggttgctgatggactggttgagggcaaccctggaatattttgaagggggctctatttgggcaggtgaggacttggatatgtattcccaatgtgtcatgaaattttatgaattacaaaaaaattttcatgaattttgactcaagacaccaaaggctctggcatctagaattatgcagtactagtttttcatccattattaatataaacggaatcactgcatctagataaactaggtagatttaaatacagctgtaaggctttatctggttggtggaatcagtgttattaatcctctggatcatattttttaaaaacatccatatccttattaggtattgaatagttaaaggaattgatgtacataaaatggtatccacatatcctgatgtcatctctgttatgaaagcttcccccttctctagtaccgccataaacactttgctggcactgaatatttaatgtgttgaattatagttattggaatagctatcttattctgacctctagattgtccttcttttactcacctttataattctgtaatatttagccagtgcttcctgcaaggaaggtctttactaactgcatgtggaatcaaatttaagtgaattgagtgcaggcctgagagtcagagctggagtttttggttgtagtcctagcccagtcactggaaagttgtatcacctggctagtcatttctttgagccttggtcttctcctgtcctcctcatctctcctgcctcctccactgtcatcatttgctatcctgtgctggactttgttaccctctgccttcattacggtaactggactgtactacgctatacattcccatgtggcagcgtggcagcatgtactgtttttttttttttcttttgagacagagtttcattcttgttgccctcggctcaccgcaacctcggcctcctgggttcaagcgattctcctgcttcagcctcccgagtagctgggattacaggcatgtgccaccatgcccggctaattttgtatttttagtagagacggggtttctccatgttggtcaggctggtctcgaactcccgagctcaggtatctgcccacttcggcctcccaaaatgctgggattacaggcgtgagccaccatacccagccgtactgttttctgatacattattttatttaacattcataacttatgaccaggtgccgtggctcacacctgtaatcccagcactatgggaggctgaagcgggagaatcgcttgaggacaggagttcaagaccagcctgggccacatagtgagaccttatctctacaaacaatttaaaaattagctgggcatagtggtatttgtctgtagtcttagctgctctagaggctgaggaaggattgcttgagcctgggagtctgaggcagcagtgagctaagattgtgccattgccctttagcctgaacaacagagcaagactctatctcaaaaaaaaagaaagactgactcataacctatgagatctatgagatggatatggatatgataagctctacttctctacttttcagctgataaaacgggctggagaaagagtgactgttgtgtctaaggcactagtaagtggccaaatatggatctgaacctagatcagtgtgatgtcctatgtactctggttattactgaaaaatgactttcgattagaattattttgagaaagccccactctaatttattatactcaagctagtatacccctctgaactagtgtagcatcaaaactagtatacattctctgccgcgcggtggctcacgctgcaatcccagcactttgggaggctgaggcgggcggattgaccagcctggccagcatggtgagaccctgtctctaactgaaaatacaataattagctgggcgtggtggcgggcacctataatcccagctactcgggaggcggaggcaggagaatcatttgaatccagaaggcggaggttgcactgagccgaaatcacgccactgcgctccagcctgcgcaacagagcgagacttggtctcaaaataaataaataaataaataaataaaaataaatacataaataaatgtaaaaaacacaaaataaaataaagtagtatacattctaaactagtagtatactctcccaatgcatgaaaacagaaacaacacctataattatcagtaattgttgttgtggatccaagtatctatgtaagaagcaaaaaacccacatcaacagttgttgtcatcgttgtcacaaacttaattactggctagaaatgtctagtgctgcagccaaacagcagtaggaggagcctttcccatggctgagtggaaggagggaaacctagactatttctgggtctgccttgagctttctctgccgccttgggcaagtgactttggccctgggtcaatgtcctggagtaagatggggctaacaccactgcactgatttgctgggacaggtggtggaaagtggtggtccagggctgggagaggagaggaagggcaatgtttcctaggagaaactgcactatgctggggcagctgcggtgctgcaaagcgcagggagtgtggcaagcggacgaacctcgtgtcttgtttccttgttttaagattggaggtggagtgggatggatggtcgatcgccagctcttccagctcttaagtgctcaagttctgcgccaacccaggggagcttgattgctttcacgtgtcttggaaacaactggcaaaaaagaatttcacatagtctggaaagggcttgggacagggaccactctttgcagacatttgtcattctttaaacataatgacatacatttattaaggactcatagtccataactaagacaaaatgagcttcagttacgttccctaactcggtccacgttcctttagaacgtctcaagcccgcatgtcactcatcgcggagtcgcagccttcccctgggttcgggcgtctgcgttaagcgccggcacatcgtggggatccccgcgtgagatttctctgcgccgtcggaatagactgttcacggattcgcgttaggattccttatgctgcagaacttcaaagaaataaatgtatcagaattgcgatgtttaagttctaatctatttaagcgggtgggtcagcagagggtcaacaggaaacttcaaggtaaatagtggcctctggaaaaggcccggtcgctcacggcttccccactgtctccccagagcagactattaattcttgcgtttcaggcagaactgccgctgccggccctgcagcagagctagggagcgggcagggcagaaacccagccgagcaagctgcaggctcgagtccccgcgggcggagaggctcgggctggagcctccggggcggtgaggaggggactcaccgcactgagcacaaactgctttccccgggagcgcctgcacccaaaaccctccagttcgaggaatgggattaaaagtgacaaagaaaggggaaggggggctccgtggagacttctggaggcgtggaaggggcgtccccgaggaggggcgacgcagccctgcagggtgctgggcgggcggggtgaagggggctggggggcgcctgggccagggctggtgggggcagacggccgcctgcccgtgctggcactggggcgaggggtcccgcgcccccggagggagggagggagggagggaaggagggaaggaggtcggcccccgagggcggtggcgggggcgcgagctgcggtcctgcgctccgccccgcgcgggtagccggccgcgcctccccctgccgcatgtgcgcggtgttgtgtgccctgccctgctcctccccctcccctcccctcccctcccctcccctcccgccgtcccctcccccagcggccccgagcgagcgccagcgccacacagccccgggcagccgccggcgagcgcgccgcgacgccgaacaggtggccggaggctgcgggcgccgcggcggggagaggcgaggcaagccccgggcgaagcgaggcgaggcgagggcggccgggccgggcatgcgagctgagcggccccccggcgtcgccgccgcctgcccgcgcccctagccgcccgcgcgcccgagtccccagcggctcctccgcgcccagcgtcctcggtcccggcctcggctgctccggctgcgctcggcgaggggcgcgggcccgcccgcggcggcggcggcatgaaagtgaccgtgtgcttcggacggacccgggtggtcgtgccgtgcggggacggccacatgaaagttttcagcctcatccagcaggcggtgacccgctaccggaaggccatcgccaaggtgaggggccgggggcgcgggcggggagggggcggcggcggggacggcgccgggatcaatatggcgcttcctggaagggggaggagaggcgcagggaggcggggaaagggaaagtgcggccggtcgggcctcgcgggcgccccccgccccggactgcgggcgccaaagttctctgcgcgggccggggcgcagcctctgggacacccagccgggtcccgcggcccccgccctcaccctccgcccgggagctccggcctcggtagcgcggggcgagccgggcagcggcgcataggccggccctgggcgcctccccggagtctgcagacccagccaagccccgagccagcgcgcggggggcgcaggccgggaaatccagccccaggcctttcccggctcccaggccccgggggcacaggccggggactgggaacttttggtgtgaggagagtttcgtgactgcccttccgacagaggcgggttgcgagccttctgcctcctctcccttactcgggcgggggcggaacagcggcggggggcttttcctccatgtcccctgctggtaggggccggcaggggcggcccgtcgcgtccgggggctgcagggtttggggagtcgccggcttggggtcggggaggcgttcccgggagggccaccgctggcacttggcactcgcttgcgagcatttactgagctgatcccacttgctgggctctggaaagcacaaccttggaagagtcgcggaatgaaaagttttcctgcgaggacctcagctcctacctatcccgggctggttccatgtggctgggctgcggggccgggcctgacttgggagttgagtggatttccctttttcctggtggactgataacattgtctccacttcacagcattcctctactgtgtgt

SEQ ID NO: 1579 - DNA, 6000 bp, Homo sapiens
tgtcaggctggagtgcagtggcatgatctcggttcactgcaatctccaccttgtgaattcaagtgattctcctgcctcagcctcctgagtagctgggatttcaggcatgcagcactatgcccagctaatttttgtatttttttagtagagacaaggttttaccatattggccaggctggtctcgaagtgatccaccttacctcaagtgatccaccagcctcagcctcccaaagtgctgggattacaagtgtgagccattgtgccccgccaacattacttttgaagtcagaaacaattataaaggaattaaataaacatacaaggccaaaacacagttttgtaaaatgtagcattagctaaaaagtaaaacaaggaaagcaatcatagatgaactaggatttgaggtttgtttggggagtaaggaccaactaatgctaaaagtggtaacttaaagggttacccagaaagaatttttttttctggaaaagaagtaatttcactttgatattaagggcttggatgctaataactattttacgaatattatttccctactgtagagtttgggtaaactgtcaagaggtgggggcaatctctggaatttagaaataaagggggctgttatagtgattcatggttggcacccttcacgctcgatcacatttccaaccagagttaagaggaacatgatgagagtgaaggaatttcatgagttagagcagtggttctcaaacttttcagtttctttacacgcttaaaaattactctagctgggtgcagtggctcccgcctgtaatcccagcactttgggaggcccaggcgggcaaatcacctgaggtcaggagttcaagaccagcctgaccaacatggtgaaaccccatctctactaaaaatacaaaattagctgggcgtggtggcacgtgcttgtaatctcagctactcgggaggctgaggcaggagaatagcttgaacctgggaggcggaggttgcagtgagccaagatcgcaccattgcactccagcctgggcaacaagagcgaaactccatctcaaaaaaaaaaaaaattatcgaggacttagaagagcttatgttcatgtgggttatatctattgtattatgccattcttgtattgttataatgaaatacctgagactgtgtaattgatgaaataaagaggtttaattggctcatggttctgcaggctgtacaagaagcacgatcctggcatctgctcagtgtctagggaggcctcaggaaactatctatctataaatagttattgtattagaaatttaaaggataaaaatttttaaattactgattaattttaaaaataataaaccaaacacatttaacataaattgcatgcttttatgaaaaataaccatattttccaaaataaaaaaaatttgatcagaggaaaaggattgcttttgtatttttgcaactctctaaatatttgatttaatagaagatagctaggttctctatggttgaaatatatgaagaaactcaggcctttgaaagaaaattaaatagtctttttggataattatggatattcttctttgatactatagtgaaattcaacaagtggtaatttcttcttcttttcttttcttttttttttttttttttttttgagagaaggtctgcctttattgcccaggctgggtgcagtatggcgtgatcttggctcactgcaacatctgcctcccaggttcaagtgattctcccacctcagcctcccaagaagctgtgactaccagcacacaccaccatgcctggctaaattttgtattttttgtagagatggggttttgctatattgtccaggctgatctcaaattcctacactcaagagatctgcccacctcagcctcccaaagtgctgggaggcatgagccaccaagtctgtcaattgttctttcaagtaaaaatggccttccattgtaatggccagatgggttcttcttggctactgcacagacaaaattcaccgagaccaaggtattgcagtagagaaagtgtttaattgacccaaggccagtcacataggagaactggagttatcactcaaatcagtctccccctgggttggaggttggggtttttatggacaatttggtgagcaggggactagagaatgggttctgctgatgggttggggatggaatcataggggtgtggaaaacagtccttgagtgctgagcctgcctctgggtggggccataggaccagttctgagtcatgagtcacgagtccaggtggggtcagtctgaaaaatatctcaaaaagcaatctaaagttgtacaatactgatgttatttataggagcaactggggaagtcacaaatcttgtgacctctggccacatgacccctgagcagtaagggagtatattaatagaaatatgcctacactttagcaaagttcacacccctcccataatcctattcttgctgcttttcattagtcttccaaaggtggtttttcatccctaagcaagagcaggggtagttttagggaggaacttagctttcaagttaaaccataaactaacttcctccccaaattaagttggcctatgcccaggaatgaccaggaacaccttggaggtcagaagcaagattaaatcaatgaggtcagattcctcttactatcatgttttgcaaaggcagtttcaccatgaaaaatgcaggtagttcagcctgtaagtcaaccacacaagtgcttttcttcaagacagccatcccactttggcatgcagaagtgcatgtgtacttcccatttcttcacacagagtattagaaagacttgtattcaagggccaaaatttaataaaattaatgcttccgcttcatccaggatattcctaaatcaatagccttaaaaactgggaatgtatggcagtgaagaatacagcgatccaatgaccacccggacaggttggtggcactgtcttgatccctgctaaggcatcaatagtgtccgtattcctttgcaccatcagtacaaaaacaaactcagtcaaaaagacagaggaggccaggcatggtggctcactcctgtaatcccagaacttttgggaggctgaggtgggcagatcgcttgagctcaggagttccagaggagcctgggcaacatagtgagaccccatgtctaccaaaaatacaaaaattagctgggtgtggtggcgcacgcgcctgtagtcacagctgcttcggaaactgagatggtacactcgcttgagcccaggagtttgaggccgcagtgagctatgatcaggccactgcactcctgcactccagcctcagcgacagagggagaccctgtgtcaaaaacaaaaacaaaacaaaacaaaaagcagggggggcctgacacggtggctcaggcctgtaatcctagcactttgggaggctgaggtgggtggattgcctgagctcaggagttcaagaccagcctgggcaatgtggtgacatggtgaaaccctgtctctacaaaatacaaaaaattagccgggtgtggtggcgggcttctgtaataccagctactcgggaagctgagacaggagaatcacttgaacccgggaggtgcaggttgcagtgagctgagattgtgccgccactgcattccagcctgggtgacagagcaagactctgtatccaaaaaaaaaaaggaccagacatattgcattgttaacaaactagttgttaaccttatgacctctgtaaaggtctcagggatttccagaggtctggggaccacactttgagaatcactagattaaaagggggaaaacatgggaggaaaaaaaggtcacataatggaaacatactgttggattgaatttcgtatataaaaaccctttactgaaataaagagtagagacttcaagtaccaagagaagcagattagaagaggaggaaggctctagggactgatcaggtctggaggcagggttttaaatgggccttgaagggttcgtgcagtttggaaggaagggatgggagggaaaagcttgctgaatcgtataaatgaacaagaccctgatggtgagctcttgaggatatgaaaggcaaaaagcactaaggccgggcttttgttcctctgtggccctgcatatatgaggaggtgatgagtaattctatatttttatcagctttaccgtttaaaactccaagggaggaaaacccttcaaactgataggcttggggcttggtgaaggtggggtattagtgaaaaagatgtgaagtttctttatcgaaaatacatgtatgtccaagaaattctctgtagataaaaactaacaagaaaaagagtttgtcagagaggaaaagtagttttgctaatttatttttgatcatttgcaaagcccatggaagtgtgtggcaagaggattgtggtgtcttaggatattcacataggtctgaaacaaggaaaacatacttctgttgaaagcaccattccaacatattgttattagcagtccctgaactaacgggtagtgggtgggtactgtgtccatcagctcagcgaaccgcaattgcctcattgacagcaagcccagcaaggaatcacttggaatattaatttccgtggcctttcgcaatcacacgaagcttggctccctgcgcttgccgtaacgcggcctgtaccattgctttccgggtggcgggggggatttggcagcagcggaagaaggagaccggagggtgtgtgttgggcaaagccggaggcagaggaggacgattgttttacggatcccgtgatcggcccgtccttctcccctttccccccctccctaccgcccctgtcccgccggggagcggcggcggccttggactttgctgtctttcctcgcggagacaggtgagtgtcggcgcgcgggctccccgggcttcgctccccaccccccgcgtctccggggccggtggcggcggccggccggggaggcggcctcggcgcacagtaatggcagcgctgtgagcaggggaacgcgagctgacagccgccgccgccgccgcctccgcccaccttcctcgccggggcttcgtctttcactccttcgggctgcctccccctccccttgtcccctgccccttgccctgcttctgcagaaggtaaccccgctgagggtcggggagccgggctgcaggcgccgggaaacttcccttcccggttaatgggtggcggggctggggcggaggagaggagttgggggcgacgaggtgtggggagagggatgaaagggggaggcccgggaagatggtatcctgtaagtgacctcggctccccagagcgctgacccgtaagccctgccaccccctggactggatcccgggcctccccaacccgatcttggccgcctctcccgcggccccattttccttcgaaggagggaaggtgagagtgcgtgtattcttctacatatttacgtgctcacacgaatacacaactctgtgtgtttgtgtgtgtgtgtgggggggggcatctcatgcatccttaccccgagtgttttcacttttgtttccgcagactgcaaagattgatagctttggggaggagtatcctacgtgcatgctagacttcttgtctcaacccttagggtctggtgaaataagatcctcacacgctttctagcacttgcttaccctctagagagtctggaccattccctaccattacgtgcatgcaaataaaacatctgtgaattgcagactgttattaatgttaagtccacatctttgccccatggattaatattaacagttgaaggccagtaccctgggcgtttaaattttgaagataagatgcaaaatattaacgttcgctatagattgtgactgttcaacataaacgtctttgaactagacctggccaagcctaccttcgtagtaaagtatcggaaataatcactttgatctgattgacaactgactacataataatcgcttaaaaacattcaaaacactgttgcctaccctttagaatcttac

SEQ ID NO: 1580 - DNA, 6000 bp, Homo sapiens
taagagagatggggtcttgatatgttgtccaggctgtagtgcagtggctattcacagatgtgatcatagcacactgtgggctctaactcctgggctgaaagtgaccccctcccacctgagcctccccagtagctctctgctaatttcttttcttttttttttctttttgagacaaggtcttgctttgtcacccaggctggggtgcagtggctattcacaggcatgatcatagtgcattgcagcctcaacctaccagactcaagtggtccacccatctcagtctcctgagtagctggaactacaggcacatgccagcacacttggctattttttttttttttttttggtagagacagggtcccactttgttgctctggctgatcttgaactcctgggattaagcagtcctcccacctcagcctcccacactgctaggattacaagtatgagccaccacacctagctcctgctaattaaaaaaaatgttttttagaaacagggcctggctatgttgtctcaaactcctggcctcaagcaattctcctgcctcagcctcctgagtaggtggtaccacaagtgcatgccaccatgcccggcctcaagtactttcctatgtctaatgtttagccagtagttattcaaatccaagcaaagaaaaataattcctaacctcttagcactcacattcttgattagaatatatgccatgtccctattatctggaggtcatcctttggggccactctaaccctccacaaacatcagaaaaaaaaaacaatggaaaatattcctcagtgcctgaagtaactatagtagaagatgatttaaccagcagtctaactggtaaacaaattgttctaaaataattttcatgtgatcatccattgttaaaaattaggtcattgcaggctgggagaggtggctcacgcctgtaatctcagcactttgggaggtgggtcacttgaggccaggagttcgagaccagcctggccaacagatgaaaccccgtctctactaaaaattcaaaaattggccgggcacggtggctcaatcctgtaatccctgcactttgggaggctaagacaggtggatcacgaggtcaggagatcgagaccatcctggctaacacggttaaaccccgtctctaccaaaaatacaaaaacaattagttaggcgtggtggcgggcgcctgtagtcccagctacttgggaggctgaggcaggagaatggcatgaacctgggaggcagagcttgcagtgagccgagatcgcgccactgcactccagcctgggcgacagagcgaaactccatctcagaaaaaaaaaaaattagccgggcatggtggtgcatgcctgtaatcccagctactcaggagactgagacaagagaatcacttgaacctgggaggcagaagctgcagtgagccaagattgcgtcactgcaccccagcctgggtgacagagcgagactctgtctcaaaacaaacaagcaacaacaacaacaaaaccacatccaaagatattagagatagatcaatatttaaaatttatttgttattgtttagagacagagtctcgctctgtcacccaggctggagtgcagtgacatgatcatagcttactgtaccctccaactcctgggctcaagcaaccttcctgccttagcctctcaaagcactgggattacagttgtgagccaccatgcctggcctgacttaaaacattgtaatcattatgctcttttagaattaagatatttaaacttcagatatattcatcattgaaataggtcaagttgcagattttctgggtaatacatttattttatgaaaaccaataacctgaaatgatgcacttgattgggtggacagcaaaactatgtctgctattatatactatatactaggatgcaagttctatgaaagccaaaactttgttttgttcagcccttcatccctgccaccaagaacagagtctgatatataataaatgcaaaataaatgttttttgaatgaattaatgcatgctaactcatttttcaaaatttatgtttaattgtggcaatatacacatagcataaaatttaacatcttaaaatttaacatttttttgttgttttttcgtttgtttatttgttttttgagacaaggtctcacggtcacccagactgcagtgcagtggggcaatctcagcttaccagtctccacttcccgagttcaagtgatcctcccacctcagccccccaagtagctgggactacatgcacatgctactatgcccggctaatttttgtatttttagtagagacggggttttgctatgttggccaggctagtcttgaactcccgagctcaagcgatccacccaccttgacctcccaaagtgctgggattacaggtgtgagctaccgcgcccagccaacatcttaaccatttttaagtgtacagtttagtttgtcttgcaatactgaatctctatacccattaaacaacaatgctccacttttcctcccttcagtccccagaaaccaccttctactttctatctctatgaagatagagaactcgaggtacctcatatcagtgtaattacacagcatgtgtccttttgtgactggcttatttcacatagcatagtattctcaaggttcatccatgtggcatgtcagaatttccttccttttcaaggctgagtaatattccactgcatggatatatcaccttttctttatccattcgtccattgatagacacttgggctgtgtccatcttttggctattgtgaataatgttatatgaaaatagatgttcaaatgctgaagatcttcctttcaatttttttgatgggtggggggttttatatccaggggtgtcattgctgaatcatgtggtaattccatttttaactttttgaagaccttccatactgttttccataatggctgcaccattttacattttctcccaccatgcacgagcatgtttctaactcctaagtttggtgatctggtttctaggtgtggtgccgaggagcagcaggacattaggaggtgttagcaggtaaaacaacaggacaaagtatcatctggcaatctactactgagagacaagaattccaagaagcaaaattagtactagattattacgatattcaatcacgatgctttcagtggtgttctggagatgccatgaaaaaagttatgttgttttttcactgtacaaggaggcaggcatctatctatttcagaaagacattcattgattctcaattatgtaagtattgtcatacttaattttgttgtttaaaaaactaagacttctaacaaatatggtgaaattttcagccggatgcagtggctcacgcctgtaatcccagcaatttgggagggtgaggcaggtggatcatgaggtcaggcgttcaacactagcctggccagcatagtgaaaccccgtctctactgaaaaaaaatacaaaatgttagccaggcgtggtggcgggtgcctgtaatcccagcgacttgggaggctgaggcaggagaatcgcttgaacctgggaggtggagactgcagtgagccgagatcgcgccactgcactccagcccggctgacagtgcgaggctctgtctcaaaaaaaaaaaaaaaaaaaaaagcgaaatttccaaaggactggtggtcattttcatttatccagaaatgtcacttataggggatgtatcccttctctatgatgccccattagtgggatgttactgcttccatatacaataatgaatcatatggatacactcccgtattgttcattcttgaactgttataaatacatacttgagactgagtaatttataaagaaaagaggtttaattggcttatggttccacaggttatacagaaagcatgattctatcatctgctcggcttctggagaggcctcaggaaacttacaatcatggcggaaggggaagggggagcccacaggttacatggccggaggagcaagagcgagaaaggggagttgccatgcactttaaaacaacccgatcttgcgagaactagcaccaaggggctgggggtaaaacattctgccccatgatccaatcacttccaccggtccccaccgccaacactggggattacagtttgacatgaaatctaggcggggacacagatccaaaccataccacctcccaaatataaaatgtgatgctataaggacaaatactaagctacaatgatatttttagttcatagtgtttgtcattgtgaaatgtttattgattaagaggaaatctggccagacacagtggctcacgcctgtaatcccagcactttgggaggctgaggcgggtggatcatctgaggtcaagaattcgagatcagcctggccaacatggtgaaaccccgtctctactaaaaatacaaaaattagccgggcatgttagcacacgcctgtgatctcggctattcgggaagctgaggcaggataatctcttgaacccaggaggcggaggttgccgtgagctgagaacgcaccactgcactccagcctgggtgacggagcgagacgccatctcaaaaaagaaaaaaaaagaaaaagaaaagaaagaaaagaaggaatctatttagcaaagaaaagccttgggaagtaagttgatctttagacatgtgtgaaataggatacttgagggtgaggataaaaatcagggtattctaggtttcctgaagctgtatcctttttccattcaactcatctttcatcaacccaaatttacaggccaaatcattgaagaatgacaagtctaacctctaattaccatggcgggtagagcggggaggagatggtgcactgtacacagagcaccaggaacccaagggaagttaggggagatccaggccctgaggagggccatgacctagtgatgacacacaaggggcattattacagtgtacgcaggatgaccctggaagggatgggtgggtgggagtcaggagagatgtgagcctcgtaccaggaagatcatactgaggccaccaggttgagagccgcctggctggggggcttgtccggggacagcaggggcagaggcatggaggtgagctctgtgtgacaggagccaggcctgagaacgcttggggaggagggggactgaggagttaggagtcatgtttgtgaaaagcttgcttgggcggtgcactagcagagactgcagccaggagacttgagaggtcagggaacagggcatgatctagagaaggtgtggaaattgagaatagggccaggcacagtggctcatgcatgtaatcccagcactttgggaggctgaggtgggagaatcactggagcccagcagttcaagaacaacatagtgagaccctgtgtctacaaaaagtttaaaaattagccaggcacggtggtgcacacctgtagtcccagctacttggggaggctgaggtgggaggatcacttgagcccaggagtttgaggctgcagtgagctaggattgcaccactgcactccagcctgggtgacagagtgagaccttgtctctagataaagaaataaatgaaaaaaatcacacctgtaatcccagcactttgggaggctgaggcgggcggatcacaacgtcaggagatcgagaccatcctggctaacacggtgaaaccccgtctctactaaaaatacaaaaaattagctgggcgtggtggtgggtgcctgtagtcccagctactcgggaggctgaggcaagagaatggcgtaaacccaggaggtggagcttgcagtgagcagagatcgcgccactgcactccagcctgggtgacagagcaagactccatctcaaaaaaaaaaaaaaaagaaaagaaaagaaagaaagaaagaaaagaataaataaatgaaaaaaaaaagaaaaatagagaaagaaattgagaataaacaagtggtgaataatccgaatggcagagccatcggaaggggtgcaggaactgtcacaaacagcaaggctgtt

SEQ ID NO: 1581 - DNA, 6000 bp, Homo sapiens
acaacacacagaatgtcttggttatttcacaactgccttataaatgctcgagtaaccgtcatgagaaactgactaccaggtgaaagggcagccatactctgaggagacactacagattttcctttccacaaaaggttcaggtcctgggctaacttggctcagtgttttctgtgttccagaaggtgactcagggagttgtgcaaatgactgactcatatttcatggatacgagtatggctgatgtaagactgcagttatctcctcctgattcaattaaggtagactattcttgattgtttttatcagtagatctataaattatacaagttgatactaatattgcttatgttttaaatagtgtggttccacagaaaattttgttttttctgtgagaaacaaagctactattgctaaaaaagtgtcaagagcactgacttagctatagttcatctgagttttttttgagacggagtcttgctctgtcacccaggctggagtgcagtggcacgatctcggctcactgcaacctccacctcccgggttcacaccattctcctgcctcagcctcccgagcagctggagctataggcgcccaccaccacgcctggctaattttttgtatttttaatagagacagggtttcactgtgttagccaggatggtcttgatctcctgacctcgtgatccactcacctcagcctcccaaactgctgggattacaggtgtgaaccaccgcgcccggcccacctgagttttatatttacctggttacagtgaccaaattcttcaacagtgatcatggagaaagatgagacaaaataattcccaaatgattctttctgctcaaagaccagggtgggtatgagtagatccaggtcaattttttttttcttttaagagacagggtctcactctgtcacctaggctggggtacagtggtacaatcatagctcactgcagcctcctactcccagactcaagccatcttcctaatcctcctcaagcttgaggacaggccttgttacaatgctcagtgtgtacctctccccttctccactccccttgtccacattctgggctagatccacactctattgaggaactgtctctgtattttgattcccgagtgacacagtgttggagatcctgtggctagatacacaggttatttctgcatatggctactcctcaaccttgttgcctgtcttactctggtctgagagctgaaccccacagaaataacaaggctcccctcatccctttctctgaaagattagtactagtcctaagtggttagctcccagcttcctttaggacagaaaaaagagaaggagagaagtgacacttgtttttttactcacaaagtcttggagataggaggtaggaggttggggtggatgtagcttggactttggaattagaaccaggttcaaatccccaattaggacatttctcagtattttgatcttagataggtttacttatcaaagtgtctatttataaaatggggtataacttaatcagatttagatgtaagaaatagtatagtgcatggcagctagcaggctttcaacgaacgacatctctcattactatcattttgacatcacatttatctgctcagagttggttactgttctgcaatttttcccaaagtgtcactgtgtgtcaggcagggagtatctgcctggaggagtttgaagtatgcatgtagggtggatgagttgtgggggtcggcacccaggtaaatcactagcgaggctttagtacccgtcttttctctccaggattcttgaccaaaagttacactctaaattaaagtccaaacaggtacatacctaaggggaatatggtggaaatgtcaaagaggagatagggaaagagggggaggggggcggggcacaaaaatcctggcagaccagaggctgtaccaccctttgttaagggtatgtggctacactgatctctcatcctccagatgctcttcccagttaacactgcccagtgaccttcttggacaggaagcatgcagccagccatgctgtcaccttagtgccactgtctctttctcctcttaagcccttcaaaccataatttgaatgtaaatgttatacattttataatgaaataaaaatagcttaatgcatctgagtagatatgccacacacctatggtccaatgactggatgctgactttcatatgtggcccaaattacaaagcagcaatcagaacagacaacaacagacaacaagggaacttctctcccacgggttcagcaatctgacccaaactccatagccccagacaatctgaatacacacatgcaagtgtaaatatgccccagttttcccaggaagcaggaaaatctacacagcctcaatgaagagcactattttggactgttgttgtctacccaccctctccagggctttaattctttagaacttcccttttacacttcttttctcatctggtcagcattaccactttgcagccacttattttccatggacatctgccacttatcctaacaaatagcattaatacagttgagagcatggagcgtttaaaatatggactaataaatgtataaacagtactttgagagggagggaaagcacaggttaaaaaatggctagatgtagagaattaaatgaaatgtttataaagccgttcacacgatgtccacacattgctgatgctagataaatatcaagtcccttattccttctcttaccttttagtaactggatttgtcacgaacaggtactgaggtctgcataaatcaaggcatgatttcatctctgggcctcagtttcctcatatataaaattaagacagttgtactattgtactagtttttttttcaagaactagttcaaaaacattcccagctcccacccccacccccccaccccacaagactctcctcaagactccttcagtaaatatttggaaaaagggtgggaagtttgtttctgccaccttatattcttcccaataaaggcaagaaaagtcagggatggctggcattgtgggcgtcgggagggaatgcgaaccaacatttactctacttctctcccagccaggcatgttcacataccttgatcttagtcaactggcctaagttaacttgttcccaacatgacaaaacccgatggcattctaaaagcaaagcaaagcaaagcaagggcagtcgatgagttgtgttaacttagttttctatctcatgttaacctccaaggaactcaaaacaactccacagcgaattcaatattaaaatagctctgggaccccaagatttatttcacagcttaaagcaaggtcactatcaagtcctcggcaaagctcaaaatacaatagaaaactcccaaatcaagccccagcttatttaaatgcttagaaaaaaaaaatagccaggtgccgtggctcatgcccgtaatcccatgggaggagtccagacgggaggattccttgaagacaggagttcgataccagcccgggttacgaagcgagatcccatctctacaaaaagttaacacacacacacacacacattcaccaccttagcctggcttagtggcgggcgcccgtgttacaaagggagatcccatctctacaaaaagttaacacacatacacaccctaccttagcctggcgtagtggcgggagcctgtagtcctcgctactttggagacacacacacacacacacacccgtagtcctcgctactttggagacacacacacacacacacacacacacaccttagccaggcgtggtggcgcgcgcctgtagtaccggctactttggaggctgaggcgggagaatcgcttcagcctaggagttcgaggctgcagtgagccgagattgcgccactgccctccagcctgggcgacagagcgaaatcatacctctaaaaaaataaattagaaaaataaaaagacaaaaagagccagcccggtttcggagaggcaggtgcagcctcagcgccctgggcctgcgtccccgaccgggccctggctgcgctcccgcccgctgcgggccccggggacgcacctcgcatcccgcgctgggccccgttccgtccagcccgggggagtggaggaggcagaggccgggtggggaagggcctccagaaaccgagctcccgacgacgtctcccgcgaccccagtgcccgagagaggagcggcccccgggagcgatcccacaaccgcgcggggctgcgccgccccgaacctccccgcggccgccgatctgcttccagggcagagggaaggggcggtgacggggcggggcgggggctgcggcgagggcgggcgccgctggcgagggagggccgccagcatcctccctggccgcgccgcaccgcgccgcgaggagtccgggggctgcgcccacgcccgctgcccgcccgctcgtcggctagtcccgccgtccggcgcggacacgcgtgcccccggcttgaaccggaacctcttgccgaggcggccgccgtcgccgcagccgccggggaagcggacaccaactggggaagcgcgggggggaggcggcctgcgcggcgccgcccgccatggccgcggcggggtgaggtaggcgcggcggccgcagtcgcgcggacccgagcgctcctccgccgcggataggccggccgagggggagccggggccgtcgcccgctcgtcgccgccgccgccgccgccgcccatggcgaggccccgccgccgccgccgctgctgacccggcggccggccgccgttccgccccctcccgtggcggcgagcgggcgggcctccccacacgcccccgccgcccgcgccccgcgtccacccgcgccccgctcccggggactgggagaacaggatagcagcaggagtcggggggccgccgaagatggggaacactacctcgtgctgcgtgtcgtccagtcccaagctccggaggaatgcccactcccggctggagtcctaccggccagacacggacctgagccgcgaggacacgggctgcaacctgcagcacatcagcgaccgggagaacatagacggtgagtgcggcccgccgagccccctacccgcccccgcggcaacagtcgcacagccaacgtcggggcggcccggctgctcttgcttgcccagccggtctcggcgacccgtgcataaccggggcttcgcccgcgcagcctaggcgcccggggccccgcagcctctgggcgtacccctcgctggttacccccaagtgagcggccgcggaaactttgcaggcccgcggcatcgagcacggcgggcctagggcgggtgtgtgcgcgtgggtcgcgaggtgacaggagccggccctcgtccttaatggagcggccagagctgggtgggggcggcccgggagctcggggttcccggcactacctgaatgcagcccgaagccaagttgtgcacgcgtttgtcctataaaagcgaagtgagtggattcccattttggaatcccggtgtctccaacctcgagttggagaaccatgttgagtcagttccccggaaccttacaaatggactccacttcccccgttcccattctaccgttttttttaaaaaatgatttttttgagtggcggttccaggattagtcaaatagcttctcccgagaatgctctttaaaagattgtcagacacctttgggttaagtctcagtttttgcatgggcccgaattgcagtcctatgaatttctgatttattcaggtgacttttggttggtctggagtttgcaaaaagaaaaaaagctaagactaattactgcacgcagtaatgttttatttattttattggtttggcaacatatttattagcactgttgctcagtgataacgacagagggatatttatgcatcatgcttaaaatatagtttatagaattttcaactgaaaagatttgaaattggaagtatctttttatgacaaggtgatttttttaacccaaacatcttctcatagttaatctggttgaacta

SEQ ID NO: 1582 - DNA, 6000 bp, Homo sapiens
gatcagggtcaggagggtgaggccctgcactagggccctggcttcactcacaggaaatggtgactgtgtgttttggctgcctgcagcaggttggaggggacccactctgcctgaaacaccccctcctcagccctggttcctctccgccagagctccatgcttccctcacctcagttcagctctcactgctgtgggaagccttctgagatcatgtgctgggggccaggcatgcaaaagcagatgttgcacttcctgactatgaggagaacagcccaagaggctgagttcagcagccacatgctgcatagtgtgggcaaggacaggaggtttcctggagggtgtgcagtgggtgggcaccctgtgggtgggcacccctgggggcttcctggggagaacgtgctgaatctgagtgcatgacccaggaccagtgctccacagatagttccctcactgagaaggttccccccacccagaggaactatctagaaataaacctaatttgaaagatagctgacatgagaagttcttaaagtagaagtttttgaatttctcccagcattccatcaacatgtagatgggttggcagggtggatcttagcacctcctctcccaacctacctttttagttgagtggttctcagagtgtgggcccggggcaagagcctcagcctcaccatcatctgggagttccttagaaatgcacattctcaggccccactgcagacctactgatccccacagtgtgaaggtggagccccctgtctgttctaacaagcccaccaggtgatggggtgcgtgctcaagtgtggaaactactgcttccattcttcccggcttgtgagttctctttttaagagactgaggcagagactggacaccctccccccataatccctgccttttgcctaagaaagcccctacacagttcctcccttcttttctccctggaggtagggaggggccaccgaggaagccaatgtcctctaggtctgcagaggctgagtgttttcctctgggcccctgcggaagggccctcactggactccacgtggcagctcttggctgctgcatccaccctttgttagcagcctgtcctcacggagacctgcagccagagcctgctgtgtgtgtgttagatctcagtgaagtgattcgccctgaaacgcttcctggtgatgatcccagttaaccagtcctcatccttctgggcaccagatcaagtggatttggcttttaatcccaatatggtggtctaaccagacatttacttagatcactggtcttcctggaggatgcagttttctggagtctggtctccagcaacttgccttggcaggccacgtggcctggtgtggcagctaagcataggctatttttgtctttgctttgcaggaacgagctagagcgacagtttcttgaattgctgcagttcaacatcaatgttccttccagtgtctatgccaagtattattttgatcttcgttctctggcagaagcgaacaacctgagctttcccttggagcccctgagcagggagagggctcacaagcttgaggtaagatggtttaaaacagcgttttgtggtgcagtgttgccaatacatcatctgagtaccagagatgcatgtggtcacattgatcatttcccccactacatgatgtaaaataaagatgagctactaggatatatagctgggcagttgattatgatttgttctgcttcttttttctttgagacggagtctcgctctgtcacccagcctggagtacagtggtgcgatcttggcccattgcagtctctgcctcccgagttaaagcaattctgcttcagcctctcaagtagctgggattacaggtgcctgccaccacacccggttgattttttgtatttttagtagagatggggtttcacaatgttggccaggctggtctcaaactcctgacctcaggtgatctgcctgccttggcctcccaaagtgctgggattacagacgtgagccgctgtgcctggccagccacttcatatttttaataaccagtttaatatcactttatacttaataagcaaaggttttttgtttttttgggtttttttgagatggagtcttgctgtgttacccaggctggagtgcagtggcacgatctcagctcatcacaactccgccccctgggttcaagtgattcttctgcctcagcctccctagtagctgggactacaggtgtgcaccaccacgcccagctaatttttttttgtatttttagtagagatggatggggtttcattatgttggccaggctggtctagaactcctgaccttgtgatctgcccaccttggcctcctaaagtgctggtattacaggcatgagccaccacaattctattttgaaatcaaatattttttaaaacccttacctttacggacaggtttaagaaaattatgtccccccaaaaagcatttcccgcaatataagcccctcaaaaagatacttctcagcatgcgctttcataggaaaaagctgccaaatgatattaacaattgggaatccaaaaagatttgattctgctttttattttttttccaaaataccttttccatagcccagttagagctgagggcagcaccactggtcttggtctgggttttgggccgtcattattaagctgtgtaactttgggtctcatcacagcatatttgtatgtggctccgcctcatatgttcaccaggctcttcccacttgaccttttggcaggaggaaaggggacggggtggtaattaagcaggatccctggggagagacccctcctccagagagggtgtgccccagcctttctcctctgcaccttttttcccaatcctgccttggtctcatcccatagagtgtttccgagtggtggatggcactgtcatgtccccagcttgtgaggtcttcgtgctgcccacaccactgcccatcccaggtgggatgttgtcactcagtgcagagttggtgtggcatcatgatggcttggccacacggtgatctagaactgggagaagaaacctgttatggattacacgcttaagaaagaaaaatgttaaataaaaatttaaaaagtaatatgttaattccaagaagtaaaccatagaaaagactggatgcatagcactggttagaaataaaaatccagtgagagtttcagaactcagccatgcccctgtgattgtgtgccagcctttggaatggaaagcccacccagtctcccagttatcatctattcgaggaaaaatggaaaaccctccctctgcaggacttcctgaaggcaaatgttgtgaaaccttcgcaagcacagatgtgaggtagaatctggctttccctgagagcatgagccccctctcagcctgtgctgtggtccctggtccccctcgtcaccagctatggctctagtggctgcttcagtgctaatgagacaagccggagctcctggcagctacacagctctgcaggaaagtgagtcttgtgttctctgctgaagaatatctggggctctgagtcagtcaccctgagagcacaggccgaggttggtggagttggcacctgctgttccctcaggtttctccgagtgccgagaagggagagctcacctgcttctggggctgctgtgtcacgggccctaggggttcagcagggcaggagaaaaggccagtcatatcctgacaaggctgctctttctcttctccaaataatcaaagcctgggacagtgggctcagcttttaccatcagccagttctagccacacccagtggcagccctgggagagttgttgccagagtagcatggtcccccgtccttatcaccaaagtgttgattatctgcacatctcatatttttgtgatccccctgggtccctctttcggcaaccctctagaggtgacttaagtcctccatccttttctgtggagtccctagctggtggtctggctgcagctgtctttgccgccagcggccgagctctcctctctgtgaggctcagctccaagcccgtgcttcatgccagccctgccaggatggtgctgttcttgccccgcttgcaggtgaggacgccaaggattcaaaacagcacgcgtgtgggtggggcccgtcccacacccctagatggggagccagcgttgaccctggtcgggccgactgtgaggtgacactgtactgttatttcacatcctgagagtcttttctcagactgtaagctcttgggaaacaagagctgagtccacactcccttcgtatctccctgctgccagcagagagctgggctctgggccggagctccacaggggcaggggctctgcctgtccctcatgcagcgccctcggcgcccaggacgagtgagcaatggacgcagatatggcccgccctgacccacactgtctttcttgcccctcaggccatctctcgcctctgcgaggacaagtacaaggacctaagaagatccgcgaggaagcgctcagccagtgcagacaacctgactctgccccggtggtccccagccatcatctcttaactacggaggcccgccggaggccacaccatcccttagtttctcctttagtttgagaaaagacagacttggggtgggtttgtttttgttttttctttccttttctttttttacgcatagctccgtcaagctgcctggatgagcgcccatgcagcaaggcttggaggaagcgtcagtgccctggagatcccagctcgctctccccactgtcagcaacagcacttccttcgtggaggaagtggactcgaatcctggaggaggaaataaagggaaagggaagtcgtggagaggcagggaaaatggttaagcagcccggccctctggagtccccatgggggcggtagctgaagttggcgagcgcagcggtggatgcagagctggctgcacccagggctgggccagtgtgtcctgtaagacttcttgcattccttctgctgcttttttgggatgggggtatttttgttcatttgtttttgccctgttttgattttggtcccacagagcaggggatgtagtttgtacccaccatggcgcagacttccaaataaatagtactggtcatttctctctgcactatttctgcgcgctgtcttctgagctttcttcctcaccagtgggctgtgcttgttccatttctgtacacccttattttataccgtttttcttcaacaatggcgaaattgactgtagtgctgaaccaaaagtatccctttccctccttattcctcaccccaagaacattctagatcacatgggtgcttgtgccttccgattttcttgcatttgtttttttcctgacctgaagttgttgttacaaaatcagtcagactttgtgggctgaaggacacggtgcagcagagggtgtccctgtgagagttctgcagagtgctgggcatgtgcctggaactaccgagtaggagccatttctttgtacccctgcctaatccattcctctccttccaagtccattgttgcaagcaatattcttctcaatttttatatgtttactttaaatcaaagttagtctatttgtataaaatttttaaaaaatctaaaagaaaaagaaaaaaaacaagggtgggttgggtattccagtgggaagatcattgaagggaaaaatgttactatttactgaggtatttttcacagaatgattgaattaaaaaaaactcaacttgcattttcattgtgggtgcttagagaagttctacaaaattcaaactgtgaaggtttatgcttcattaattatgaccatactttttcattttctgacgatccctgatttccttatggactcaataagaatcttttatatcaagtaaaatgaaagttgatgatagaatatcaaatagtgaatttgatatgaaatctaagagtgtgagtcacttgcatatgtaatgctttgggtttttgcatattttcttaggtcacagtgacaggtttctgagttgtttcccttttca

SEQ ID NO: 1583 - DNA, 6000 bp, Homo sapiens
aagactgcaacattagcatacaacatcacattcaatgcatgtaggaggctatttagatcgtttacaaacaaaaaaactatatattttgcattgtactattcatttataattgttcaggctaattttatgacccataatatggacttgactattgggtatacactgggaaagcatgactattctgctgttaggttcagtgttctataaattattgtaagtggcttattgaaatctcaacaatgactatggatttatctatttctccttgcagttcagtttttgattcatgtattttgatgatctcatattaggtgtccaaaaacatttatgattaagttcacatgattaattgacccctttatcatgataatatcactttcttatttctggtgacagccttttgcccaaatatatatatgtatatctatatatctatatatatatagatatatatatatagatatacatatatatgtgtgtgtgtgtgtgtgtgtgtgtgtgtgtgtgtgtgtgtgtgtatatatatgccctaaaatagccacttcagctttcatctgattaatattagcatggtatttttccatccttttatttctttatatttagtgtacttaacgtaattttgctgtggtatccaatctaataatctctcccttttaatggtatatttaaggtatttacatttaacggtgataacacatatgcttaggcttatacctatcattttgctatttgttttttattctcttcatttttttctttgttcgtcttcactttttctgccttcttttggattagttgtttatattttatctcctttattgatttgttacctacaattctttgttttagaagtttataatagttttctattgctatgtaacaaattatcacaatttagaatcttaaaaaaacacatttattatctcacagtttctacaagtcaagattttaagacagtttcactgggtcaaggttttgcattctgctcaaggtctcacaagttttcaatcacgatgttaactgagtagcgttattttttatttgattatttgtagaaacttaatcccctcagggctgtttgactgagggccccatctattcattggctatcagctcaggtctatttacaggtcctaaaggccactcagagttccttgccatgtgataactaccacaggcaacttacaacatggttgtatgcttcttccaggccagaaggagaatccctcttttttttgtgcagtctgctaagcttctgctatacatggaaatggaggcatgagagtggcatgctatcccctctgcctaacaagcaacctaatcaatagaatgacatcccatcacctttattgtattctattggtcacaatttctatctgcactagaaagaaagaaatcacacaaggaaatgactcactggtagcccttctaaagtgtgttggcactattgcttcagagagtctagaacacagttttaactcatcagttcaccttcaactgataacaaaacttcagagaaactatacaagcatataaatttacttttatttcttctctcccacactttgtgctacattttacttttacatatgttataaaacccacatcacaattttttttcctttaaagatagggtctcactttgttacccaggctgaagtgcaatggcatgaccaactcatcacagctttgaactgggctcaagtgatcttcccacctcagactcctaagtagccaggaccacatttcactcctttgtatacattcagatttgaagctaatgccattttcattctgcctgaagaacttcttgtttcatgtgggatcttatgctgaaaatttccttccatttttgtgtgtttaagaatgtctttagttagccttcttttttatttttatttattttttgagacagtcttgctctgtcacccaggctggagtgcagtggcacgatcttggctcactgcaacctccacctcccaggctcatgccattctcccgcctcagcctcccgagtagctgggactacaggtgcccgccaccacgcctggctaatttttgtatttctagtggagacgggggatttcactgtgttagccaggatggtcttgatctcctgacctcgtgatctgcccacctcggccttccaaagtgctgggattataggtgtgagccactgcatccagcctagttagtcttcatttttgaaagctgtttgctggaaacagaaatcaaggttgacttttttttattcttacagtacttgaaagatgttactctactgtcttgcttgcattgttccaagaagaaatttcccgtaatccttatctttgtttctatgtaacatgtgccccaacaccccttattactttagaattttttatcaatggttttgagttatgcaattatggtataacttgatgtcattttcttaatatttcttgtgtttgagatttgtgaagcttcttgaatatatgaatttatatttttcatcacatttcaaattttttggtctttattacttgttttcttgtcctctccccttgcctctctgagactccactttcaagtatattattaggctgttagaagttgtctcacagctcaccattgatttgttcatgttactttattttcattttttaatgttgtgattgattttgggtagtttctctagagctgtgtttcactttcattctgcaatgtgtaacatactatattaataccatctaattccatctatcacattgtagtgttcacctctacaagtttgatttaggtctttattacaagctttgtgtctttgattaacttttttaacagcttttatgacagcagtaaagtgtaaatttagcggttttctgtatagaattgtacaaccttcaccataaccgaagtgtagaacattttatttatccctttaaaagaaacactatatccatttgcagtccctccccatactctctcaacctctcattcccaccaatccccagccctggacaagcactatataaatttactttctgttgctatagatttgtcaaatctagacatttcacataaatgaaataatatattatgtggtcttttgtaattagcttctttcacttagtatattttcaaggttcatattttagcatgtagtaaccattatttagcatgtaataaagttctctttactactgattaatacttcattgaatgaaagtatgcattttcactcaccagctaatgggcctttgggttgtttttacctttcagcttttgtgaataatgctgctatagaggtttgtgtacttttgtgtccccatgtttttatttgtcttggatatataactaggaatgaaattgtgactcatatggtaaccctacgttcaaagcctatgcaccagtttacatttccatcaacatgagaattccactttctttacatccttagcaccacttacctttttcattatagttctgatatctttttgaagatatgggatatagttacaataactgttttaatgtccttgcctgttgattctaacattacttcagttctgatcagcaattgatttttctcctcattatgtgtttttttttttctttttgcaagcttggtaatttttctttgtatgacatatgtaaattgcacctttggtgaacatttttctatttctataaatactgctgaagtttggtcttgtcatctgtcatggtttgttaagtttgatccatttgggtcttacttttaagagttagatggcactacagcactgatcagctaggactaattactgcctactaaataattagtaaacaactatcaaatcaagacttttttgtgtgtactctgtccagtgtcctacggactatgaagttttccagcctggttagtggaaatagagactatttctgaccctctgtaatgtccatatatatatatttatatatatatatatatgtatttttttttttttgtgagacggagtctcgcactgtcaccagggctgtagtgctgtggcgcaatttcggctaactgcaacctcagcctccctggttcaagcaattctcctgcctcagcctcccgaatagctgggattacaagcgcccaccaccacgcccaactaattttttttgtacttttagtagagacgggggtttcaccatgttggccaggctggtctcaaactcctgacctcgtaattcacctgcctcagactcacaaagtgctgggattacagacgtgagccaccgcgaccggccatgtcctggtatctttaaaaatcttttagctagtttcttgagacacatactgctcagtactcagctgaatgaataccaagttctctctcagcagttatctttctcctgtactctgcaaagaacattacctaccttggtctccccagaatatctgttctattttgccaacgcaggcaatcggctgggctctgcttgagttcactctcctgcatcgcatctataaaatactaatatctttgaaagcagctcgctttttgagcgcagatcatttgcttcctgtatctcccggatcactattctttactgattcccagcgtcttagaaacagccccactgtttttcggggttttgtttttttttttctacagcagtagtgaatattttaaataaagtgtcaatgctgtaagtttcccttaaaacgcaaactcaaggaaatgctttccctttttcgagtagagaaagaacttccacaggcgcgcggtcgagctcaagcccacttatagtctctggcaccgcgtaaggactagcgcgcaggcgcagagcccgtgcgcgcctagccataaccgcgcttgcgccaagcagcgaggcccgccaacgagcgaatccgcgcctgccaattagagcgcacaatggtccttgatgcccgcccactaacctctgcagccaatcgcctgccccggcgcgaagtcgactgtgacttcaaagtaatcttagggattgtgggaaggcagctgaactcggcgcctggaaagatggaggcagcggagacagaggcggaagctgcagccctagagtaagtgtttgcggctaagtggcagctggggccgggcctgggaggaccttgtgggcccctatgtgtaatgattggtgccctcgaccctgtacagctgttgaggttcgaccctgccgtgaagtgatcctcaccgcagtcccgtcttaggttcctgaggtgtctgttgcctgctccaggagtacagcctttgggggaccgttcgccgctccccacatccacataatccacaggatgtgctctaggagacggtttcacttctgtcttcttgtcccaacacgacacattcccagtcacttctcatccccatccctgccccttcgtagattgctccagtccctaataatgaaaaaccctagagtagaccgaggcatccagccctctgccctgagtcctttctcagctattccaagactctgccccaaggctggtgctcagcgccaggagggatcccaaggcccagcattcttccccttccttgcatatctccctggcttccttcacatcttgactcaaatgatttctcttcagtgagacactccctatttaaaatttcagctcttttctcaaactccttatccactagccctgctgattttccttttggcacgtattaccaccgtgtgccctccatgcacgccattcctggttgcaggctgtggacccttcaggcccttgtgtaaactctggtcaaggcaagactctcaatactatatatactgatatacacatccacatttgtttgtgtacacacacgaactgtagaactagcaccacaagaaactgcaatttcctgtgtttccttgcccctccagggtcctggctgaggtggcaggcatcttggaacctgtaggcctgcaggaggaggcagaactgccagccaagatcctggttgagtttgtggtggtatgtacaagatgagagcgagcctttcagaagccagggtctggtcc

SEQ ID NO: 1584 - DNA, 6000 bp, Homo sapiens
aataatcacctcccgaaggccctacctcttaataccatcaccttggggtttaagttccaacatatgcatttaggaggggcacataccttcaaattatagcaatccgcaagtgatatacacttcaggccctatggaacctacacttacccttggccatatccagccacgtggatgtcccacagtacttcactatcaatatgcccaaagtgatgctccatgccccatagctgccccttagcatctctctagaacagcaggaccctcagcctgttgcaaagccacacacccaagtcatccctgatgactccttctcccttttttaacccagtcccagctcctaaaaatatctcattgtcatttcttcctcttgaaactgacatctccccaagttcagcacctgctgggactgttgcagagccctccattgtctgctggctctgatgctgcatcaccagccctcttcatgacttttcccccctaactcccacttatgaccatgtcactgccttgttcacatttttttgttcaagtccaacgtctaatccaaaacttttagcatgaccttgaacattaccttcaaggtatagatattatttaactacctagcctaatgtttatgacccttgctgagcacccagattctgtttatgttcagcgtactgaattaatttcagtctacaaacttgcattgttctttcttgtcaatggatcaagctctccaccttcatttgtcttcttggcaaactctttttattccttaagactcagttcagtcaactttgctatgaagccttgcctgatgccctctccactatgttctgcacacagcagtcttcaccatattgcattgtaaacatttgcaccccacctaggtggaagatccacagctactcacctgttatccttgatcctcattagtcccaaggttgacatatgaatctcttctccctacaccatgcccagtttctaaaattccaatgagagattaaggtgggttgacatgtatgcatttaaagtacaactaccaacaggtttaaagtgatctctttctctttttgtggggcgagaatgaagatagggggcatggaggttgtatatgacaaacttttattatctgtattttacactttggattatttcttaaaatttacagaaaaatcacattacttttataatcagaaaaacacccaactctgtcatagcaacgatagttcagtattttcacttgtggtgaaaagacctgaatctatatatcttgtattttctgtcactttcctttctgaattaacatgaaaaaggataaatcttcttcttttgcatacattttccggcaacttttaaattttttttttctttttatatatttgtctgtatagagacagggtcttactatgttgccaagctggcctcaaactcctggcctcaagggatcctccaccttggcctcccaaagtgctgggattacaggtgtgagccactgtgcctggccaatttttaccatttttatccagtagcaatggaggccttggcaagactgattcattcattcatttatttattcgttcatttttgggctagggtagtacattcacgtggctcaatattcaaaagatacaaaactctcctttccacctctgtaccaggtcactcttgtattccacagagggcacatttttattagtttcttccacctccttcccgaagtgtattttcttttcttttcttttttttttagaaggagtctcgctctatcactaggctggagtgcagtggcgccatctcggctcactgcaacattcgcctccagggttcaagcgattctcctgactcagcctcccgagtagctgggattacaggcatgtgccaccacgcccagctaatttttgtatttttagtagagatgggttttcaccacgttggccaggatggtctcgatctcctgacaacgtgatccacccgccttggcctcccagagtgctgagattataggcgtgagacaccgcgcccggcccggaggtgtattttcaagcaaatgttctcacatttttcttatctaaaaaaaacacttgtcttgacctgggctgccataacaaaatgccatagactacgtgccttaaacaacaaaattttattttcactcagttctggaggcttggtgtgcaagttcagagggcgggcaacatcaggttctggcaagggctgacttcctcactgacaggtgccttctcattctaacctcacatgagagcaaccaagctcttcagcgtctcttcttataagagcactaattccatcacgagggccccaccctcatgtcctcatctaaacctaattacctcccaaagcctcatctccaaacaccatcccagtggggtgaggccttcaacgtatgaattagcggggtggggggacaacaaacattcagaccatagaaatacgtaaatataagaaacaaaaccaaaaagacttatgtgcaataccaactgatcttttcttttccttccaaaatggagtttaccaaaatacaaatatgaagtttttcagagcacataccttcccctgctctcctctgcagtttttttttttttaataccacctctagggtagttttcctaaaatatggttccaaggctgtgtgtacctctcctgctcagatcctttggaacagtgttcagcgctcatcaggattctgactgtaaactcccttctctgactttaacatcacaggatgcagtactccctacattctaccatggggggcaccctgaattacctgggttgactttctggcctctgtgctctacttatacaatttcctctgtatggaaggcccactccagaatcctttccccagcctttgttcaaatgtcacttctgctagcattagcagtttcctcctctgggttctcacattgccctgtaacataagttacaaggtaagtaccagaagagaattcccaattatcatcctgctcccctaccctcaacacctccagcggtaactgtatcttattcatttttgtgtctatgaagcacagtgttgcactttggagatactacatagaagttggcccaaagggtaataaactgtatttgccaagatgatagcatggatttacaataacctctgaaactttataaagaaagatgattgagttaaattgatacacctagcatcacagctgtggaagcttgtggtcttctttatgttaaaggtaaaatggatataatgaattagttgccatttttagatgatatagaagttgaattcctcttaagcctctcaaagagaaagacatattaaaattcattaaaaccagtaccataaactgcacagaacagcctggttccctagagcacttctctggggcagtgagttttcatttaaaaaatgaagtttggattttaaacataagttttaaaagtgattaggctccagcaggagttcttaaattcctacctacaccatgactcccaaatgctctgcctctgttgcctaggaacaaaaattgtcaaggttgagccagatgcaatgtataacaccagatgatagatgcagctcattgtgttaaaaggtgttaaacacttaagtgcatgtgatatactctatatcacaagggtaaggaagttccattccatatcctgatttgggtcttctaatacatacttgtagtggatgtggtaatcagtctttgttctatgtcccattaggatcaatgcaaccagaaatccttaaaatggatttttattatgtctagctctgttttactgttctatttgtttattttaaaaagattttagaatggtgtttaggttgggctggtggctcacgcctgtaatctcagcactttgggaggccaaggcaggaggattgctggagcctaggagttggagaccagctagggcaacataaggagacattgtctccgcaaacaaacagaaaaaaaaaaagtaagaaagaaagagagaaagaaggaaagaacaagaaaaaggaaaaaaaaattaactgcagtaagtgcagaaatctctctcaaggatatgatggatggcaatgaagacagagtttttgacactggattatttaaagcataatttaagcctctttctctcccctcatagaattgtgaatttttgtgttttaattatatttaagccaggcgtggtggcgagtgcctgtagtcgcagctgcgctggaggctgaggccgattgcttgagcccaggatttggaggccagcatgcgcaacataatgagacccagtctctaaatgcatgcctctctctatatatttaaaattctgatgtgaaaatattttaaaatttaatacatttcaaatgtttttaattgtataataaacaaaatgtaaataataaaataatttaatattaaattcaaaaatgaggtagaaacaaagcacagcgatataaataataaattttcctttacatttttgaggcggtcttttgagttttccatttccttcttaaggtcactgaaatgtgctccttggagccagcccgcaaatcacgcatttagaaaaacataactatacactcctaaccctaagtattagaagtgaaagtaatggaatctcgatgtaaacacaatatcacttttttgatgagctattttgagtataataaatttgaactgtgccaatgctgggagaaaaaatttaaaagaagaacggagcgaacagtagcttcctgctccgctgactagaaacagtaggacgacactctcccgactggaggagagcgcttgcgctcgcactcagttggcgcccgccctcctgctttttctctagccgccctttcctctttctttcgcgctctagccacccgggaaggcctgcccagcgtagctgggctctgattggctgctttgaaagtctacgggctacccgattggtgaatccggggccctttagcgcggtgagtttgaaactgctcgcacttggcttcaaagctggctcttggaaattgagcggagagcgacgcggttgttgtagctgccgctgcggccgccgcggaataataagccgggtacagtggctggggtcagggtcgtgtctaggggacggccgagggcctcggagggcgagtattgaggaacggggtcctctaagaaggccggactggaggtcagggatctgcgcggggcccggctgggcctcggggggcggtgggcagggccttcgcctgggtctggccgtgtgagccacactgggctggctttagagggaggctatgggagcccagcctggcggggttaggcggcgtgggggtgggggttcggggctgcagtcatgagtcgaggtcggctgttctcaggaactgcctgaagaggctttcgggtcttgattgaagcaaaatccgctcccccacgctgagcgcctgcggagtagcaggctctttcctgggcccggcccctgcgcgccctgccatcccgcctcgggggtgggaaagtgggaccgcacctgggccaggtacaggcgcgggtccctagagccaggccgccctgagaaaccgatcctggaactcgtgggccttcttgggcttgctctgcccacggccccggcccacctggagctgttaagaacagtcagcccaggcacttaactctcatgagcagtgtagtgcagtttttttcatttaaaaagatacatctctgcttctttctggattgatttttctttgaagatgaatgtgagaaatagaacttaaaggtctattctgagtgtgctttataaatgattttatcatcagtgatgggtgttagaaaaatctaggtaattatgcctggagttctgacgtttcattggcaaacttcagaggaagtcttgaacttctggttgtcagcttttttttttaacccattcattgtgattcaagtataccgtttttctgcttagtccttgacattgtttaggttataattagaattttatctgtggaattgcacttttcattcttttgttttacggtgcttaagtgatatt

SEQ ID NO: 1585 - DNA, 6000 bp, Homo sapiens
tgtaccaggtcactcttgtattccacagagggcacatttttattagtttcttccacctccttcccgaagtgtattttcttttcttttcttttttttttagaaggagtctcgctctatcactaggctggagtgcagtggcgccatctcggctcactgcaacattcgcctccagggttcaagcgattctcctgactcagcctcccgagtagctgggattacaggcatgtgccaccacgcccagctaatttttgtatttttagtagagatgggttttcaccacgttggccaggatggtctcgatctcctgacaacgtgatccacccgccttggcctcccagagtgctgagattataggcgtgagacaccgcgcccggcccggaggtgtattttcaagcaaatgttctcacatttttcttatctaaaaaaaacacttgtcttgacctgggctgccataacaaaatgccatagactacgtgccttaaacaacaaaattttattttcactcagttctggaggcttggtgtgcaagttcagagggcgggcaacatcaggttctggcaagggctgacttcctcactgacaggtgccttctcattctaacctcacatgagagcaaccaagctcttcagcgtctcttcttataagagcactaattccatcacgagggccccaccctcatgtcctcatctaaacctaattacctcccaaagcctcatctccaaacaccatcccagtggggtgaggccttcaacgtatgaattagcggggtggggggacaacaaacattcagaccatagaaatacgtaaatataagaaacaaaaccaaaaagacttatgtgcaataccaactgatcttttcttttccttccaaaatggagtttaccaaaatacaaatatgaagtttttcagagcacataccttcccctgctctcctctgcagtttttttttttttaataccacctctagggtagttttcctaaaatatggttccaaggctgtgtgtacctctcctgctcagatcctttggaacagtgttcagcgctcatcaggattctgactgtaaactcccttctctgactttaacatcacaggatgcagtactccctacattctaccatggggggcaccctgaattacctgggttgactttctggcctctgtgctctacttatacaatttcctctgtatggaaggcccactccagaatcctttccccagcctttgttcaaatgtcacttctgctagcattagcagtttcctcctctgggttctcacattgccctgtaacataagttacaaggtaagtaccagaagagaattcccaattatcatcctgctcccctaccctcaacacctccagcggtaactgtatcttattcatttttgtgtctatgaagcacagtgttgcactttggagatactacatagaagttggcccaaagggtaataaactgtatttgccaagatgatagcatggatttacaataacctctgaaactttataaagaaagatgattgagttaaattgatacacctagcatcacagctgtggaagcttgtggtcttctttatgttaaaggtaaaatggatataatgaattagttgccatttttagatgatatagaagttgaattcctcttaagcctctcaaagagaaagacatattaaaattcattaaaaccagtaccataaactgcacagaacagcctggttccctagagcacttctctggggcagtgagttttcatttaaaaaatgaagtttggattttaaacataagttttaaaagtgattaggctccagcaggagttcttaaattcctacctacaccatgactcccaaatgctctgcctctgttgcctaggaacaaaaattgtcaaggttgagccagatgcaatgtataacaccagatgatagatgcagctcattgtgttaaaaggtgttaaacacttaagtgcatgtgatatactctatatcacaagggtaaggaagttccattccatatcctgatttgggtcttctaatacatacttgtagtggatgtggtaatcagtctttgttctatgtcccattaggatcaatgcaaccagaaatccttaaaatggatttttattatgtctagctctgttttactgttctatttgtttattttaaaaagattttagaatggtgtttaggttgggctggtggctcacgcctgtaatctcagcactttgggaggccaaggcaggaggattgctggagcctaggagttggagaccagctagggcaacataaggagacattgtctccgcaaacaaacagaaaaaaaaaaagtaagaaagaaagagagaaagaaggaaagaacaagaaaaaggaaaaaaaaattaactgcagtaagtgcagaaatctctctcaaggatatgatggatggcaatgaagacagagtttttgacactggattatttaaagcataatttaagcctctttctctcccctcatagaattgtgaatttttgtgttttaattatatttaagccaggcgtggtggcgagtgcctgtagtcgcagctgcgctggaggctgaggccgattgcttgagcccaggatttggaggccagcatgcgcaacataatgagacccagtctctaaatgcatgcctctctctatatatttaaaattctgatgtgaaaatattttaaaatttaatacatttcaaatgtttttaattgtataataaacaaaatgtaaataataaaataatttaatattaaattcaaaaatgaggtagaaacaaagcacagcgatataaataataaattttcctttacatttttgaggcggtcttttgagttttccatttccttcttaaggtcactgaaatgtgctccttggagccagcccgcaaatcacgcatttagaaaaacataactatacactcctaaccctaagtattagaagtgaaagtaatggaatctcgatgtaaacacaatatcacttttttgatgagctattttgagtataataaatttgaactgtgccaatgctgggagaaaaaatttaaaagaagaacggagcgaacagtagcttcctgctccgctgactagaaacagtaggacgacactctcccgactggaggagagcgcttgcgctcgcactcagttggcgcccgccctcctgctttttctctagccgccctttcctctttctttcgcgctctagccacccgggaaggcctgcccagcgtagctgggctctgattggctgctttgaaagtctacgggctacccgattggtgaatccggggccctttagcgcggtgagtttgaaactgctcgcacttggcttcaaagctggctcttggaaattgagcggagagcgacgcggttgttgtagctgccgctgcggccgccgcggaataataagccgggtacagtggctggggtcagggtcgtgtctaggggacggccgagggcctcggagggcgagtattgaggaacggggtcctctaagaaggccggactggaggtcagggatctgcgcggggcccggctgggcctcggggggcggtgggcagggccttcgcctgggtctggccgtgtgagccacactgggctggctttagagggaggctatgggagcccagcctggcggggttaggcggcgtgggggtgggggttcggggctgcagtcatgagtcgaggtcggctgttctcaggaactgcctgaagaggctttcgggtcttgattgaagcaaaatccgctcccccacgctgagcgcctgcggagtagcaggctctttcctgggcccggcccctgcgcgccctgccatcccgcctcgggggtgggaaagtgggaccgcacctgggccaggtacaggcgcgggtccctagagccaggccgccctgagaaaccgatcctggaactcgtgggccttcttgggcttgctctgcccacggccccggcccacctggagctgttaagaacagtcagcccaggcacttaactctcatgagcagtgtagtgcagtttttttcatttaaaaagatacatctctgcttctttctggattgatttttctttgaagatgaatgtgagaaatagaacttaaaggtctattctgagtgtgctttataaatgattttatcatcagtgatgggtgttagaaaaatctaggtaattatgcctggagttctgacgtttcattggcaaacttcagaggaagtcttgaacttctggttgtcagcttttttttttaacccattcattgtgattcaagtataccgtttttctgcttagtccttgacattgtttaggttataattagaattttatctgtggaattgcacttttcattcttttgttttacggtgcttaagtgatatttcctactcttggaaaaagtaccttgaaagtcttgagcatgtttgtctgtgacctcagcaagcagaggaaaaagattaaaattgtcacgtgggcaactgtaaacacttaaaatgtttttgtcgttttaaacaaaattttcctaatgaacagtctgaacacattttagttctgtcctcataactttaaaaaataatgttttgaataaaattaggagtatcataaagcggtataaatttgttgaaatatttgggtataactttggcacacgcaggtactactttaaagtgtcacaaaaagggaacataattctggtttttgtttggaaagaatagacaagttgatacctgaatttgagggttattttgattggaagaagctaaatactacactagtatagaatatacacgtttccaatgtctcaggagtcaagaaggatggaaagttattgtaggagtccttacccttgtaaatattgtttgaatgtaattaatatttatggaatacttatgctgcagtaggcactgtggaaaatgctttacatatagtgtttcattaatgcttaaaactactcgagttagtggcatgtaattaagtcagtttttccttcactttaggatctaccatacccattgactaactatggaagattataccaaaatagagaaaattggagaaggtgagtggttttagtaaaataaattttatggaatgatttaacaatgctacaacttctgtaatatgaacacatttaaatatttattaaaattcaaccattaagttgtcttgtagtaccagtgtgcattaacatatgttctttacttaataaacgcaaatttgctcacatttcaagagaattgaaattaccgaatccctaatgaccgttcgcctcacccccatagtcttacagtcttctgatactaaacacttatagtagtacttgtattttgaagacactattgataacttgcatgtgtgttgaggggcagaggttagggctgcagaattatgctaacttcataatatatttttagttttagtctctttcaattgtttttaggatgataaatatttttatccagactttatagactggttacaataattgacttaatctaatttaaataaaatttctatttagttaccctaagtataaatgacctgtcatatagacatgtttaagctattctaaaattataacttatgtatataatccttccctttctgtggtacttgaaggaatgtttagatctatatatggcacaaatgaggggtatatcccttcgcctgttcctcgactccagcagaacattctcgattctccaggtacaaaataatttgctaatagaatccagtttatataggttctgccagaagaaaattcccaactatatttttaatgtgatcaaagaccccacttgacaagaaatagtgaaaaacaagggggaatactggagggaatttagtggaataggagtgacaagttagtgtggtgttcgattggaggtgtgtgtgtgtatacatatatatatatattttttttttaaatcacttaaatacctcatacccattctactaaacaaattttgctgctgaattaaaaatatgtgattagtatgtctaatgctgtgtagtgtg

SEQ ID NO: 1586 - DNA, 6000 bp, Homo sapiens
tatttttatttgaaaaattacatttgcattgaattagttcagataataagcacttaccatatgtaaggcaatattcataatcaatgaaacaaacataaaacatggaccttcccttcatgggcagcatggcataatgcttaagatcagaggatcagaatcctatctccatcacttagaagttttgtggttttggacaagttacttgagatctttgcttcagtttctcatttgtaaaataaagatgatattacatacttcatagtgttgtttgaggaataaattaggggaattatatagtgcttcacatattgtaagtacttaataaatgttagctgctgttattttgacagtattatttactaatacgcatctgtagaccagtgtgctaattgtttttatattgggcagtctgtaaatccaaagtaattaaatagattgtttgactcattcattcaacaaatatttattgctcttctcctatttgctaggtactcttctgggagtggagaatcaaaagtgaataagatgacaaaatctgtgattttgtggtgcttatattttagtaagggacaaagaaagataatagaggatggtaagggtagtagaggaaaaggagcaaagatcaagcagcttcattaaacaaaagtacaagataaattcactagaaaaattttcttttgcagtgtgtcttatatttatgggttctgaagattctatacccaagcacattatttcttctgagaggcaaccatgaatgcagacaccttactgaatattttacctttaagcaggaatgtgagtactgccagaagaaatgttttcacttcctcagtattcttttggacttaagtgggtagtaagagttttgaagactttacagtgcaacatgtaaggacagatttcatgtccacacataaagctttgaggaaagttgtcgagcactctctggtgtttaatggtattaagaagtttttggtggggcatggtggttcacgcctgtaatcccagcactttgggaggcccaggcagggggattgcctgagctcaggagttggagaccagcctggccaacatggtgaaaccccatctccaccaaaaatacaaaaaaaaaaaattagctgggtgtggcggcacactcttgtagtcccagctgctcaggaggctgaggtgggaggatcgcttgagcctgggaatcggaggtcatagtgagctgagatcatgccactgcacggacaattgcctgggcaatagagtcagaccctgtctcaaaaaaaaaaattttttttcatttcagaatttcttattatgtttaacttttacaaacatacttagagttttatatataagttttaatgttacaattaatttttctaagccaggcacggtagctcacgcttgtaatcccagcactttgggaggccgaggcgggtggatcacctgaggtcaggagttcaagaccagcctggccaacacggcaaaaccccatctcctaaaaatacaaaaattagccaggcgtggtgacatgtgcctgtaatcccaggtactcaggaggctgaggcaggagaatcacttgaacctgggaggcggaggttgcagtgagccgagatcgcgccattgtactccagcctgggcaacaagagcgaaactctgtctcaggaaaaaaaaatgtatatattttttctaacaggaaaaaataaaaaccaaaagaaaaaaatgttattttgcattggagatttttgtccttcaatcttgaggcattcctgtgaggaatcctaacaaattgtttatcctgttaccattgcagatcatttcaatcatgctattaatgattgaaattcttcttaaaatttttttgtttttttaaatatcattgttttaagactagtcaggtacagttggtgaaattcttaacctgcaatgtttatcccttttctctctcaaattattatagcaatggtaatctaatacctgtaagtaaccatatgttacagaacaagattaggcctttttcacacctcaaacctttgtgcttttttattatttttgttatttttattttttttttgagacagtctcgctctgtcgccctggctggagtgcagtggtacaatctcggctcacagcaacctcctcccgggttcaagtattctcctgccttagcctcccaagtagctgaaattacaggcatgcgccaccacgtcctgctaatttttgtatttttggtagaggcggtgtttcaccatgttggccaggctggtctcttaactcctgacctcaagtaatccacctgcctcgtcctcccaaagtgctgggattacaggtgtgaaccaccgcatctggcctgcctttgtgctttttaagttaatatttatgactgtattaagtagagttaaattctaaaagcagaaataatttcaacgttttgagactcaaaacatgatccaataaaggtcatactaagtagagacttgcagcaacaggagaaaaatacagtgatgggtagtggcagaagtggcatactcttataacttcaaggatcaggcagttaacctaaatgagtaagataagacctggaaagtgcatgcttgacctaaaagcagtcaaattagaatttttattaaaccacagtgctagaaaacagagtcgttagcagactgccagtgtagaatctctggttgctggatatatatatagtttttttaatatttgaatattacagtattaaaacaggaaataggaactaagttctttttctttgcctagataaataacaaaccacctaccaaaatctcatcaaaaccaaaataggaatttaaagttgtaaaggagcaaatgaaagtgcatgatatctctctaaaagtaaatgatagtttgatttggtagagttttgtctttcttgtgtttctatattggcttcctgcttcactgcccattttaaagtattcattgtaggcaagaggaacccctcagcttttctgacatgagcatgctattatcttttatttttcagaaaaaatggatgaaccttgaattttgttgtgatgatgtagtcatcttgcctgtaataagaataaagtagtcattgactcttagaataaaataaagcaagtattaaaatgattttaacctcaagtacagttctaattttgccttatttggccgataaaggtgaagggttgagctgtttttaagagatttctttcttttttttttttttttgagacagagtcttgctctgtcgcccaggctggagtgcaagtggcacgatctcggcccactgcagcctccacctcctgggttcaagtgattcttgttcctcacccattgagtctctgggattacaggtgcacaccagcatgcctggctaatttttgtatttttagtagagacagtgttctgccatgttggccagactggtctcaaactcctggcctcaagcgatctgcctgctttggcctgtcaaagtgctgggattacaggcgtgagccaccgtgcctggcctgtttttagagatttgactgacttatttttaacaatacgtgatgacttttctgtcatccaaaataattttagagagcaaatattttgcttcataagacataacatcatcgagaataattttagagagagcaaatattttgtcttcataagacagataactttgcatatttttgttgattcttataggggaagatgctttccttaaaaaaattgtgtgcagtaagatttattctctgtggtatttacttctgtgacttttgacactgcatagagttgcccactaccactatcatgatacagaaaagttttatcatgccataagttctctcttgctacctttttatagtcaccccttcactcactctgaagccctggccaccactttgctgtttactgtctataattttcttgccatctgtctgtctgtctgtctgggctattactacagttgaaactgtaactatctcaatttcattataaatagctataagatataaaggaggggagagaacaagaaataaaaatctaatatatatgtttttaaaatggtcacaccaccaccagtaatgtaattttcaattagttttttgtttttctaggtaaaattaagtattcggaaagagtctatgaagcttgtatggaagcttttgatagtttgcctcttgctgcacttttaaaccaacagtttctttgtgttcatggtggactttcaccagaaatacacacactggatgatattaggagagtaagtatatattttacttccgagattgatttctatttatagtacattgttgagtagagcagaagtttcaaacttcacttcactgccaagattaggtaatagtaaaaattagtatactgatatcttaaggaaataacttctgtttattcacaataatatagtatgaactgtattcaaagttggtatcgttttcctatgcacattttatccttactttttgatgagttacttctgttctttcttttctttctttcacagttagatagattcaaagagccacctgcatttggaccaatgtgtgacttgttatggtccgatccttctgaagattttggaaatgaaaaatcacaggaacattttagtcacaatacagttcgaggatgttcttatttttataagtaaggaaaaatatccaagattaatcacattttagttgttaacatagcatatgcttcatacagaaaagccattattttacttaatttactctttttcccccacagctatccagcagtgtgtgaatttttgcaaaacaataatttgttatcgattattagagctcatgaagctcaagatgcagggtaagaattctgtttccctgacccaaattaacacctaaaatataaatcaaacttagtaaccatgattgatgctttacgatgcatattaagctatttgttttgcagctatagaatgtacagaaaaagtcaaactacagggttcccttcattaataacaattttttcggcacctaattacttagatgtctacaataataaaggtaagatattgttgataaaaaaaattgttaaacaacttagtattttaattgactttttttaatataataaaaaaggggtgttgtttgaaactattagtatccagatttctttataaataactgtaagatggaggggagagaacaataaataaaaatccaaaatgtgaaactaagtaatatgtaaccccattccacaacttgtctcttggaaaagccattttgtaaaacgtgctctgagttaagtgcatcaagcaaaaccaaacatgattttctcaaactcccctttcttaaatcttttcccttattgaggatgttttcttatttgtataaagctgctgctgctttgatgattttatttgcactgtctacttgtttagtttatcatgtttcttgttttatgttcactgatctaggttctctttccctttcttatttccttcttttacctccacagtcttatcactgccccatgaagatttgtatttgagcttttttttaattaattcagtttcatctcatttgagggatacattcttctctttatttttactgcttttttcctttgccttccgttccagagattttcatttccccaccttccctgaaaatttgacctgtctatagtaattggatttcattttattttgaatacagtttattgacagaaagtgccaaagggtcttaatctagttaagtgtgtgccaaggacattgaagatgagattgggtatgtttatgtagtttacatctttggaagatgatattaagaggccagcttctcttctgtcttgacatgtctggaattcagttgactatgccatagcttcaggatcagactggagtggatgtgccaagaggaaagaacagaaggttaaagactttaaaaaggacatttagagagagaatgaggtcattgctaaataagggtcatggtgtaagttcaaaagaggaacagaggaagtttttttggatga

SEQ ID NO: 1587 - DNA, 6000 bp, Homo sapiens
tgtataaaaaacattttttatggtgaaatgaggtcatatgattggcacgctttgtttaataaatcaaggtccttttaccaaacttttccttacaactcttgccaattcattcaatagctctggaacctgaagcttttgcctcactactaagctgtatttccaacttggcattttccttttaaggtaacttgttaccatagtgttccctctccctctccctctcaccccatcccctcacactctttttctctctctctttctgttcctttgctttcactaggacacatggtactgaagatttattttatttatttatttttatttatttgagacggaatatcgctctgtcacccaggcagggtgcagtggcacaatctcggctcactgcagcctccacttctcaggttcaagtgattctcctgcctcagcctcccaagtagttaggattacaggtgcgtgccaccacaccctgctaatttttgtttgtttgtttttattgttttttttttttttttttttttttttttttgacagtcttgctctgtcgcccaggctggagtgcagtggcatgaactcggctcactgcaatctccgcctcgcaggttcaagcgattctcctgcctcagcctcccgagtagctgggattacaggcgtgtaccaccacaccaggctaatttttgtatttttagtagagacggggtttcaccatgttggtcaggctggtctcgaactcctgatctcgtgatccacctgcctcagcctcccaaagtgctgggattacaggcgtgagccactgtgcccagccaaatttttgtatttttagtagagatggggtttcaccatgttggccaggctagtctcaaactcctgacctcaagtgatccccccgcctcggcctcccaaagtgctgggattacaggcatgaaccactgctgcgcctggcctgaagatttattttagtatggttaacagtaatgagagtggaaagtaaaagaaaaataatttctagttctttttacacagataagtccacaaaatagactttgtaaacaaaaattaaaattcaagctgctttaaaatataatgaaatagaactagcaagaaacactgaagtagctatgtcacaccaaggctatatgggttatctgaaaataagtaatctggctaggcacggtggctcatgcctataatcccagcattttgggaggccagggtgggtggatcacctgaggtcaggagatcgagaccagcctgaccaacatggagaaatgtcgtctctactaaaaatacaaaattagccgggcgtggtggcacatgcctgtaatcccagctacttgggaggttgaggcaggagaatcgtttgaacccgggaggtggaggttgcagtgagccgagattgcgccattgcactccagtctaggcaagaagagcgaaactccatctcaaaaataaataaataaataaataaataaataaacaaaaagtaatcctcctaaaggaaagctactagaaaacactttagccaaatgacttcagatttataagcagggcaactggcaacagaatccaaatgaattctaacgttgtcaatcagaaatactttagcttaaaaaaaattaaaacacataaattcagcattttggttcaatctgaaagtctgataatttgaggttactataacccatgaaataaaataatgttaagaaaatgactcacattgtaggtgctaaaatgaacatatgcccaatactgacaatgctctctaagtaaaaaggtgaattttttattaatactaacagtcttgataatctcaagagacaatccagctttacaaatctagaacctggtatacaaagcaaaacgtacattttttaagtatctggggaaaaaaggaggtatctgggcaattcaggtcaagtaaactttgtggggaggagggaaagcaatatatataaattcaggattttgtgcttcaattacctataccagctttgctgatgtggtaagaaagcacacatgcagatacggttagatatttttcctaatttttttccactttcttatttcctacatagctaaagaatgcttaatagaatataattaaaagggtatataccatcttgcttaatcaggtgggttagatcaactttcaaacaggggaagaatttgacttgagccagcagctggagtaggctcagaactgaatttaatcaaccaaaaacctaatgacccataatcaatgacatggaattaccactaataattttagtgacaagctcatcacatttactcatgaatcacctacagtattccaagctcccaaacttcacaaaaagtgaatttcaggtatctgatcttaaacacagaaagacctatacacccttaaaaacctacatgaccataaaatgtaggccttatgactacaagcatggagtataaaattttgacactaagaagttccagggaggcaggccgggcgcggtggctcacgcctgtaatcccaacactttgggaggccacggtgggaggatcatgaggtcaggagtttgagaccagcctggccaacatggtgaaaccccgtctctgctaaaaaatacaaaaaattaaccgggcatggtggcgcgcacctataatcccagctactcgggaggctgaggcaggagaatcgcttgaacccaggaggcagaggttgcagtgagtagagatcgcgccactgcactccacttgggcaacaagagtgaaactccgtctcaaaaaaaaaaaaaaaattccagggagaaaaagactacttgcattcaatgccaacagacagtctccataatatcactactatgaaaatgtatcgatacaaaactaccaccacattgtggacttaaaagaaatttggattttaacaagttaaacttaagctgaactcacatcatttatcatcaggcaaccagtattctctaatatcaggtatcacattatagtataattactgaataaaagacaaggaagaatcctgaagatgaaatttaaaagtgaatttctggatctgtaagaaaggtgaatttcccagtaaatgcaggagactccatgagcagtgcaaattagtctgttacacaccattttaaaacatataatccatacaggaattccaactggttaacaaattccataaagaaatgaaagttgtctctatgaagagggcacaatgaagcaccagaaatatgataaccataagctttatttaactataattttctatattaacaagctcctttcctatttatctaaatcaaatggcttttattccacaccaataacctgcaaatatgactgccttggactcacaactcacccctaaggaatctgccttatgtttggaatcttattttcactgcattaaagcagtacagaaaaaacattaccatatatatgacaaggaataagaagattcacaaacgtaaggatagcataaactcattgttcaggaatgtgattggttaccccatctaacagtctggtgaaaagtgcccagggaaatgaacacacaacacagaaatacagtcagaaaatgaagaggtagccaatgtcccgttcccacccccacaaaactccaggatttcttgatagaatgaatgtctgcattactattttttttttaagatttctctgtattaaggattccataaactcgttattcagctcattccaatgcctggcccaactggatatactactaacttaagcctaggtgcaaatcagtgttttgtttttgtttttgtttttgtttttggagacagggtctggctctgtcgtccaggttggagcacactggcgcaaatctcggctcactgcaacttctgcctctcgggctccagtgattctcgtgcctcagcctcccgatccgctgggactacaggggcgcgccaccatgcccggctaatttttattttttgtatttttggtagagaaaaggtttcgccatgttgcccaggctggtctccaactcctgagttcaagcgatccgcctgcctcagcatccgaaagtgctgggattacagatgtgagccaccacgccaggccaaattagtattattcttttaagaaccgaagaaggctcaggttgaaaatttttaattaaaaaaaaaaaagaaaaaaggtttccttgtttttaaatattttaatggaaacatatgagtcagatttcaaaaagtaggctaacggtgtttaaatactgtgccagtgtatttgagaagctgaatgaaaacaaaagtacctatattttaaaaataaatacaatacaaataaggaaaagttcattctacgatttcaatttatcaatcaagctacatggtaaagagaatcatttcaattgtttttcacctccacagcagtgtttgaggttggtaggctctcccaggaagcttggaatcttaagcaactctcaattagccctcaatttctctattttaaattaatctgctgacctgttgtgggtaaacatccataaattctgccctggctgagaaacatttaactttttcgtctaggatgaatgtgtgggtgtgtgtttgtaagggaggggtaactccttttgaccaaagtgttgatggttttctaagtaaatacttgctatccacaagaattttttttttcgtttatgctgctttttctccctttctgcactataaaggctggccttccaattcctgccccgacccttcaccgtgatccaatcccacaaggttcccctaatttctgctccgggtggcacctgacggccaaaagtgaacccctgcggttgtcgccagctagacgcggatagggcggacgactgtcaccggggagcaggcgtgggccaaagccgaggtgatttctgactgctcactggcgggcctcgcgtggctgaaggtctccgagcccctcggttcgccccggcaagccagaagtgcagctgtcgcggggcaggaagctaatcgcggcccctgcgccgctttgacaggccgagtgaagagaaaacgggctcactgcagctaacagcctcaccccttgggctaggaagccacggaagcaaaacctccgccccggcctgaaagcaaccgggagaccgcggaaccactgccaccgactcagccctgcccagcaggggcccgcccaggggccactccccaagggaggcagccagtcactcgcccgcccttccgggcccactcccgaggggacggtctcccgcccgccctcacacacagctagctcttcaggccaggcccccagggtttcgtccacctctcacctttgacgacgcggtcagccccgggagggggcggcgggggcgggggtgggggcggtgcagcccgggccggctccggggcggccatgctgggcccggggctcggctaggctctgggccgggcggggttgggggcgggggcggcggctaccagagccaagcggcggcgccgccggggaacatggcggaccctctttccctacagaggggctaagaccggcatgcactgcgcgtgcgggggtgggggcggggtaggctctagggacttgggcaaaattactgaagctaggagagaaacaggacgaggccaagggatcaggttaaaattctttgcatgcagaatgaagaatgaggaggtgctgcgatcgaacgactgcgaggaaacacacccgctctcatggcattcccagtaaactgagaagacgtgattaaacctcaggatctcctactaatagagaaatgtataacgatttagctaccagatctgaatactgaagggttggtaggggaccagagaatagaggaagcattgtaggttctagagtggagaagggaccatccaaaatggagtttgaaagagaattctggcctttgtgtttagagtctggaattgtcaagagtctgaaagcacagaataagactgcagctagagcaatttaggcgccatagtttgtcaaaacaggtaaggggaataaaggggatgacaccaagagatgtgcaaa

SEQ ID NO: 1588 - DNA, 6000 bp, Homo sapiens
cccctcacactctttttctctctctctttctgttcctttgctttcactaggacacatggtactgaagatttattttatttatttatttttatttatttgagacggaatatcgctctgtcacccaggcagggtgcagtggcacaatctcggctcactgcagcctccacttctcaggttcaagtgattctcctgcctcagcctcccaagtagttaggattacaggtgcgtgccaccacaccctgctaatttttgtttgtttgtttttattgttttttttttttttttttttttttttttttgacagtcttgctctgtcgcccaggctggagtgcagtggcatgaactcggctcactgcaatctccgcctcgcaggttcaagcgattctcctgcctcagcctcccgagtagctgggattacaggcgtgtaccaccacaccaggctaatttttgtatttttagtagagacggggtttcaccatgttggtcaggctggtctcgaactcctgatctcgtgatccacctgcctcagcctcccaaagtgctgggattacaggcgtgagccactgtgcccagccaaatttttgtatttttagtagagatggggtttcaccatgttggccaggctagtctcaaactcctgacctcaagtgatccccccgcctcggcctcccaaagtgctgggattacaggcatgaaccactgctgcgcctggcctgaagatttattttagtatggttaacagtaatgagagtggaaagtaaaagaaaaataatttctagttctttttacacagataagtccacaaaatagactttgtaaacaaaaattaaaattcaagctgctttaaaatataatgaaatagaactagcaagaaacactgaagtagctatgtcacaccaaggctatatgggttatctgaaaataagtaatctggctaggcacggtggctcatgcctataatcccagcattttgggaggccagggtgggtggatcacctgaggtcaggagatcgagaccagcctgaccaacatggagaaatgtcgtctctactaaaaatacaaaattagccgggcgtggtggcacatgcctgtaatcccagctacttgggaggttgaggcaggagaatcgtttgaacccgggaggtggaggttgcagtgagccgagattgcgccattgcactccagtctaggcaagaagagcgaaactccatctcaaaaataaataaataaataaataaataaataaacaaaaagtaatcctcctaaaggaaagctactagaaaacactttagccaaatgacttcagatttataagcagggcaactggcaacagaatccaaatgaattctaacgttgtcaatcagaaatactttagcttaaaaaaaattaaaacacataaattcagcattttggttcaatctgaaagtctgataatttgaggttactataacccatgaaataaaataatgttaagaaaatgactcacattgtaggtgctaaaatgaacatatgcccaatactgacaatgctctctaagtaaaaaggtgaattttttattaatactaacagtcttgataatctcaagagacaatccagctttacaaatctagaacctggtatacaaagcaaaacgtacattttttaagtatctggggaaaaaaggaggtatctgggcaattcaggtcaagtaaactttgtggggaggagggaaagcaatatatataaattcaggattttgtgcttcaattacctataccagctttgctgatgtggtaagaaagcacacatgcagatacggttagatatttttcctaatttttttccactttcttatttcctacatagctaaagaatgcttaatagaatataattaaaagggtatataccatcttgcttaatcaggtgggttagatcaactttcaaacaggggaagaatttgacttgagccagcagctggagtaggctcagaactgaatttaatcaaccaaaaacctaatgacccataatcaatgacatggaattaccactaataattttagtgacaagctcatcacatttactcatgaatcacctacagtattccaagctcccaaacttcacaaaaagtgaatttcaggtatctgatcttaaacacagaaagacctatacacccttaaaaacctacatgaccataaaatgtaggccttatgactacaagcatggagtataaaattttgacactaagaagttccagggaggcaggccgggcgcggtggctcacgcctgtaatcccaacactttgggaggccacggtgggaggatcatgaggtcaggagtttgagaccagcctggccaacatggtgaaaccccgtctctgctaaaaaatacaaaaaattaaccgggcatggtggcgcgcacctataatcccagctactcgggaggctgaggcaggagaatcgcttgaacccaggaggcagaggttgcagtgagtagagatcgcgccactgcactccacttgggcaacaagagtgaaactccgtctcaaaaaaaaaaaaaaaattccagggagaaaaagactacttgcattcaatgccaacagacagtctccataatatcactactatgaaaatgtatcgatacaaaactaccaccacattgtggacttaaaagaaatttggattttaacaagttaaacttaagctgaactcacatcatttatcatcaggcaaccagtattctctaatatcaggtatcacattatagtataattactgaataaaagacaaggaagaatcctgaagatgaaatttaaaagtgaatttctggatctgtaagaaaggtgaatttcccagtaaatgcaggagactccatgagcagtgcaaattagtctgttacacaccattttaaaacatataatccatacaggaattccaactggttaacaaattccataaagaaatgaaagttgtctctatgaagagggcacaatgaagcaccagaaatatgataaccataagctttatttaactataattttctatattaacaagctcctttcctatttatctaaatcaaatggcttttattccacaccaataacctgcaaatatgactgccttggactcacaactcacccctaaggaatctgccttatgtttggaatcttattttcactgcattaaagcagtacagaaaaaacattaccatatatatgacaaggaataagaagattcacaaacgtaaggatagcataaactcattgttcaggaatgtgattggttaccccatctaacagtctggtgaaaagtgcccagggaaatgaacacacaacacagaaatacagtcagaaaatgaagaggtagccaatgtcccgttcccacccccacaaaactccaggatttcttgatagaatgaatgtctgcattactattttttttttaagatttctctgtattaaggattccataaactcgttattcagctcattccaatgcctggcccaactggatatactactaacttaagcctaggtgcaaatcagtgttttgtttttgtttttgtttttgtttttggagacagggtctggctctgtcgtccaggttggagcacactggcgcaaatctcggctcactgcaacttctgcctctcgggctccagtgattctcgtgcctcagcctcccgatccgctgggactacaggggcgcgccaccatgcccggctaatttttattttttgtatttttggtagagaaaaggtttcgccatgttgcccaggctggtctccaactcctgagttcaagcgatccgcctgcctcagcatccgaaagtgctgggattacagatgtgagccaccacgccaggccaaattagtattattcttttaagaaccgaagaaggctcaggttgaaaatttttaattaaaaaaaaaaaagaaaaaaggtttccttgtttttaaatattttaatggaaacatatgagtcagatttcaaaaagtaggctaacggtgtttaaatactgtgccagtgtatttgagaagctgaatgaaaacaaaagtacctatattttaaaaataaatacaatacaaataaggaaaagttcattctacgatttcaatttatcaatcaagctacatggtaaagagaatcatttcaattgtttttcacctccacagcagtgtttgaggttggtaggctctcccaggaagcttggaatcttaagcaactctcaattagccctcaatttctctattttaaattaatctgctgacctgttgtgggtaaacatccataaattctgccctggctgagaaacatttaactttttcgtctaggatgaatgtgtgggtgtgtgtttgtaagggaggggtaactccttttgaccaaagtgttgatggttttctaagtaaatacttgctatccacaagaattttttttttcgtttatgctgctttttctccctttctgcactataaaggctggccttccaattcctgccccgacccttcaccgtgatccaatcccacaaggttcccctaatttctgctccgggtggcacctgacggccaaaagtgaacccctgcggttgtcgccagctagacgcggatagggcggacgactgtcaccggggagcaggcgtgggccaaagccgaggtgatttctgactgctcactggcgggcctcgcgtggctgaaggtctccgagcccctcggttcgccccggcaagccagaagtgcagctgtcgcggggcaggaagctaatcgcggcccctgcgccgctttgacaggccgagtgaagagaaaacgggctcactgcagctaacagcctcaccccttgggctaggaagccacggaagcaaaacctccgccccggcctgaaagcaaccgggagaccgcggaaccactgccaccgactcagccctgcccagcaggggcccgcccaggggccactccccaagggaggcagccagtcactcgcccgcccttccgggcccactcccgaggggacggtctcccgcccgccctcacacacagctagctcttcaggccaggcccccagggtttcgtccacctctcacctttgacgacgcggtcagccccgggagggggcggcgggggcgggggtgggggcggtgcagcccgggccggctccggggcggccatgctgggcccggggctcggctaggctctgggccgggcggggttgggggcgggggcggcggctaccagagccaagcggcggcgccgccggggaacatggcggaccctctttccctacagaggggctaagaccggcatgcactgcgcgtgcgggggtgggggcggggtaggctctagggacttgggcaaaattactgaagctaggagagaaacaggacgaggccaagggatcaggttaaaattctttgcatgcagaatgaagaatgaggaggtgctgcgatcgaacgactgcgaggaaacacacccgctctcatggcattcccagtaaactgagaagacgtgattaaacctcaggatctcctactaatagagaaatgtataacgatttagctaccagatctgaatactgaagggttggtaggggaccagagaatagaggaagcattgtaggttctagagtggagaagggaccatccaaaatggagtttgaaagagaattctggcctttgtgtttagagtctggaattgtcaagagtctgaaagcacagaataagactgcagctagagcaatttaggcgccatagtttgtcaaaacaggtaaggggaataaaggggatgacaccaagagatgtgcaaagaatctgaagaattcacctgaaaaggatacaacctcctcctggaaggcagaggagtaaatagggaattggaaattaattccttatttctgcacatgcacagaatctgggcccaggtgacttatggaacctttatagagaccacggtgactgacactcatgggaaagggggtagaggggcaagaactgactgttcatcaaaaattattagatgagtgtgtccacgacacca

SEQ ID NO: 1589 - DNA, 6000 bp, Homo sapiens
gtgctctggttccctccatttccctttgcttgcctcactgtgtttacccaactacatcctgctttgtgttaatcctcatctctatgtttttttgtcttgtctcattataaggattcatcaaacgtgaggaagcctttggaaaccgggcaccgttgttccagctcctcttccctccctgtcatccatgacccttctgtgtttctcctcggtccccaactctaccttccccaaccacagttcctgtccccagatgtcctgatgcccaccatggcaggggagcccaatagactcccaggtaactcccccaaatctaatattatatgccagaatttggtaccttttcaggggcctccaagggtcaaatcagtatacctatggggaggggggtatcccaaggtggagtggtgtgaagatatgaattactgcttcaaagtcgtgcatttatctagataaatattaaatcatttgttgggcaccatgattcttagaccaagggtttagaccagcacccctagagtctgtctacttacgaaaatgacctgcttcagtcatgacagaataagcttttaactgacaaaggggagttaatacccagtctttgggacatccccagaacagaaatggtcatctctccttctatcctctgagctagttttctccccttctatcctctgagtctcagctgagggatggtctaggaagataaggaatgagtgggagaattggaaagaccctttacatggagtacccacaccatgtgtacagacccagacaattgtggggaaggtgggcaatatcattttggctttctttgaccttccgagtgagatgttctcttttttcccctcatgcactggatgtacaagcttgaggcagtggttctcaatggataaaggggatgtaccaccggtatctagtgggtagaggccagggatgtcctcaacagcacagccattattgtcacttgctcagttgttgttgtaaaccctcagagtcagctgaactattttaggccaaacatactgtttttgcaaagtatttttcattaataaatcacacaatgcacagggcagtctctccccaaccccaacaaagaattatcagcccaagataccaagagtgccaaagttgaataaatgtataagaaaaggcattccacattagatctcagagatcaaacaaaggcagcttaactgaagtgaaggtaacattttaagaaaagttggagaaacaaaaaaaaagcaaggcacagcgtctcacacctgtaattccagcactttgggaggccaagatgggaggatgacttgagtccagcagttcgagaccagcctgggcaacacagtgagatcccgtctctattttttttaaaaagaaaagctgcgtgaggttttggtatggtggctctaggagtatagtcatcacaaagggagtatacgtttgccatatattgctatatattagggagcccttcttttgtaggtgtgtgtatagtggatgagagattatagtggagggaggtagaggtatggcaacatccatgagactgtttcatttgcccaggttggaggtatgagatttgattttgatgtatattaagaattttaagaaatggaatcaaaagcacagcttgattcattctttcccttgtatgtatgctcttggaggagtagggaattgggctacacagctaggcatggctctctgggaaggagaatggttttctgaagatgctcagtctttgggtttcttttctttccccaggaacttcaaggagtgtccagcagtttctggctatgtgtgacaggggtgaaacttcccaaggggccaagtacacaggaaggactttgaactaccagagcctcccccatcgctccagaacagacaactcctgggcaccctggtcagagaccaaccagcatattgggaccagattcctgactactccagggtgcaatcctcaactaacctacactgccacactaccagaaagaagcaagggccttcaggttcctcacactcagtcctggagtgatcttttccattcaccctcccaccctcccattgttcatcctgtgtacccaccatctagcagtcttcatgtacccctgaggtcagcttggaattcagatcctgttccagggtcccgaacccctggtcctcgaagagtagatatgcccccagatgatgactggaggcaaagcagttatgcctcccactctggacacaggagaacagtgggagaggggtttctgtttgttctatcagatgctcccagaagagagcagatcagggctagagtcctgcagcacagtcaatggtaaaggttattcctttcctttcctggagctacacctttctttgtaaaactgtactgtgggccgggcgcggtggctcacacctgtaatcccagcactttgggaggctgaggcgggtggatcacgaggtcaggagattgagaccatcctggccaacatggtgaaaccccgtctctaccaaaatacaaaaaattagccaggcgtgacggtgcgtgcctgtagtcccaactactcggaaggctgaggcaggagaattgcttgaacccgggaggcagaggttgcagtgagccgagatcgcaccactgcactccagcttggcaatagagtgagactccatctcaaaaaacaaaacaaaacaacaacaaaataaactactgtggcagcgttggtaccctgcatcactgccatggttgtgctattctcatctcaacatagaattggtgggttctcctaagggtgtcaggaacctctaaaaagatgtgattctttgggaggggatatttgaaattccaacttccattccccctagcaaaaggaagcagctgctgtttaagggttttatctgagccactttaaagatgaatccatggtattactctggatactagccattccttaggattttaaggtcacattttattcctggatgctttatgtccccacctccacctgagccctcatcctctgttccctactatactcccaacttctactctttgttttatccacctatccctattacctgaccctttgtcttccctgtctcccatccttggggggacatgtagccctgtggtcatggttctgatgacatcatcagggcagcccccctgcccaggtattatggcctgtcagcattccctgtgccctccaaaccttaggcctagaatgcggagctgccaacataacattcacccttttgaacagatggagtcaggcacactaacacagccttctgtcctcaataacacagccattattgccacttgctcagtcgtcaatgtaaaccctcagagtcagctgaactattttaggccaaacatactgtttttgtaaagtatttttcattaataaatctataagacagttctatttaattccttgtcattcttccctttgtatgctcttgctttctttgtattggggctggaagtctggataaatatatgaagtggcttttgactgagtggaagtgaggagccagagacgagttgaaggatatacaatcaaggtgggaatcaatgggtcctaaaatagggtgcctttcctttctagtattgctgctaggatgtttcccatccctttcctgacagagcattcagtactcagtacattatacacttccttcctcccctccttaggaagattttctggggattcaagctcttcttacagactcactcctgatcaatgtactccaggtgccttccctctatcttataagtttgtgacgtgcctcctgtcccttccttcctctccttccgtgggggcctctccctttcccttcccctgtggtgttatggcccttccatgccagaaagatccattttcacctgtgcctcactcccgagactcttccctctaaaaaatagcttgtgggttccctttttggaaaaaatccattgttgggtctttcccttcctcttttcctggggtctcaggatagaaattgacacaaagaagaggtagaaaggtactccttggaccttcggactactacttacttaccaccatgcattatgaacagattctgagcacatgtattattgagcaggaggatgggcaggaattggttgttccatcccacttggatcctgcaccatcaagatatatagagcttagtggatatgctggtccctgtccatgattcaacatatctcctggtgtcgtggacacactcatctaataatttttgatgaacagtcagttcttgcccctctaccccctttcccatgagtgtcagtcaccgtggtctctataaaggttccataagtcacctgggcccagattctgtgcatgtgcagaaataaggaattaatttccaattccctatttactcctctgccttccaggaggaggttgtatccttttcaggtgaattcttcagattctttgcacatctcttggtgtcatcccctttattccccttacctgttttgacaaactatggcgcctaaattgctctagctgcagtcttattctgtgctttcagactcttgacaattccagactctaaacacaaaggccagaattctctttcaaactccattttggatggtcccttctccactctagaacctacaatgcttcctctattctctggtcccctaccaacccttcagtattcagatctggtagctaaatcgttatacatttctctattagtaggagatcctgaggtttaatcacgtcttctcagtttactgggaatgccatgagagcgggtgtgtttcctcgcagtcgttcgatcgcagcacctcctcattcttcattctgcatgcaaagaattttaacctgatcccttggcctcgtcctgtttctctcctagcttcagtaattttgcccaagtccctagagcctaccccgcccccacccccgcacgcgcagtgcatgccggtcttagcccctctgtagggaaagagggtccgccatgttccccggcggcgccgccgcttggctctggtagccgccgcccccgcccccaaccccgcccggcccagagcctagccgagccccgggcccagcatggccgccccggagccggcccgggctgcaccgcccccacccccgcccccgccgccccctcccggggctgaccgcgtcgtcaaaggtgagaggtggacgaaaccctgggggcctggcctgaagagctagctgtgtgtgagggcgggcgggagaccgtcccctcgggagtgggcccggaagggcgggcgagtgactggctgcctcccttggggagtggcccctgggcgggcccctgctgggcagggctgagtcggtggcagtggttccgcggtctcccggttgctttcaggccggggcggaggttttgcttccgtggcttcctagcccaaggggtgaggctgttagctgcagtgagcccgttttctcttcactcggcctgtcaaagcggcgcaggggccgcgattagcttcctgccccgcgacagctgcacttctggcttgccggggcgaaccgaggggctcggagaccttcagccacgcgaggcccgccagtgagcagtcagaaatcacctcggctttggcccacgcctgctccccggtgacagtcgtccgccctatccgcgtctagctggcgacaaccgcaggggttcacttttggccgtcaggtgccacccggagcagaaattaggggaaccttgtgggattggatcacggtgaagggtcggggcaggaattggaaggccagcctttatagtgcagaaagggagaaaaagcagcataaacgaaaaaaaaaattcttgtggatagcaagtatttacttagaaaaccatcaacactttggtcaaaaggagttacccctcccttacaaacacacacccacacattcatcctagacgaaaaagttaaatgtttctcagccagggcagaatttatggatgtttacccacaacaggtcagcagattaatttaaaatagagaaattgagggctaattgagagttg

SEQ ID NO: 1590 - DNA, 6000 bp, Homo sapiens
agaaaatttaattaatgaagaagaaaaagaaaagcacacaaaatcccagaggcaaccctattaacattgtgctggggaaaaatagaacttttcttgtctggcaagtgtgctaggtgttatctcattttagcctcacaaaaatcctgggaggtgggtactttgcttacccctgttttaggggcaaggagagtgaggtgcagacagaggcacagagtggttaaagaacttgccctgagtcacacagctagtcagtgggtaagctgggattcccaggcaggcagttgggctccagagctcacacaggtagcccctctgcaatcctgaccccccttgtagataccttgctgtttttgtatgtgcacgtgcagcctctcacacacacaggctagggttcagattctgagtaggcgatagagatctaaaaccaccaggcagtagaaacgcaccatcttccacccacagcttcctatgtgaggccttccattggtggcttggagtttgggaacggaggttttgtccactggctctggttctgagggacagaaaaatcagtccacctgtgggaaggccccatgcgggccacgcgccgggtagggagacagtagggagtggagaagaggactcagctctgggaagggttcaggcccagggagtagggggtcaaaaactgctgtcccttcccccatcccccattgatccagtttcctccagggagaattagaaaaccaggtaatggtgtctgcactgacttctagtccacaggccgttggctatgttttggttactttttgctggtccgtttgaactactttggacttatgtcattctgcccccaagcacgggaccgtccagagcagatgcttccctatggcattcagggactgactatggacttggcaagtcacagcccagcactgctgcccattgatacacaagattggcaggtgctgctgtctggggcgggcagggactcctggagccctttgccgtgcccccaaccccttggcctggcagggccactggaggacagacactatcgatggcctctctcgaccttgttttctcttcagtaaagtggggctgagatgtctgttctcattacctaacagggttatggaggagtaaatgggctggtggataaggaaaatgtggcagcattactgggtgggggcagggggtccccagtgaatacctttgtcccctgacagtcccgcttaagtatacattgtgtattaggtcttcagtgcactttcacctccttctctctctccttccttgctgagacactggtgggtaggtaaggtgacgtttccttctctctctccttccttgctgagacactggtgggtaggtaaggtgacgtttatttgtcctgcaatcaagaatggaagaaactgagcttcagagaggggctgctctggtggtcaaatggctagcacgccaatgccaatgccagaggcagggctgggactaggcttggctcccaacctgggggtgccctgtccctgcacacacagcatactggccttgccattctcccagtgacccagtacctactgcgtttagtctgagaggacagcaggaagccagtgttccagattcagctttgtttgtccttggctggtggccgcctctctggttgttcatttattcagcaatcctttattttcattttaaaaacttgattaccctttaaaatggacaaatactgtatatatttatcatgtacacgtattgttttgaaattcagcaatcctttattgggtgtctcctggctgcctggccctgtgagggaagctagggcagcagagatgaaggtaccaccctggtctccaggaattcactgtctggtgtgcgaggtgtcttgtaaacagtcattggcaatatagtacacaggtgcagtgtccaaggggagcaggctggggccctgggaacacagaggcctcagtttccccatctgtcaaatggggcactggactactttatctttggggtcccttctgttgttgacattctgtgactcttcctgataactgtgctgtcttacaagtaagaacacatctagtgtcaaccaaaattttatgatgaaagtgctcccaagtcagatacagagggaggaggctgttgcattccatacatgtaccttttcacaaacaagtcctcactttctaatgggccacctacatttgttttgcatggccaggcagtgtttttctcacaggttgcttgactaatggctgtgtgcctgtgccaaaaggctgcttatgggtcacgaggtagggagggattgagggcacgtgtcagatgtgctactgcgatcagagccaggactgggtgcgattccattagctggggcatcccgggaagctggggcatcccaggaagctgtgccatcccatgttcctaatgccttgtttggcctgtgggtgtgtccgtcctcccgagtctgggacttgtggggaccataaatgcagatgatgagggcagggtgctgtgatccctgggggcctgtgtctctgagccaacctgcagaaagaggcagggtcgagtctgagagaggggcagggctggggacagccagatccctgagggttccccctttctgggccttgtgctaggggactcattcaaagttatacagccagcaagcagcagagccggatggctccggagtcagtgttcccgcatgcagaatgtgagcttttcagcacaccagccctcagccacctgctgtgggagaaagtgtttgagatgaagtgctgaggggctgcattttcagtaggatccagcgacctttttttgtgatgtcctgtgggagtgatgtgtagcggggttggagggaatgtggcttttgggaatgagctgagctgaattgttgctttcttctcgtgtgtgtgtgtgtgtgtgtgtgtgtgtgtgtgtgtgtgtgtctgttgggggacagaggtgagctcaccagcctatgaataatgagctgtgtgaggtgacagctgctcacagaacaaagagacatggagactcaccaccttccctcctttgttaagtccttactgtgtcccagtcactgctgcagtctgtgagatgcagagataaaccaaagcctcatccttgagaagtcctcagcaggaccacatctgcagtttgcagtttgcaggcccagtgcaaaatgaaaattgggagctccttgcggcacataaatcattgaggatttcacgatggcaacagcagagtgcgaagccaattgtgagccttgtgagactgcacaaggtcacacatccatgaaaccaccctgaccccagcctcataggtgaagccaggcctagtagacatcagctagaaccatagggaggcatgcatagggagataggggagcaggtcattcctgggtagggggatctgggaaactcctcggagaggtctcatttgagctgggcctgaagggtcggttgggatgttggtagaggcagtagtgatggtggaatcagaaaactgaatgggaacacctgggaatgggctgggtgtgataagcaagtggcactatagtctggccagaagtgtgggtggtagaagggggagccctgggagggtgtggacaggttaggctgggcccatggagaccctccagtgccagcttccaggcaggttttattctgcggctggagagctggggactcctggaagctcagagatggtacagggctgggctctgggaagctccctctggaggtggcactcgctgatattccagtagctcagaataactactccagcgctaccttgagacatccaagtgtaaagcataattatttacaggcatgcgccactatgcccagctaattttgtatttttagtagagatggggtttctccatgttggtcaggctggtattgaactcccgacctcaggtgatctgcatgcctcggcctcccaaagtgttgggattacaggcgtgaaccaccgtgcccggccgtaaagtgtaattattgacctcatcctctgtgtgccattatagaggaggaatcagaggtgcagagaggtattatgtaccttgcccgtggtggtaaatggcaaacctgggaccctagagacccaaggtgaatcgtggggtggatgagatgagttgagctatgagaggtgtggccacatcgtggcagtggagaggaagtgacgagcacaagaggcttggaggtaggacaggtagaccttggctgctgatgggctcaagagcgccctccagctgaagacatcctgctgcagctcagcatccgtgttggcaggggcatccctctttgagaagctgcttgccgttctcattggtaaatcctgctagctgttgtctataggtttttggccccaatctgcctctaagtttccccttttcctcatcaccaccttttgggcatgttgtattttttttcttcttgcaactcttggttcttccctgccttccacatttgttgtggctttgtgctgagtacagtggttcaggtatggtcagagcagctggggtagatggaactgacttcagtatatctcagtggatgctcttggctttgggatcttctgcacttttgggatgctcaccatctctggctcccacctacagtgcccctccctatcattgtgtccaccgtaccatgtctccacacatttccaaatacttcctaggatggttgtcaaccactggctcaattctcagattactcctgggataggttctagcctcctccttgtaacaccttttcttttcttgccctccaatgtcagagggtgcagtgcttagcataaagatacggaggcagatgaagtagcctgtgaccctgcctaaccccttcttgggtctggaacctgcattctgtccattctcccagcctagcaggtgacctgctggagctcagtaactcgacaccgccttgctaattgtctgctgaggtcacagtgagctcttgtcaccgcccatccagcaggaccacagtccccgactgggttgactggttcagccactgttctggacactcatgggaaacaagtggcctttgtcatgagctggtggacagagtgcgctgtcagcacgggtgagggctggatacccagagtttttggggaaggctgcacccagggcagccagctcagagctgggaggcccagaacagacctcattttctctgataatggggagcacagagttgcagagacttttttttttttttttccctagtgacttgtgtcaacagacttcattggttctgcttggcagaggcctgggaggttacctgtgggcttgtgaggcctgggagtttacctgtgggcttgtgaggcctgggaggttacctgtgggcttgtgaagcctgggaggttacctgtgggcttgtgaggcctgggaggttacctgtgggcttgtgaggcctgggaggttacctgtgggcttgtgaggcctgggaggttacctgtgggcttgtgaggcctgggaggttacctgtgggcttgtgaggcctgggaggttacctgtgggcttcacagccaggtgttcatcttatccactgaaatgcaaacacctagggggaatggagacgtttggagatttgaatgtttcagtttgggcagttcttcttcagttatcttgatgggggtgtcttcgtcactacccctcaaacacacacacaacccacatataaaagaccacacatcttaaaagagcttggaaaatattagttgacttggtttaatgcataaagcttgagaggaacatgtacatattaacggggtttgggatggtccttaatgggtgtcctttcccgaggattccatttgcttggcacacggtgttggtgcgcaggtggatttgggcgcattcctatctgtcttttgagactatcttaagaggctccagtgaatggacttataatgaaaaagcgagtggccctttaaaatgattccagaagagtcagtaccattgcctaaaactatgtcgcaaagctccgcctgatgaatattaacaca

SEQ ID NO: 1591 - DNA, 6000 bp, Homo sapiens
acaaaagaaccaaaagaaaaaccacaacagctggagcttttacttatgtcccttgccctgctgaccctccagggcagaggggatgaagaaaaggtggctggtacccgaaggaagtggagagagaacaaaaggccaggcaacctctgctgaataataaataacccacacctgacaatcagcacccatctgcattagtcccactagaaaagcctggcagggttattcccttggggaaaaaaaacaaacttccagctctaatttctgacagtgtacaatgcctaaattcaaacctcccactcagcctagccattaaggtcctccagattacctctgcatccccaattcccttccacccagagccaaggccaaacccctgctctgctcaggctgggtaaacacatggctcctctctatggctcagcctgtgcggtccagcctacgcagcccacacgtcctccctccatggctccatgcattcagagcttcacttcaacaccaagtcccagcacattcgtgaagctctcctcggcttctccagcggacgctgctggctccattctcttaagtttgatgaagcaagccagccagttcactaggaaagtaaagaggaggcacaggaggtgtggggagtgggaacgagaaggaaacatcaggcaatgagcacgcgagaggtccagccaagttctgccatttctgcctcccaatagaggcctggtgggaatgacttgaggagtcccacatttagatggtaatgagagccactaaaggtgaatgagagtatctggggaaagtgtgtagcataccgagttttttataaaagaaaaagcctgtttgtgcatctctatcagttgacctgtctcataatgtcactctcatgagcgtcccattcccccaacaaggcggcaagctacggactagaattacatcctgtgcaccccggcccctgtctacaccccagccccacctgggccaggcacttcaatgctcccggtgacagaggcaggcagtgcagcaccattagccccatcttacagatgaagatactgaggctcaccccaggggcagggagttgagaatcctcaagggaaaaaactcaggtgtttccccaaatcaaagggaaaaaacaaaggactgcatggggctccaagtgaccaagctagacttggttactgggaaaaacaagagacccaactgagccactcagaagtaaacaattctgtcttctccctaccaccagctggggcaaaggtgttcgcttgttccccgcagatccatgtatcaaatccgggacaaaagaaagctacataatttcagagtcccacagtgactggaaatgtcctgaaattgtagtgggaaggcctaaccagggaacaggaaaaaccaccccagacaaggaatcaggggcactgggcttggccttgactcaggcacctttctgccctgcgacttcttccttacagacagggccctggaaccaaagatcataagacaccactcatctccctggggctgccacagagttaatgagatatgaagataggacacaaaatcctgaatgacaatgccctatcaataccggaataagagccacacctccaacaaaaaaaccacaacacagtgtgtctcctagtcactccacacccccaggcctgagcgtggtaggtttaaatgtctggggatctaactcagcaagagttgccccgatgggttgggtttgctcacctgcccaccaacacccaggcacatgtcctccccagtttccttccagttccaggccccacgtggtaggctgctgccgatgcagactccctcagcacccaagtgccagtgggggatgggcattctggatcaggagcccacacagggtgtggaatccatcaaggaagctcctaggtgggtgatggcatcatctccaacagagaatcggtgccaaagcagccaccccttgacgctaaggatcccagggagccagctggttcctctctcaggctccgcaatggcctcgaactgaggccaattcaaacccagagctgctgcccagagcacagagtggaaatcactcaggagtggaaggaggcaggaccaagtgctgggttttcctgactatggctcctcaaggaagaagacttccattccttcagccagagccgctctcttatgcactgagctttgaccataaggaatacttcctggctaaaagaaaaaaaagcaaaaaagtggagacctacaacacagcaatttacccttcacaaaggagcctcccctgcgccggggcagtggctcacgcctgtaatcccaacacttttgggaggctgaggcaagcagatcgcttgagctcaggagttcgagaccatcctagacaacatggagaaatgccatctctacacaatatacaaaaattagctggtgtggtggcatgtgcctgtggtcccagctacttgcggggctgaggcaggaggatggcttgagaccaggaggcggaggctgcagtgagccgagattgtgccactgcactccagcctgggtgacacagtgagaccctgtctcaaaaaaacaaaagcccccaacacgccactgtttgctgacacaccatgtcaccctcttccccaggggcttcaggtggcatcttgccataccaaatgctgtcctaacttttttctttctttttttttgagaaggagtcttgctctgtcacctaggctggaatccaagggcaccatgtcaactcactgtaacctccacttcccagattcaagtgattctcctgcctcagcctcccaagtagctgggactacaggcgcccacaaccacgcccagttaatttttgtatttttattagagacggggtttcaccatgttggccaggctggtctcgaactcctggccttaagagatctgcccgcctcggcctcccaaagtgctgggattacaggcatgagccaccacacccaaccagcgtttttctaatgcattaagtaaaatgaacttaacttctccttgaaaagtatttttctaaggatttcatgaccctctccaaagtcacataactctgcattgtggtaaaactggggtctgaaatcaatgccctaggggataaaatccaaaccctaatctctgccttccttagaggtcaagactagctcctagaacttcagccccatgaggccccacattctccaccagacacggaaagggtgagacctaattaatggcaattgatccatcaatcaattttcagagattaaggcgagcgttgattcacatgcttcccaacgcagacttccagtctgtactaagttctgtgctttacgaaagactttcagaaacagatcttaacttcttcattcagagatagattagatagatacatagatacaattaaaaagaaaaaaattactttgttgagatcccctctgtccttatcctcatggccacatctgacagtcccttcctagcatctcccaaagcactatcccaggaaaggactaggtttgcccagtaactctgacatgaccacaactggggggaaagaatgcaggtttgagggacagagatgcaagtcagaagctcaaagtggagacgggagggccaccaatgaaatgacctgctgtgtggccagcaatttagtctctctgtcagtttcctgcagctacaaaaattgaggttaagatggccaacgtaagagagctgttaccaggaatgccttataaaatcattcccttaataagtggggcttttaacagccaaataaatgggtcccatcagcctttgaccttcaggttgctaagggcagtttctcagccctctcggttcacttgtttttcttttatacatatatccttatttatttttactgtacctatcgattcactgttaaaacagggacaagacctagaaagatggcactttgtttcctggctctgaacaagttaaatcaaacaataggttataattcaaaattcctggtgcccaatactttctgagcattttaaccactccaagccagagttttctctctggcaaagaataacagaaagctcacatagtggcaacgacaactgaacgtgataaagcagagcgcctgccacaacagtagatgcccaataaatgctagttctcctcctccctcagtgccatgtcttcttcctccagctgccttgtctaaaaaggctggcttccacactccacggccaggccaggacaagcctaccacttgtcagaaactcccgccagtatccgttcctgcacccagacacacacttacaaatcagtcatccccaagaccaaagacacaggggttccaaaaggcaccctcaagggaaccagtcaccagccttcctcgttaagcagctctgtgctctcagggagagaacttagccccagcagccactactaggattttcccatggtgcaatgcaacttccccaacttttccgggcccagtttccaaagaaacccaggcaggcgttgtgcacaatcagccaccagtctgggagagactgggctctgagcagagaaaaaggagctgggacagccagaaaatgaaaaagcagttgtggccccggcacaggatggcagcgaccaaaacttaagagtaggggtcctggcccaagtcccattcttctggacggtacccttggttaaaggctagcacagggtgccaaagctagcggacggtgaggagcctcagaaaagggactgatggacatcctccgaggtaccccctacccgctactggacctggtggcccccggggaccctgtcgtcgaggcacctgagagtgaaggccttcagcggggggcattgttcacagcgaacggcgggactgggggaggcggcgggacttcgggatccgcgcaccgccgcctccccaactgggccagaggagcgagtccaccgaggccatcgccaggtggagcggcggccccggcgaggtaccctcggccagcaggagggagaagcggagggcgcgtcccagaggcgggggccaagggtctgccactcacccgcgccttcggcgggctgcggcggcccgacgacgccgttcaggtagagaatgggcagcaggtgaggctgcgtcttctccagcgccgcccgcaggtcctggaagtggtcccgctccttggccaagagcagcttgagcagcagctccgccttggcgcctcccgcctcctcgtccagctgccgccgctcgccgggactgagcgctcccgcggcctcgagcagcccgagcacggcttccacctccgtcatggcctgggccaggctctgctgacactgggcgagcagctcccggcgctggggctccatggtggcgggccgcgccgccccgccccgccggacgcctcccgggccccccgaggccggcgggcgggcaggcgagcacctcggcagcagccctagggcgccgggagccgtgaggcggcgggagccatgggccggggcctgggcgggctgggggcccggggcggcgggcggcgctcagcagcggccgcctcccgggctccggagcgcagccatgttggctgccgcggcggcgggactggaagaggaggaggaggagacggaggaggagaaggaggaggcggaggtggggacggcggccggggcgcgccccgaggccgggctccagccgggcatgctccccctccccctcagcctccgcgcgcgccgcccgccccgcgagaaaactcgccccgaaagccgggccgcgcgccgcccccagagcaagactacaactcccgggagaaagtcgcctgggccgtgtttcccaggctcccgacagctccggcccggctcggaggccgcctcggcccccgtgcaccccggcccggctcaccggggccccgcggccgccacccgctcccccgtggccacagccccgccgccgccggcccgtccctcctctctcccctccccaggccgtccctccgggaggcggcagcaggggaggaggggacgggcggaggggaggggtccccggcccgcccgctaggcggg

SEQ ID NO: 1592 - DNA, 6000 bp, Homo sapiens
aaggcctggaggtggcatcaggatgggagacaacagttttctatggggagttgtgctcagaagcctgattataggtggggcatggtggctaatgtctgtaatcccagcacgttgggaggccaaggcaggaggatagcttgaggccaggagtttgaacctagcctcggcaacataacgagactctgtctctacaaaaataaaaaaaaaaatacctaggtgtgatgatggtgtctgcagtctcagctacttgggaggctgaggtgggaggatcacttgaggagttagaggctgtagtgaggtatgatggtgccactgcactccagcctgggagacagagtaagaatctatctctaaaaataaataaatagggcggggcacagtggctcacgcctataatccagcactttgggaggcccaagaggtggatctcttgaggctaggtgttcaagaccagcttggccaacatggtgaaaccacatctctactaaaaatacaaaaattaaggccaggtgtggtggctcacacctgtaatcccagcactttgggaggccgaggagggcagatcacctgaggttgggagttcgagaccagcctgaccaacatggagaaaccccgtctctactaaaaatacaaaattagccaggtgtggtggcacatgcctgtaatcccagctactcaggaggctgaagcaggagaatcgcttgaatctggaaggtggaggttgcggtgagctgagatcatgccattgcactccagcctgggcaacaagagtgaaattccgtctcaaaaaaaaaaaaaaaaaaaaaaattagccaggtgtggtcatacgcacctgtaatcccagctactcaggaggctgaggcaggagaatcacttgagcctaggaggcagaggttgcagtgagcccactgcattccagcctgggtgacagagcaagactcttgtctccaataaatgaataaaataaataaataggctgggcttggtggctcatgcctgtaatcccagcactttgggaggccgaggcgggtggatcacctgaggtcaggagttcgagaccagcctggccaacatggagaaacccccgtctctactaaaaatacaaaaattagccgggcttggtggtgtgcacctgtagtcctagctactcgggaggctgaggcaggagaatcgcttgaacccgggaggtggaggttgcagtgagccaaaatcacgccactgcactccagcctgggtgacagagtgcgactctgtctccagaaaaacaaataaaataaatttaaaaaaagcaaacacaagaattaaaaaaaaaagaagctgattgtaaagcaccaaccaagcggtgagcagtctatgagatgtggaggtcccaatgtcaagcaatgattgtttccgaaggaaacatgagaggaaagggaggacccttgagaatggggagactcaagcctgtttttgacaaatgagaaggagcccaaaccaaagcagaagcagactgtgtgtgagtgcgtgtgtgcaggggaggagagggatacacagattatatccagagcatggaagggctctccttaaagacaaggagctctctttttctaagaccagaagaaagtaggaaaggtgggtaaatctacagagatgtccttaggcagtagaagagtgaagtgatagggtgatttgtaaaatagggacccccgtctttgtccttctcacctccccactgtgctgaggtgagtttgagtttcttaggactgccataaccaatgaccacaaactgggtggcttaaaacaagaaccactgactccactgcagttgttttattggctcacacttctcaaggtcagaagtctgaaatccaggtgttggagggttggtttcttctggatactctcagggagaatctgtgctggcgtctcccctagcttccggtggtggctggccattcttcacattccttggcttgcagccgcatcacttctgtctctgatccatcttcacatggcattttctctgtgtctctgcatccaaatttccctattctaataagaacaacagttattggatgaggacccgccctaatccagtatgacctcatttgaactagattacatctgcaaagaccctatttctaaataagtcacattcacaggtactgggaattaggactagaacatatcttttgggggaacacaattcgacccactacaagggtgtgccgcagaaggtataaaatgctgcagaagtacaaggtcacaccaaggtcactggctaaaggaatcctaaaattggtccgggtggtaactaacatctgtaattccagaactttgggagaccgaggcgggaggataacttgagcccaggagttcaagaccagcctgggcaatgtggcaagaccctgtgtctacaaaatatttaaaaaattagccaggtgtggtggcaagcacctatgatcccagctactcctcgggaggctgaggcaggatagttgcttgagcccaagaaattgaggctgcagtgaactgtgtttgccccactgcaatccagcctgggcgacagagtgagactctgtctcaaaaaataagtttttttttcttttttttgagacagagtcttgctcggtcacccagcctggagtgcagtggtgcaatttcagctcactgcaacctccacctcctgggttcaagcaattctcatgcctcagcctcctgaacagctgggattacaggcttgcaccatcatgcctggctaaatttttgtatttttgttagagacggggttttaccacgttggccaggctggtctccaactcctgagctcaggcaatccgcctacctcagcctcccaaagtgctgggattacaggcgtgagccactttgcctggccaaaaaatatgcttctaaccataagccagattcgtctccaacttttcctcttttccccttcctccactttcaccttccttcctccaactagctttctagttaatccagctaagaacacaggtgccggatgaaaggtgcctgaaaggtgactgccttgcagatgatttaagctctggggttgccctaagggaagtggcggccagaaagaactatatctcaggagcaggactgggagggaagagccagggagcctgtctggaaccctgatactgtgcaatggccagccttccactcctctaaaaccttgcttagccatagagggtcagactacgggagcaggcaggtatctttaaatagttcatttctgccatattggggtccatctggaggtcttaaagaacttgtaactctatggaccccattccagaaaaatatataaatgttcacaaaaaagttgagatcatgtcaaaagcttcattgacatccttgagcttattcatgaagccaaggctaagaacccctgatctaatattctccctccaccatttttcctaaggacaaaacagatcagcaaggattattggtttgttccaccttgtgcagctgcttagaggggagtccaagtccaaagtgcaaattctgatactcttgttctttctaccatatagtgagttcgtttccataaataaaaacgacttctccccttgaagaagcagactaagaagacactgctttttgagggaagggaggaggcatgtggctgggactggcagtgtgggtagacaaagtgcctctcacccccagcgagatccactcattccaacgtagatatttgaaatggacctgggttcccactctacagaggagcactgcgggatcactgagcgcagtcagagttccagctttgaaggaccttgtcctgcagtcagggaggtaagcagtatgtgtccacaaacggctgtcgtggaagagaagacattcttgggctttaagggggactgcagatcctttccaagtcatcaaaggaagcaaggtagtccgctgatttgtctccctctgagacatttagggggagagcgcctcacttgccagaaagaccaaggactgcaccgcagacacccacctttcttttcctcatccggcgacacatccttcctcctgccaacatcctaactcctttacactctggggaccagctcttctcaaatgctggcgcggggaacagcctatttaccgcagttgaggcgattttactgggaaattctcttaggagctccttggagagggaaagcctcacggattcggcggaggtcttaatctggagatgtccaaatttaggggaaaccctccccaccatttgtctccaggctgtattttggagttctcagattaggaccctctggactgggggcaagatttgtatgagggggtctccagcagcttgtgggctggccgcgtgccaggcctgactccgtgtcccccacccccggctgcgcctgggcctcgggggaccgggaaccagccggcgccgcgtccccgcctagcgggcgggccggggacccctcccctccgcccgtcccctcctcccctgctgccgcctcccggagggacggcctggggaggggagagaggagggacgggccggcggcggcggggctgtggccacgggggagcgggtggcggccgcggggccccggtgagccgggccggggtgcacgggggccgaggcggcctccgagccgggccggagctgtcgggagcctgggaaacacggcccaggcgactttctcccgggagttgtagtcttgctctgggggcggcgcgcggcccggctttcggggcgagttttctcgcggggcgggcggcgcgcgcggaggctgagggggagggggagcatgcccggctggagcccggcctcggggcgcgccccggccgccgtccccacctccgcctcctccttctcctcctccgtctcctcctcctcctcttccagtcccgccgccgcggcagccaacatggctgcgctccggagcccgggaggcggccgctgctgagcgccgcccgccgccccgggcccccagcccgcccaggccccggcccatggctcccgccgcctcacggctcccggcgccctagggctgctgccgaggtgctcgcctgcccgcccgccggcctcggggggcccgggaggcgtccggcggggcggggcggcgcggcccgccaccatggagccccagcgccgggagctgctcgcccagtgtcagcagagcctggcccaggccatgacggaggtggaagccgtgctcgggctgctcgaggccgcgggagcgctcagtcccggcgagcggcggcagctggacgaggaggcgggaggcgccaaggcggagctgctgctcaagctgctcttggccaaggagcgggaccacttccaggacctgcgggcggcgctggagaagacgcagcctcacctgctgcccattctctacctgaacggcgtcgtcgggccgccgcagcccgccgaaggcgcgggtgagtggcagacccttggcccccgcctctgggacgcgccctccgcttctccctcctgctggccgagggtacctcgccggggccgccgctccacctggcgatggcctcggtggactcgctcctctggcccagttggggaggcggcggtgcgcggatcccgaagtcccgccgcctcccccagtcccgccgttcgctgtgaacaatgccccccgctgaaggccttcactctcaggtgcctcgacgacagggtccccgggggccaccaggtccagtagcgggtagggggtacctcggaggatgtccatcagtcccttttctgaggctcctcaccgtccgctagctttggcaccctgtgctagcctttaaccaagggtaccgtccagaagaatgggacttgggccaggacccctactcttaagttttggtcgctgccatcctgtgccggggccacaactgctttttcattttctggctgtcccagctcctttttctctgctcagagcccagtctctcccagactggtggctgattgtgcacaacgcctgcctgggtttctttggaaactgggcccggaaaagttggggaagttgcatt

SEQ ID NO: 1593 - DNA, 6000 bp, Homo sapiens
ccaatattttctggtatatgggaattacctttttctattattggaaggtctaaaaagcaaacaatgtgctccatatggctagagttagtattaaggggaccaagtagaataattggtagctagtgttagcctggagactaacatagtcaaagctgtcttgtcatgttatgtcttttttatttgtattgctccacggtccaagacaaaatttctgaacgccacttggacacagtgagtacctggtctgctctattgttctcaggagcaaccaactcaacccttatttctctgagaatgatgatttcatacagcacatctctctaccaagatgtgaaagatgacaccatggcatctgaaatagcttcaggagagatttgggacatgggaagcttgtagacaataatggaaaattctcttttagaatatagttacttgtatgacccacagtagcgccttttggagaatgtcttaaaattatctttattgaaagaacaataatgtttgttattaggataaatgaaataaggggaaaacctcagacccttggaacaatgggtttacattcaatccaatgattattatgtttttatattctgtattatttagaaaacagtagttaaacagacagaaatacagaagattgtttaaaaattaaagctattgagttagatccctttttgaaaggtcagcgtatgggagatgagaaaggcactatagagatcagagtgtttacacaaaagacatcttagcagatgacctacaaagagcacatcaagtatttatatcatccacatcaagttgctggtcatttcgcttatcaaagaaaataagaaagaaattttctttcgacattattttggtgtagtaacaatagagttttggaatcagctgttagaagcgataattaaagctagtttaccatgcttactaatcaatctacatagtcaccctgaagctttatataattgtccctttgttacaagcttctacttctccctatggtattctggttctgaatccagacaggtaaagaactaagtatggccgggcgcggtggctcacgcctgtaatcccagcactttgggaggccgtggcgggcagatcacgaggtcaggagatcgagaccatcctgaccaacatggtgaaaccctgtctttactaaactacaaaaaattagcccggcatgatggtgtgcgcctgtagtcccagctactcgggaggctgaggcaggggaattgcttgaacctgggaggcagaggttgcagtgaaccgagatcatgccactgcactccagcctgtgagactccgtctcaaaaaaaaaaaaaaaaaaagaaaaaaaaaaaaagaactgaagtgcttggagaccagtgtattgtaatatctatacagccaagcaggtattttcaactgaactttaaaaaagtactatttttgaaactttctttagtttagatagggccagccatttgggtagaaaggaaaagaaaaacaaaaaattggaaaaggatgcatcagtatttctttcagaaacaacttaacactaggaacagaaggaggattttattcaccaactcctaataaccacctgatgttgctgttgggctggccaaatatctgccaacattgatgatcctttcattcaccactagagagaagtagagggacctgatgtttagagaagcagtaaaacccatttcccattttctttcttcagccggatggaagtacttggaggctggtctcatattctagcactttagtgctggtgatgcagattatctctgctccagagtaactctgtgccatggaatccaagaggattctgtcgcaccaggacaggaatgcacccttgtttcatttgcttccatgaaagcagatttcagagattctcagatgctatgagactaattgtcacttagggtaggctccaggggagggacagagaagggcagtgctaataacagggactctggagacaagatcagcaatctaagaaacaaatgtgagacattttacccctccctaatctactccccttttaaaagttcatcttcattttccctttttctaccacgcagtaattgataattaaacacagctctggtttttaccatgcaatctagtagaacacctagacatcaggaactccttatctttggttatttatacaataatgaaatctgtagttcacgctaggctgtgtggacagtatctgcatctctggaaatcaactggaggcctttctcttactcttttccggttgctttccatttccttttccactgtggtccttgcctttcccaagctgaccagaactatgcacaaaaccagtcttcaataaatatcaacactgaagcttcagcaggttgttaactcctgcacagctatcttaaatgctgtatataagtgcaaagttttatggagcctcagaggtctctaagaacactgtaaatatcccaggtttaattagtagtcccggagttaggtaatggcctgtggctttctgcgctaggtctcttgaggtttctagtcttcagaggttgcctgcaactatgatgtgcacatatacagtactctttctcaaatacagcataaaccctctttagactttgctaggcacttacaattattgaacacacatgcagattgattctcattctctcaaagtttgaaaaacaactcagtgcttcaacctaggtctcgttagatattttttgactcaaattgtcgtctgtagttctacttcctaagggaaatgaaaaaacaataaattcccagactggtgttgatgctcattctctttaagcgggtcgactacttgctttgtagatccttgacgggtggggtgcggggtaggagtgcgatccaactctcagcatttccgaatcagctctctcacggtgacaggtcagcccaatcggggctgtaaacagacttgacaggtttgttctgggctgacggccattgactaggttctcagaccagataagtcacttggctgagtccacagtaggtggggcgcgctcaccagctcaggggtagtgactggacgtttgttgcaacatcggagaatgcacgctctgggctgcagcaggagataccctcaagcacagaaccaaaagggttcaccctaagcggcagggcatcagcgatggagaggcccgagagccctagcgcccagctccttttcccacgtttgggaaggcgcagaataggtcgatgtagagcaaggagtgagtctcaggtctcagtcctttggcttgctcttagggtagcaggcgaggagtggcaccagtttggggactctctccccgcgttctgtaagaatcggcggcagccagcaggcggggaggcgggggcacgtgtttggatgtgggtgcttgtgtaaccagttccccaagcgccagccccgacagcgctccttcgggaggctggtccgagcccctgtttccgccgcggcgcaggaagggttggggttccgctgcctgcaccaggcaagagcaccccgagcaaaggaagaagacgacttgcctccggagctatcactggggagtgggaatttggaaagttccccaactagggacacacgtgacctccttcggaaagtagttccgactgtggcccgtgtatccttccacctccttttgaaccctcctaggtctcctcgccccgcccactcgctgggctgcagcttcctaccgttccgtactttccactcaacccggtaaccccaaacgtgcacggtccggccggggcgcgcggagcctggccccgggcgatccatcctgccgggttttcacggcggccaagggggggcggggctaggtggtctctgagaaccgagcttgactccgacgccgcgaaccgacctggagcccgaggggaaagatgctcgactctcttgggggcaccggagcgggcgcaggagaggcctgcggggtgcgtcccactcacagggatcctctttcagttcatttagataggtgccctttgggcccttgaaattcaacggctatgtgttcacgttcagcacgctcggctgagagctttcatttttagggcaaacgagccgagttaccggggaagcgagaggtggggcgctgcaagggagccggatgaggtgatacacgctggcgacacaatagcaggttgctctttgtgctaagactgacaccatgaggacacagatttgggggaagggggaatctctaggcaaaggctgttacagtcaaatctctgcgaacgattgtgatccgacagcggtgcaaaaggaaagagcgaatgcagtccacgccgcggaaatctaggggtagaggcaaggggggagggtattccccttgcagggaccgtccctgcatttccctctacactgagcagcgtggtcacctggtccttttcacctgtgcacaggtaacctcagactcgagtcagtgacactgctcaacgcacccatctcagctttcatcatcagtcctccacccccgccccacaacagcctaccctgcctccggctgggtttctgggcagaggccgaggcttagctcgttatcctcgcctcgcgttgctgcaaaagccgcagcaagtgcagctgcaggctggcggctgggaaccggcccgagcaagccccaggcagctacactgggcatgctcagtagagcctgcggcttggggactctgcgctcgcacccagagctaccgctctgccccctcctaccgccccctgccctgccctgccctcccctcgcccggcgcggtcccgtccgcctctcgctcgcctcccgcctcccctcggtcttccgaggcgcccgggctcccggcgcggcggcggagggggcgggcaggccggcgggcggtgatgtggcgggactctttatgcgctgcggcaggatacgcgctcggcgctgggacgcgactgcgctcagttctctcctctcggaagctgcagccatgatggaagtttgagagttgagccgctgtgaggcgaggccgggctcaggcgagggagatgagagacggcggcggccgcggcccggagcccctctcagcgcctgtgagcagccgcgggggcagcgccctcggggagccggccggcctgcggcggcggcagcggcggcgtttctcgcctcctcttcgtcttttctaaccgtgcagcctcttcctcggcttctcctgaaagggaaggtggaagccgtgggctcgggcgggagccggctgaggcgcggcggcggcggcggcacctcccgctcctggagcgggggggagaagcggcggcggcggcggccgcggcggctgcagctccagggagggggtctgagtcgcctgtcaccatttccagggctgggaacgccggagagttggtctctccccttctactgcctccaacacggcggcggcggcggctggcacatccagggacccgggccggttttaaacctcccgtgcgccgccgccgcaccccccgtggcccgggctccggaggccgccggcggaggcagccgttcggaggattattcgtcttctccccattccgctgccgccgctgccaggcctctggctgctgaggagaagcaggcccagtcgctgcaaccatccagcagccgccgcagcagccattacccggctgcggtccagagccaagcggcggcagagcgaggggcatcagctaccgccaagtccagagccatttccatcctgcagaagaagccccgccaccagcagcttctgccatctctctcctcctttttcttcagccacaggctcccagacatgacagccatcatcaaagagatcgttagcagaaacaaaaggagatatcaagaggatggattcgacttagacttgacctgtatccatttctgcggctgctcctctttacctttctgtcactctcttagaacgtgggagtagacggatgcgaaaatgtccgtagtttgggtgactataacatttaaccctggtcaggttgctaggtcatatattttgtgtttcctttctgtgtat

SEQ ID NO: 1594 - DNA, 6000 bp, Homo sapiens
aatgaaacaacctaatttaaatgggaaaaagatctgaagagacactttacaaagaaagtagaaaaatggccaagaatacttgaaagagtgctcattagaaagggcaaactaaaaccacaacaggataccattacacatccactagaaataaaaagttccattatcaagtgttagcaaagaggtagaagcactggaacctacatacattgccactgctgggatagccactttgaaaaacagtttagtagttacttataaagttaaacttatacagtttgtattcctaggtatttaccaaagaaaaatgaaaacacaagttcacaaaaaggcttgcacatgaatgttcaaagcagcattatttataatgacctcaaactgtaaactacctaaatgtccatcaaacgacaaatggaaatgtggcatatctgcacaacagacaactatttagcaataaaaagggaaaaactactgatgtatgacacacgacaaatctcaaaaacatcatgccaatccaggagtcaataaattttctctgtaaagagctagacagctaatattttaggttctagagaccctatagtctcctcacaactactcaactctgccattatagtgccacaacggatgtagtaaataaataaaccaataagcacgattgtgatgcaataaaactttatggacagtgatgtttgaaattcatataatttttatgttatgtgacattattcctattttgatttttcttccactatttaaaaatataaaaacaattcttagcttgtatctaagtacaaaaacaggtaatacaaaaacaggccattgtttgccaacccttgcattagaaggaggcatgataatcaacacaatacttttcttgtacttacctcagtatttggagcaactaaggaaaattcatgagacagatcaagcttaatgccatcgaaatttatttctgaaggccttgcaattgggtcagcactaaaaacataagatggtcgaggtactccctcttgattaaaattagattccattctgcaagaataacagcaacttctttaacaaccttaataagtcagcatgtaagccacccacactttcaaaagtctagcccactacttccctccaaataactagattttagaaaagaaacgcattacattgcttcatttataacacaatgccctacaggaaagactaaagatcaaattatatttacagactctgattctaataatactgaacacagcctactattttcatataatatccattcaaagaggtttcgtgagtacaggtaatctgtaaagatggtataaaatatttactctctccgtgaaatcctctcaaaactcaaatagtaaggagatcacagggtaaattataaccttgtgtcatctacttagtgactcctgtagaatgttacttacagactttgttttagcatttaaaagttaaaactcagttatctgggtctggtgcggtggctcacgcctgtaatcccagcactttgggaggccaaggcgggtcgatcacgaggccaggagttcaagaccagcctggccaagatggtgaaaccccgtctctactaaaaatacaaaaaaaattagccaggcgtggtgccaggcacctgtaatcccagctactcgggaggctgaagcagaaaattgcttgaacccgggaggcagaggttgcagtgaatcgcgatcgcgccactgcactcaagcctgggtgacagagtgagattccgtcaaaaaaaaaaaacaaaacaaaactcagttatctgaaaaattgttttcaatttcaaattcaagtaaaaagtaaaataatatatgtaaacacattcaaaacagtacctgacacatcacaggttttaagttaaataggaataatgcatcagtaaactattaccattgaattaaacatcaaatcactaaactaaaaggtaaacttaaggataaccttaactaaaaaatactaacattctaatatttactgagaatctactagatgtacaataccagagagaggaggaggactctgtgctgttttttgacaagattaaaaaatatacagatcagtgactcccaaactaaggttcctagctcaagaaagtagtaacgaccatcacccacaggtattatataaaatgaaccaaagatggcccttgcataatagctctacagtgtaaacttcttcacagctggtagggatcttagctcaaaagcccactggatcaaggaccatgaatgtttaaaataaaaattaaaaagcctacggccgggcgcagtggctcacacctgtaatcccagcactttgggaggccgaggtgggtggatcacgaggtcaggagatcgagaccctcctggccaacatggtgaaaccccgactctactaaaaatacaaaaattagccgggtgtggtggcatgcgcctgtagtcccagctactaaggaggctgaggtaggagaatcgcttgaacccaggaggcagaggctgcagtgagccgagactgcgccactgcgctccagcctgaacacagagcaagactgcgtcaaaaaaaaaaaaaaaaaagggaaaagcctgctggggcgccaaagtcaaattctgaagcatccatttactttcaaaatggcccaaaataagcatatttttagccatttagagcctgccaggtttgaatgccccatgaaactgcacccaacatttgccagacacataaaacccgggattatcaagacccccaagccactgctgcccttgagagtttctatgatccggagactctccactgtgcaacatcatttaggcatgtaagcccctctatgattctttcctccccgactccccattccccttgccctctttcccctctagatggtggcccctcaccctggtctagaaaaggtcccaaactgagacggatttcctttgcctacaatcctgtcaaaatccttgtttattcctgccatcttgttgtcaatctttttccttgatcaggctgaaattcctaaacgtatcacaagaacatagttgacttttttcccctaaattgcaaaaagactaaggaaagcactgatctagatcatgggtaagggggtgcagaggggggagcatctgcaaaacgttaaagtaccggcctgacatttcataacacagagttcatggaaatgcccagaaaactaaaaaacacctgtggcttcaaataataatttttggtttaaagaaaagtgttgataaatcttttaaattgctgaattaaaaagaatattcctatgtactaaaagcagttataataaagtatttgttcatatgctcatttttcaatgaacaaactacttcctagcatttctaaaagtgttcagacttactgtaacttcttgcgattttagatgacttctacttatacgtggccttcccaactaaactggaaacttcttgatggcaagaaccttgccttataccactctgtatcccctataacaaattcagcgacttatgcagggataaagactacctaatgacttaaaataatggttataaagaaaatactattccaaaaaaaaaaaaaaaagtcggtcctagtctgtaatattatctttcgtgacagcaggctccaagacctcatttttcatttcaaaaggctgctctgactggaaaactgcatatttaccctctctccaataagaatccacaattggagactttggtgaaaaatagcagaatctgttgctgaatgaggtttctgaatgtggtctacaacacaaagcctcaaaaaaagtcttcacaactaatcgatgagtattttatgttatttttacaatttaaaatctggagtcttggacatgtaagataaatacactgttacactacctaacccataaggcgtgaacttctgtaaactagtagtttagcaagaaatataagagaactgtgccagacatgcatcactgaaccagcgagcgaatcgagatggagaaagccttctaaactggggaatgacagcagtcactgtgccacaaactcttcagcctggcactgcaaaaccctagaagggcaagccccaaggaccagtaggagtagtctggaaataagtgcacagaggctaccacagggctccccccgcaaaaaggccgtgttacctaccagccgagcaaactgctcacctcagagcttcagaaaactaggtgtggcaaaacaggcctgttcctcaacaacaacagaagcaacaacaataataatattaataactgcaaacatttagtacctactgtgtgccagcactaataactttacacattaccatttaatcttcacaaaagccgaaagaaatagacacttcattgcagccttttaactgataagaaaactaaggtacagagagagattaaatgaattgtcttgcgtcactcagctaattagcagtggaggcgagatttaaaccgtaaccgaattagtatgactcattcctcgctgcgtaccccgtgttcgcatcgctccgcaacccagttcctgacagtaacctccactggggtatgagccctgtcggaacatgtccacattgccaaagccgtttccccaccttaggccccatacatgcgcagtcacccacctccttccccacacattcccgcgggtcacctcctcacctgcaaacttcgcctgactagccagacccgcgagcagcactgcgatgttaccgttttcaaattcaaacaatggcggccagggcaccgcactgaacgctgggagtaggtggggcgtccagagctccgccagggagcgtagccggctcgcgctgcgggctttccagtggctaccggaagaagctctccaatatgggggcgggtcttgaaacgcgggcagccaatgggcggaagcaggcgtgggccgccctggtgctgacggtctggtttgcctcccagctctgctagccgggctttagtagtgcgctttctcgcggctgtcataagtaccacgctgttgactgggacaccgatctccaattctgtccttgaggcaataaagatgtggcgaaggcccgaggtgaggccactgccactgcacttagtcctgcgactcccctaaggacgggccgaggaatggcgggctagccacttcccagtcctgtccctacggggcagaaaaaggctcggcatcccgggatccggagggtcacttccctcgctgcatccccattgtgcaactgccagtctaaaaattgatataggtaagcttatgaatgctaaaactaatgaatgcaagatgctaaaacaaacaattaactgaaaggttgtagggaagaggatgttagtatctcaaagaatcaccctacagatcatttcttattataaagggaaaatagaattttacactgaagagatttattagacataccttaaccaagtgaagatacttagcatcgctaatatcacccgatagtatttgtgctagaaatgtttgacattaatcatgaggaaacaatcagaaaaaaacaatgtagaatattctacaagacaacaggcctaggctcttcaaaaatgtcagtgtcatgacaggaaaaagaaaaaaacgaagtggaaaattactttagtcgagagtcaaaagaaaccaaatgaaatttgtgaatcttggctggttcatagtttttaaaaaaaaaaaaaaacttcgaaagacatttgtggacaactggggaaatttaaatatgaactacatattagatgatattgaatcagttttaaattgattgcatgtgagaattaatttgtgattaagtggaagaatgcctttgtttttggaaggcgcttgctaaagtaattagcagcaaagtgtcacagtgtttgcggcttaccttcaaaagatatggcaaaaaaatagagaaagcaaatgtggcaaaatattagtaattggtgaatctagttgaagggtataatggtgtacatcgtaccagtcttgcaactttctaaaataacagattttataaaataaaaagaggaggggggaa

SEQ ID NO: 1595 - DNA, 6000 bp, Homo sapiens
cacactgtacagctgggtaaaatattttcctcccttatatccttattctatgaacttttttttatttaaaaaaatttttttttttttttaaacttttttgttaaaaactaagatgtacacacattggcctaggcctacacagggttaggatcatcaatatcaccatcttccacattcacattttgttctactggaatgttttcaggggtaataacacacttgaaactatcttcttctatgataacaatgccttcttctggaataactcctaaaggacctgtttaaggctgttttacagctaaccttttttttttttttccaactgcctttttcctgaggctaaagctagtcaagttgactctgaagaaaaatcaccacgacagcttacatttggaaaaactttgtacatgcaaactacaaacaagaaaaatatgtcagattccttcactaaggaggtaatgggatctcatagcctaatacacagtaaatgattaacaaagaaatgcttttttttctgacacattaaattttcttgttttttgttttttttttgagacaggctctggctatgttgcccagggtggagtgcaatggcatgatcttggctcactgcaaccttcgcctcccaggctcaaaccatcctcccacctcaccctcccaaggagctgggactacaggtgcacaccactacacctggctaacttttgtatttttggtagagacgtggcttcaccatgttttccaggctggtcttgaactcctgggctcaagcaatcgtaccacctcagcctcccaaaacaccgggattacaggcatgagccaccaagcccagctaggacacattaaattttaaaaaatgtttattacaaattcaaaaagatcttataataaaaaaactcaccctttcacatctccaggcctgctttccaggggcaactattcttataatttgtttttagtatttttggcaattactataccaaatactataaatactatatctttaaatgatatgctcctcctaatattatttcttcatgtatcaattatagatatctatttacttcctacaaagacagacaatcacttagctctagttacatatattttttcctgtactggttacctttgcacactgaaataatatgcttaaacttctacatcctgttgtctcatttcttgatttgcactttgttaagattttggtattatagacataagactcaatccttttctttcttctcttcctacactcttccttccatacctctgctgagcaaaacctaggccttacagaatataattctagctcttctttagcatgtcatatagggccctttatgatctagcctctgcctacttttcttatctcctgccattatccacttcagctaatgttcacagtcatgctgaagtaggtatttagtttttggaatcttttgtgaactcttgttctttttatcattgtctcacagccttccatggcctggaatagcctcctcctgtaattcactggcaaatcccaatcattttcttcagcctacatgctacattacgaaatcttccctagtagacatcccttattacatcaaaaagtatttattgagtacttgtttttgtgcaaggtacggttttagatgttggggctatagaggaccaagatagtaacgagtttgcattctaatgacttaacaaacagatttaataaatattcctaccactatgaaacctactatgtaccaggattatactaaataacttacatatgctattttaatccttacaacaattttatgagccctataagtggctgggcttatactcaatctcaagtctgacttcacagccattacttttaagctatgctcactctgctcccattattccttgttcatttctattacaacatttgtcatgttttgaaatactttgcatatggatttccccatatgaaccacaggagataaaaaaattattttcaggacggtgtagaaccagtgccattctagatgtatatgaaagaagttaatacattatatacaatgggtgcctaaaggcattagggattaattgtctcttgaaatcccaggttgagaagggctactttagatgaaggcctcttaagagcctctcaagggtagagacatctgtcacttagtgggtggctgataaatttttgttgaacttgttatttaaacctttgcaattaatacatactcaaaagtattattttggggttgaaaagtcagctgcttcagtcttgcttctagagatggctttgcaggtggagttaagcacttagtattttcttaagagaattccaggggtgttggatccaaactttgagaggccaaagaatgcacagactctgaagccggatcacccagattcaaattccagtctctctgtttgttatataaattgaagcaagttattatttaacatatgccagatacttttataaatactttacactactacctgatttaatcttcaacacttctatttagtagatacctttactatttccttactagctccatgcctcagtttcctcttctattaattggctgtaacaacaacaaattgccttacagagttactgttaggattaaatgagtataaagtgctaagaatactacctggcataaagaaagttagctattactaacagtagagactgtggccagggcagaaaaatcagcttgatgtaacttaccaaatttttcattttatgttaatattcatttcaagggcacagatggaattctttggaatgggtactaaatcttaagcacttcccaatcaagctggctctgcatctccctaagggaaaaacccagcagctggtgctgaaatgaaaaacgtcggaaaaagtacctttaaaatctggatacttttctgcaactcctctgccatcttccaagtccacattatcattatcttttcctgggatctcttgcaacagcctcctaactggttcaacagcatcctccctggctgcctctagtttctccaggagattaaccttttcaaaagatagatgcacattggattgcaccatgcccatgcttaaaactggttatccagtaagcatttcgtaatactcaagtcagtaacttggctaaggcttacagggtctggccttggcccatgcctacagattcactcccctgactcctccccatggtctctacccagccacatcagctttcattcattgttcaacaaatattgatttgcttgtcttgtgttagagagtcattgaggatacattagcgaccaaacaaaacacagttattctactcacagaacttagattttacagggtgggggaacaacaacaattgctagttgtaaaaagtataaaaatgaaattgaacctgcaaataaaaaaagagtgctcacttgagatacagtagccaggaaagtcttctttaagaaggtactattttagacgtaacctaaatgatgaagggaagtgccacgtgttgaatggagaagagagaatttaggtacagggaacaacccatgcaaaggttcatacatgctggaaagaagttggtgtttgaggtatccagagcagatcaacttactgtacagttagtggggagtgaggtcggctgacacttgattgtgcaggacctgggaggccatggtaaagatcagaattctattccttttcccccctcctctttttattttataaaatctgttattttagaaagttgcaagactggtacgatgtacaccattatacccttcaactagattcaccaattactaatattttgccacatttgctttctctatttttttgccatatcttttgaaggtaagccgcaaacactgtgacactttgctgctaattactttagcaagcgccttccaaaaacaaaggcattcttccacttaatcacaaattaattctcacatgcaatcaatttaaaactgattcaatatcatctaatatgtagttcatatttaaatttccccagttgtccacaaatgtctttcgaagtttttttttttttttaaaaactatgaaccagccaagattcacaaatttcatttggtttcttttgactctcgactaaagtaattttccacttcgtttttttctttttcctgtcatgacactgacatttttgaagagcctaggcctgttgtcttgtagaatattctacattgtttttttctgattgtttcctcatgattaatgtcaaacatttctagcacaaatactatcgggtgatattagcgatgctaagtatcttcacttggttaaggtatgtctaataaatctcttcagtgtaaaattctattttccctttataataagaaatgatctgtagggtgattctttgagatactaacatcctcttccctacaacctttcagttaattgtttgttttagcatcttgcattcattagttttagcattcataagcttacctatatcaatttttagactggcagttgcacaatggggatgcagcgagggaagtgaccctccggatcccgggatgccgagcctttttctgccccgtagggacaggactgggaagtggctagcccgccattcctcggcccgtccttaggggagtcgcaggactaagtgcagtggcagtggcctcacctcgggccttcgccacatctttattgcctcaaggacagaattggagatcggtgtcccagtcaacagcgtggtacttatgacagccgcgagaaagcgcactactaaagcccggctagcagagctgggaggcaaaccagaccgtcagcaccagggcggcccacgcctgcttccgcccattggctgcccgcgtttcaagacccgcccccatattggagagcttcttccggtagccactggaaagcccgcagcgcgagccggctacgctccctggcggagctctggacgccccacctactcccagcgttcagtgcggtgccctggccgccattgtttgaatttgaaaacggtaacatcgcagtgctgctcgcgggtctggctagtcaggcgaagtttgcaggtgaggaggtgacccgcgggaatgtgtggggaaggaggtgggtgactgcgcatgtatggggcctaaggtggggaaacggctttggcaatgtggacatgttccgacagggctcataccccagtggaggttactgtcaggaactgggttgcggagcgatgcgaacacggggtacgcagcgaggaatgagtcatactaattcggttacggtttaaatctcgcctccactgctaattagctgagtgacgcaagacaattcatttaatctctctctgtaccttagttttcttatcagttaaaaggctgcaatgaagtgtctatttctttcggcttttgtgaagattaaatggtaatgtgtaaagttattagtgctggcacacagtaggtactaaatgtttgcagttattaatattattattgttgttgcttctgttgttgttgaggaacaggcctgttttgccacacctagttttctgaagctctgaggtgagcagtttgctcggctggtaggtaacacggcctttttgcggggggagccctgtggtagcctctgtgcacttatttccagactactcctactggtccttggggcttgcccttctagggttttgcagtgccaggctgaagagtttgtggcacagtgactgctgtcattccccagtttagaaggctttctccatctcgattcgctcgctggttcagtgatgcatgtctggcacagttctcttatatttcttgctaaactactagtttacagaagttcacgccttatgggttaggtagtgtaacagtgtatttatcttacatgtccaagactccagattttaaattgtaaaaataacataaaatactcatcgattagttgtgaagactttttttgaggctttgtgttgtagaccacattcagaaacctcattcagcaacagattctgctatttttcaccaaagtctccaattgtggattct

SEQ ID NO: 1596 - DNA, 6000 bp, Homo sapiens
aggactattacatctgaaactaatcactaccctaaagtttaatttcatgataggtggcttaattatttctttgtaaaatgtctcagcaccctgatttcatgagatgttttttaacttacaatgttttctgaaaattttttctgtaggtttcaacagcatgtgcctttccgggaaagtaaactgactcactattttcaaagtttttttaatggtaaagggaaaatttgtatgattgtcaatatcagccaatgttatttagcctatgatgaaacactcaatgtattgaagttctccgccattgcacaaaaagtaaatatttattttattaagcctcttattattagaatattaacagtttttcttgaaataaatattttttacttaatactgtaagcctaggaaataattgaaaattaaaaaggtaaatatttaaccaagtaggaagacatgagaaaggattgaaagttgcccatgctaggattaaaatgacctttagtaataagaattagtaataaacatcagttataaattaatgagtatttttggaatgaattgtctgctctgccattcatcttgttcatttggtacttctgggtgattggaaaaccctctgctaagattaatactgaacacttagcccaggaagatagatttttcctctagtttacatgtgtaagtagcttttttcctatcagaatgttcttttagggatggtgattcctgtttgtatgtttgtttgaatagtttttccttaacacttgagtgttcatttgacttaaatttataaaataatcattttctagtggacagttcttgtcttttctgttttaaaagtcacattgaatattttaacaggtttgtgtcccagacactttaaattcctctcaagagaaattatttggacctgtcaaatcttctcaagatgtatcactagacagtaattcaaacagtaaaatattaaatgtaaaaagagccaccatttcatgggaaaatagtctagaagatttgatggaagacgaggatttggttgaggagctagaaaacgctgaagaaactcaaaatgtggaaactaaacttcttgatgaagatctagataaaacattagaggaaaataaggctttcattagccacgaggagaaaagagtatgtattaagaactcatacttctatgcttgtcttcttattctgaagttaaggttaaatcttaaggctctctctcttcagtttttttcaacagtacactgaagtttttgtgttcaactttatattttgaaaaatttcaaacctatagaaagactagtacaatgaatactcatttatccttcacctggattctccacttaccattttatgagtatgtgaatacacatcttttggtctgtacaatttgaaaataagatccagacataatgacaccttacatctaaatatttgaacatatttttctaagaacatgggcattttcatcatgatcacaagaccatgaaattttcatacccaaaaaatttaatattgatacactaatataacctcgtatactgtttgtattgagagttccccagtgttccaaatatgttctttatagccactttgtttttgtctacagccagagttaacacattgcttttgattattgtgtttctttaatcatttctaatctagcactgacatttttgaaaagtgggtcctagttttctcatagaatacctgcaatttagatttgtttgattatttcttcatgatttaggtttaatacattagggaagctttttatgtaggttaagttgtaaattttccattgcatcacaccaagagccacatgatgtctgatttttccattcttagagatgctaagttttgctcacttggttaagataacagtatttcagatctgtattgcaaaaccatattatctgtggggtgttacttatagaccatgtgagtatcctttcactaagtgattttatgtattccatcagacctttattttgcagtctcaagtacaagtgttaaaaatatctaccaagtacctatgatcccatatcttcaaaaacactaattgtttgtcgtcttgttattatgataaataaataagatttaacggttgtttttttagcttctgtccaattatagtatttatttatttatttatttatttttgagagagggtcttgccctgttgcccaggctagagtgcaatggcacgatctcggcttactgcaacctctgcctcctgggttcaagcgattctcctgcctcagcctcctgagtagctgggagtataggcatgcgtaaccatacccagttaagttttttttgtatctttagtagagatggggtttcaccatgttggccaggctggtctcgaactcctgaccttgcgattgcccgcctcggcctcccaaagtgctgggattataggcatgagccaccttacctggccacctattcccatctttaattggccataactccgtgagtatagatggagtcctcttaccagtgtcctacaaacactagtagacctgtgttcatgggtgtgctttaatggtgttgacacatcacacatcacagtactcttctggattgcagaagtataagtagaacgatgatgtattaggctaaatactctcattttaataatttaccttcatgtccctgaaagcaattattgaacatatgtttggaaacaagaatgatagcttcagatgtagtacaagtcccactttatctggtcactatgtgattagaccgtgttacttgggcttctgtaatgtattaaatagtacctcctcagtgacgaaaggagcctttaatagtctagtttggctggtgcagtggctcacacctgtaattcgagcactttgggaagctgaggtaggaggattgcttgagctcaggagttcaaaactagcctgggcaacatagtgagaccccatctctacaaaaaagtaaaattagttaggcatgatgatgcacaggtgtagtcccagctacttgggaggctgcagtgggaagattgcttgagcccaggatttctaggcagcagtgagccatcactgcactactgcactctggcctgggtgacagagtgagaccttgtcttaaaaacaaagaaacaaaccaaaaaacccagtttttttttttcatttcaaagttgaaatttttgtataatgttggttagtaaaatttctgaaattactagagaaaaatatttaatgctatagtttatgatggattatatagtataaatgcttatcatataagattgactaaatattttaaggaaattcatcaaaatgtctaatatttgacatttaaaaatcaatatgattaggtgttggcatgctttatttttttcttctagagacaaagtcttgctctgttacctaggctggagtgcaatagtgtagttatggctcactgcagcttcgaaatcctgggctcaagtgatcctcttgcctcagtctcctgagtagctgggaccacagatgcatgccaccacccctaactaatttttaaaaatgttttgtagacatgaggccttgctctattgcccaggctgatcttgaacccttgggctcaggcaatcctcctgccttgcaaagcgctgggattacagatgtgagtcaatgtgcccagccctttcttgacattttaattaaaggattgggacttttaaaaaccattataaaataccttggtattagcatacatatacttaaattcgtttagctgtaatagccagcctaaattttttcagcaaaaactttatcagatgctaacaatgataaaacctaattattgaaaactattaaacttcccgccaggcgcggtggctcatgcctgtaatcccagcactttgggaggccaaggtgggtggatcatgaggttgagagattaagaccatcctggctaacacggtgaaaccctgtctctactaaaaatacaaaaaattagccaggcgtggtttctggcgcctgtagtcccagctactcgggaggttgaggcaggagaatggcgtgaacctggggggcggaggttgcagtgagccgagatcgagccactgcactccagcctgggcgacagagtgagactccgtctcaaaaaaaataaataaataaaataaacaaacttcccaaggtttttccacattcattctgatgtctccttcaatagttattatttattgttttactcagaaagtatgtagtttaaaattattaaaatagtattatgtatttatagtagagtgaaaaagaaaatctaaatataaagatctctcaaatctaccatgaatgttaatggatttttattatatattactgttttgtaacctggtattctttatataaaaataaattgtgaaaagtatgaattattaatataggttatcattgattacggtagtttatggtagtaccataattaaaccaatcctttaacattggttgagttgggttcactttttcattatttaaacacaactaccatcacaaaacaacaacactgtgatcagcattcatacaaccagaacatggggttatattataattattttcagtataaattcttggaggcagagtttcaaagtctggatagctgtagaactattttcaaatataaagttgagacattggaagatctgtagcttagagtttattgtttaatttgttgttgagtaactttaaatagaaacattaaaaagaatatgtagctgtttccttaatgctacaatttatgttatgaatgtataatggtcatgttaagtgttttatttattgctttatttatatattgcacatttttcatgattatgtatgtgtttcaaaggctatagaattgctgttgacatctggatagttataaaagcctaatataagtttatgtaacatctttatttgacagattagtaagtgggtgttcttagcaacttctctggtgtatgcaatccttgggctttagacttttacaggccacttttaaactcaacctttagcatttaccagagatctgatccttatgcttcccacctgtgaaatatggatgataccaagctcacagaaagttgtggattaaatgaagcaaatatggaactccccagagtagttcttgatagataataaatgcactaattaactttacttattttcttagtatagctaaacagtgagacgagttaccaaaggtctatttctaaaatgtggaaaggccaacctgatttttcagttaacaaatctttgcaaacatataattttcagtgagaacattatcactattaaaaaggacacagaattacaattgactaaatgtaaagttttattttttgaacagttggacggtatttctcttgggatatatttattcttttataagaattttatcatttacatgtaatagaaactgttggacttaatagaagacttgaaaaaaaaactgataaatgaaaaaaaggaaaaattaaccttggaatttaaaattcgagaagaagttacacaggagtttactcagtattgggctcaacgggaagctgactttaagtaagttatttatttcatgtccaggtaaaaattgagaattttatttagttttttagtttttttttttacttagtttactttttatattaggtggcttctgaattctgatctctttatacaagcttgaaaatagctgttactggtctggtgcggtggctcacgcctgtaatcccagcattttgggaggcctaggcaggcggatcactgaaggtcaggaggtcgagatcagcctggccaacatggtgaaacctcgtctgtactaaaaatagaaaaattagctgggcgtactggcatgttcctgaagtcccagctgctttcaggaggctgaggcacgagaatctcttgaacctgggaggtgtaggttgcagtgagctgagattgtgtcactgcactccagcctgggcgacagagtgagactcttgtctcagagaagaaaaaaaagaatatagctgtaactaat

SEQ ID NO: 1597 - DNA, 6000 bp, Homo sapiens
cactttgggaggctgaggtgggtggatcacgaggtcaggagttcgagaccatcctggccaacatggcgaaacctcgtctctactaaaaatacaaaaattagctgggtgtggtagcgcgtgcctgtaaacccagctattcagaggctgaggcatgagaattgcttgaacccgggaggcagaggttgcagtgagccaagattgtgccactgtactccagcctggcgacacagcagtactccatctcaattaaaaaaaaaaaaaagaatacatgtgcacttagcaaatgaaaaaaactcaatgggaaagacagtagttaagaacctgggagttggaatgggaaagaattctaagttccttccctaatagttaaccttatactatgattaaagtgtaagtacagtgatatgctgtatgactacagacaaacttatttggctagtttactgataaaatagtagaaaataatagttcctacttcacaaagttgttctgaagattaaatgagatgatacacacaaagcctttagcatggagtctgactcacagtaaaccctaggtaaatggtagctgtatctattatcaaatggagactcttgaatttcttgcgtcaacccatgtgactgttaacatatatattgtttgaatatttgctaaagagaaaggaaagacggcccagcagggtagcttatgcctataattccagcagtttaggaggctgaggtgggaggattacttgagaccaggagttcaagaccagcctgggcagcatagggagacccccatatctaccaaaggaaaaaaaaattagccaggtctggtggcttgtgcctatagtcccagctactcaggaggctgagatgggaggatcccttgagcccaggaggtccaggcttcagtgagccgtgatggtgtattgtactccagccttggtgatagagcaagaccctgactcaaaaaaaaaaaaagaaagaaaaggggattttttttttttttgagacagagtctagctctgtcacccaggctggagtccagtggtgccatctcggctcactgcaacctctacctcctgggttgaagcgattctcctgcttcagcctcctgaatagctgggactataggcgccctccaccacacctggctaattttttttgtatttttagtagagacggggttttaccatatttattggccaaactggtcttgaattcctgaccttatgatctgcccatctcggcctcccaaagtgctgggattaaaggcatgagccaccgtgcccagccagtgtactttatatgtatcccaggtactttatatgttattttaatcctcacaataatagtaattattattatctccattttacagataaggaaaccaaggctgatagaggtgaagtaatttccttcaggtactcaatatatatttattgagtaaagccttactttggtgtaaggcttgttcaagacactgggaaaataatactgaacaaaaagacagggtccctaatgaaacttacattctatccagggagacacacaatatattgacaatataatatattgtcaatacacacaatatattgcctgtagtgttatgaagaaaatagacagggttctgagatagaaggttataagaggaaggccaggtgcagtggctcacatctgtaattccagcactttgggaggccaaggagggcagattacttgaggccaggagttcgagactagcctggccaacatggtgaaaccgagtctctattaaaaatataaaaaaaaattagccgggcgtggtggggcacttgtaatcccacctattcaggaggctgaggcacaagaattgcttgaacccaggaggcggaggttgcggtgagccgagatcccgccactgcacttcagcatgggggaccaggacaagactccgtctcaaaaaaaaaaaaagaaaattatgaagaatgtgctttagatagggtggtcagaagaggtgtttttaaaagaaaaagttcaactgagagctgaagaatgagatgggtaagccatgcaaagagccaaacagagttcagggcagagggtacgtcaggtacaagggcctggccacaggaaaaagctaggagctctgaagcatggtaatgagatttttggaaagtgcctttagttggtggtatggacaagggccagatcatgaggaccctacagagcatggtaatgagtttggatttaattccaaatacaaatgagaaggtaatgtaagattaaaaagcagatgaagagcataatcttattttcttatttcttaaaagacacttcccttgctgagtaaatgtagtggaggagttgggggtaggagaaaagggcagaagagaaacttgttaaggaggtagatgacatttgttcagggaagagataagagccttgtactagggtgatcatcggaggggagataaaatcaacaggactccactacacgtggaggaatcaaaggttctggttagcaccagtatccagatgagaaaagattagggtggagataggtcccattttgaaatgccagcgagccacctaagaggagatatcaatagacagctggctactcaaaatagagatgaccagcagaaggagctgtagatgcagttatttccttggggcgggttgtgcgggggggcgcatgtaggggattagcaagtggaggaacacaaaaaggacatcagagctttccactacaccgggttgttacttaatagactaacacgacatttaggttcccatgggttgtgtgggccagaagcgcagttccaggaaccgactacaacatagtgtgggatatgatgtttctcttcaaataacccgatcaatcttttattctttaattcatagtaccctcccttttttctctttttctccttttttgcttttgttaaatgcccaggcacgccacaatactaggccttatcaataccagctcacattcctttccttatttgaagggactaactttttagctcattacagacaccccttcccctttcctgtccgctttcttttaagtacccaccttagctaaaaaaaatcaaatgtttagccaaccgggattagtttagattatacgacccgaccccagccaatgggaaaaagatacaggggcaggacttgcgtcaaaaatagactcctgcccctttgttcaggtgtgctctcaaggcgactggccaaaaaggcacccctctgcgcaaaaataaaattgctttgctaaaaatcctttgttcaagtgttcaatttccttaagattttaaaagttattcataacaataggctcctgtttcagtatttcctggtgcggcgtaccacacctacagcggtcgagtcacgccaggcactgccaagacgccgaaaagttctcccgcagcaggccggaggtgaccgacggcgcgcaggccccagcgagcgctgcatgctgggatccgtaggccggggcggcggatgtttgcgcagcttccttgagatgccaccgcccgctgcgccgcgcagaaacggggagcgcagcgcacccgcggcctgcgtcactcggtcagtgcagtcgttctaaaatcgaggcggaccctgctttcttgcctggagtcacttagagatgatgactaaaggataaattcagagtcctccaaatggcgtccagtgtccatttcatcacgatttggaacctgtagtagccttatcgcttaacacttcctaattattattattattattttctttttgagaaagggcattgctctgtcgcctatgctggagtaatccagcgacataatcccggctcactgcagcctctatctcccgtgttcagcgatccttcttcctcagcatcccgagtagatgggaccaaaaggcacgcatcaccacaccaggctattttttcccctctattttttgttgagacccgttgggaggcgcggggaggggggtctccctatgtcgcccagactggtctcaaactcctggaacttaagttatcgtcctacctcggcccgttaaagtgttgggattacaggcctgagccaccgggccccaacattaattattcttcaagcctattctggaccgggcgcggtggctcacgcctgtaatcccagcactttgggaggccgaggcgggtggatcatctgaggtcaggagttcgagaccagcctggccaacatggtgaaaccacatctctactgaaaatacaaatattagccgggcgtggtggcacgcacctgtaatcccagctactcgggggctgaagcagcagaatcgcttgaacctgcgaggcggaggttgcaatgagccgagatcgcgccactgcactccagcctgggtgacaagagcaagactccgtctctcacacacacacacacacacacacacacacaaagactattctggtctctgcctccgggatggcggctcgctttggacctctcttctgtgcttctactgccctctcttacaattctctaataattataatcatggcgagtgcttaccatatattccaatctatttacttccacaagctcattaattctcaccctaaccctctgagatggttactattatttcctctctgcagctgagggaattttgggctagggacgttatgtaagttgagccacgctacgctaaaagttccacactcaattctagcgtctcggctctggactaccaagttccggagcaagcagacagaccacctctttacgttcccgtaggccacgctccgggggcggggctccagtgaggatactgcatcccatggtgccttgcgcgccagcgcagccattggtccggctactctgtctctttttcaaattgaggcgccgagtcgttgcttagtttctggggattcgggcggagacgagattagtgatttggcggctccgactggcgcgggacaaacgccacggccagagtaccgggtagagagcggggacgccgacctgcgtgcgtcggtcctccaggccacgccagcgcccgagagggaccagggagactccggcccctgtcggccgccaagcccctccgcccctcacagcgcccaggtccgcggccgggccttgattttttggcggggaccgtcatggcgtcgcagccaaattcgtctgcgaagaagaaagaggagaaggggaagaacatccaggtggtggtgagatgcaggtagggagagggctgacaggattccgagcgctgcggcttcgctgctgggccccctactgcgcggtccagggagagggattttatttgcatttcctgagggtcccagtttcttggttctccgcgttctgttcaataaaaatgacacccggttgctgtgtgtatgtggtttttaggagaaaataacatgtttgatttgatcactgttccatactgaaaagtgcgttcttatgtttaaactatagtcaataaagatgtaggtgtcacttttatatgctacttcatgtagtttgtcagtttggaagtaagactgaatacctattttgcagatggttaagcacttacgttggtattattacctctaaaaagcaatcaatcactgttctctttattctagatgcaatattttctgcatccctactaaacaagtaaacatctctgtctttaaacattaaaaattaataaagtgagtttatgttttttaaaagatcaagacaagttaagctagtgtaaatttctgattgtgctgcagttttccctttcatctgcgtgtttgttcatagaccaaactaaacggatatttcgagataaagggatgtggaggggtgttcggccctcccctgactggtttccaaataacttcccaattttaaaataagctagaaactgctgcttagttagaattgatttattcaactttttagaggctctccacagtttactgagtatgtgtgttttgtgtgtccgtttttgtggctgttaacagttgctgttgcaacttttctgtaaaccccaaagtattctaaaattaaaaggttatttt

SEQ ID NO: 1598 - DNA, 6000 bp, Homo sapiens
taaactccttgtctatagtatatgggatacttaaggtataaattatgttcacacaaaggaaatttcatgtatgtggctttaccatacaatcttgctaggtatatacagcttacttgttaatgagcctcccaactatttatagctctaggtttcactctaaggttttggcaactcaggtttttagtgctgttctttgggggctttttactctttttttactctcctttttctggttctaggtacactcttcagttccagcttaaagttgtttcctccacagccctctgtattgcttttagtggctctttcaatgtctggctgttttcaaaagcactgtcaaattttgcttttgttttccccccacctgctggcagtctgctgcctcttagatcattcaactcttttttttttttttttttaagacagtgtcttgctctgttgctcaggctggagtgcagtggcatgatctcggcttactgcaacatccgactccctggttcaagtgattctcctgcctcagccttccgagtagctgggattacaggcacgcactaccatacccagctaatttttgtatttttagtagagacgggatttcaccatgttggccaggatggtctcgatctcctgacctggtgacccgcctgcctcagcctcccaaagtgctgggattacaggtgtgagccactgtgctcggcttttttttttttttttagttgaatttactattcttcacatttcctccttgttggtcttatttctctagaaaacttcttcatttcctttgctgtaaatgtcctctctctccttccccatcatagttcatcttggcctttagtctttatttggctatggccctcccgttaccagtcttattttgcactaatcctgtgggacttctttaagcaaaaattgaaggaaggactttatttgttttgttgttttaatatggaactcttcatgaatttgcatgtcatccttgtgcaggtgccgtgctaatattctctttatctttccagttttagtatatgtgctgctgaagtgagcactgtttagttttaactacacatatcagatacgcattttgaaattctgttgtagattttaacatgagcctgacttatgcagttcttggtatagtttgtagatttggattaagggcattactgtagatatttggcagccattttactatatgaatttagtgccaggaaaggaaagagcagctaaggtacttgggttatttctgtgaaatagattttttggatccagtaggaggatcaagcagtgaacttggtagtgaacatgtgatagtgagcttgaaatactggtaggacatccaacatatagttggaagtgagagttattattattattttttgagatggactttcgctcttgttgcccagactgaattgcaatggcatagtcttggctcactgcaacctctgcctcccggattcaagcgattcttctgcctcagcctcctgagtagctggggttacgggtgtgtgccaccatgcccggctaattttgtattttttagtagagacagggtttcaccatgttggtcaggctggtctcgaaatcctgacctgaggtgatccagctgcctcagcctcccaaagttctgggattacaggcattagccactgtgctggtccgagagttctttctagagtatcagtgttgaagagtataggctttggagagttggtcccataatgatgaaaaatagagctgagaagaggatcaaattattaaggaagaaatacaatcagaagggaagcaggttgatgatagtaccttggtgggtggggatggtatatcttcatctagggggtaggaacaaagacataaaagtgcttagaggactgtttgagaggtaaagatattgtcaacttcatggaatctactgaagataacatagtttcaggagaacattggcaaatatagggtgacctttaagagagtgatgggagagggaaactgattgcagggggttaaggaactaataaagtaggctgggcgtggtggctcacacctgtaatcctagcaccttgggaggtcgaggtgggcagttcacgaggtcaagaggttgagaccatcctggccaacatgatgaaaccccatctctactaaaaatagaaaaattaactgggcatggtggcggtcacctgtagtcccagctacttgggaggctgaggcaggagaatcacttgaacccgggaggcggaggtggaggttgcaatgagccaagattgcgccactgcactccagcctggcaacagagcgagactccatctcaaaaaaaaaaaaaaaaaaaaaaaaaggtaaagcacttagcatggatgactcttcagaaattcaaaactgaagaggaggaagtttcttagtatgtgtgttcattttggatggcgatgattgagcatatttttttctgaacaaaaagcgccagctgagtagactcagtagatgaaagggaagtgaaaattgatggagcaaggtcttgaaggcaacaggagggaatggaaacaaggccacaagccaggaataaccatagaagagagtggcgtcttaaatttttcctaaacacttgttctttccaaatgttttccttcacttggaagttgctgcctgcctccaagtagctgggactacaggcacacgctgccatgcctggctaattttttgtattttagtagggatggggtttcactatgtgcatcttttctagactgtagcttccttagaactgtatttttcttcgcattgccttttcctgtgtccagatgtctgcatttaagtccatgtagaatcttctctagaacgcagaaagccttttccctaatcttctcttcccaactttttccagtaatatttgtaaggcacctggcataaacatactggcccgtgggctccagcagcctccacgtagggctgttcatatttactgagcaggaatactgttgtagccattcaccattgatgcctagcagccagaagggagctgctggagagtttacacttcagacatgtaaaatggcagggacataggagagtcatgggagattcatccccctattgatggcttttcattctgcaattctgactaaaatttgttcatttttctttgaacccaggtcgtaaaggtatcttcactggaagctcggggctgcagattgtgtacctcagtgggacagaatccttaaatgagccagtaccaggttatagttttagtcccaaggatgtgtcttctctgagaatgatgctgtgtacaacctcccagtttaagggtgttgatatcttgctcacatccccatggcccaagtgtgtggggaactttgggaattcttctgtgagtagtgtttgtttagttggaatttctaaaagcaaattgcactggcttgagttgggacttttttcttttcctgtttatattgagtattttagctcttgggtaccttttattagaagtcttctgtgaaaattttcaggattctaaaagttctgtcaactgatcaaagcaaaagttaatttcatgaaagtgtgattcatagatgagactgctgaaatcttaattataaaggaatggttttttatattctctgcttcaagtgccctttcctaagcctcttaatgttttgaggcttcactgatttttttgttttttgttttttgtttttttttgagatggagtctcactctgtcgcccaggttggagtgcagtggtgcgatcttggctcactgcaacctcctcctcccgggttcaaatgattctcctgcctcagcctcctgagtagctaagattataggcatgcgccaccacgcctggctaattttttttttttttttttgagatggagttttgctgtgtcacccaggctggagggcagtggcgccatctctgctcaccacaacctctgcctcctgggttcaagcaattcacctgcctcagcctcccaagtagctgggactataggcgcacactgccatgcctggctaattttttgtattttattagagatggggtttcagcatgttgcccaggctagtcatgaactcctgagctcagacaatctgcctgcctcggcctcccaaagtgctgggattacaggcggatttttttgtatttttagtagagatgggatttcaccatgttggccaggctggtctcaaactcctgacctcaagtaatttgcccacctcagcctcccaaaatgctgggattacaggcatgagccaccgtgcccagcctaatttttgtatttttagtagagacagggttgcccaggctggtcttgaactcctgcgctctagtgatccacccgccttggcctcccaaagtgctgggattacaggcgtgagccaccatacctggccagattttaatattttatgagtaatcttgaaaaggatggtacaccaggagtgacaactatcatggggagtgaaacgctacactggtggaagtaagcctaaggaagattttgaaaaggttatgtgtgagggcagaaaacactgggtgagcttcattgaagggaaatgtaagaatgcatttgggaacaaatctccatggttggattcaggattatcagtgatgatccagaagtggagcctgtataccaccccttgccagtttcagcaccatgtgtccatgaccaaaaaggccaacaggataccaggcattatcaaggaggatgctctcttcctttttgacaaacccatgattactctttacgtagaatacaaggcatagagctggttggagcacaaggatatagcaaagctagggaagatcgagagaagggctgctaaagtgatgaaggaagagagaaagacacatatgatgctctgtaaggaaggatgagaaaatgaggcccctttgttttgcggggagctaaaaattgattttgatcaaggcttataaataaccatacagtatatttatggaggagaaaagtatagttcaccagtccctaagatgctaggactgacctcaaagctaattccctgcccttcagcagaaacctgaaggaaacaagcataagacaaaaggaaattcctgctttacgtagtggaaaacaaactttgttagcttatttccaagtaataccttctcttagaatagagttcataaataatgctgtgggtgagagatcacttaattggttgttaacagaatctggggatgttctgggagcaagaataactttgagcaaacttcatattacttaagaagggtgtggttatgcccttcctcaaactgccacttccttgactgaagcaaaataaaggattatatgctggtgatgaagtccttgaatactctataccagatattctgtggatcctaggagccctgaagcctagcttttcgctttgattttctgaattgactatgactgtctggacccgtgaactacagatgcactacgtaacaaactagaggctgggcgcagtggctcacgcgtgcactttgggaggctgaggcgggcggatcacgagatcaggagtttgagaccagcctggccaacatggtgaaaccccgtctctactaaaaatacaaaaattagccaggtgtggtggcacgtgcctgtaatcccagctactagggaggctgaggcaggagaatcacttcttgaacccaggatgcagaggttgcagtgagccgagattgtgccactgtactctagcagcctgggtgacaaagcaagactccatctcaaaaaaaaaaaacaaaccaaaactagaagcccagtctgtgggctccagagggagagcttactttccaaaaaaggttttaataatttgtgttttgggtattgatatggaggagttaccttttaatctctggcttccaacagttgttcctatttctacattcatagtagttcagctcccttatttgttaagattttttctctgattgccatacttatgaaattcaatgtgcagttccttctgtccacatctgtattcatgtataaatttcaaaga

SEQ ID NO: 1599 - DNA, 6000 bp, Homo sapiens
taagtgggatgaggtgatatcttgttgtggctttgatttgcatttctctgatgattggtgatgttgagcattttttcttatagctgttggccatttgtatgtcttgagaaatgtctattttgatcttttgctccccccgctttgtttttttaagagatgagttctcattatgttgcccatgctggaatcaaactgggctcaaacagtcctcctgggactgggcatagtggctgaggcctgtaatcccagcactttgggaggctgagtaggtggaccatctgaggtcaggagttcaaggccagcctggccaacatagtgaaaccctatctctactaaaactacaaaaaattagccaggcatggtggtgagcacctgtaatcccagctacttgggaggctgaggcaggagaatcacctggaccccagaggtggaagttgcagtgagctgagactgtgccactgcactccaacctgggtgacagagtgagactccatctccccaccccctccccctcccccaaaaaaaccctcctgcttcagcctcctgagtagctgggactacaggcaagcaccaccacatatggctttgcccatttttagacaggattttttgtgggtttttttcgctattgagttgtttgagctccttgttatatttattctggttattaatctcttgtcagatggatagtttgcaaatattttcttccattctgtgggttgcctcttcactttgttgattgtttcctttgctgtgcagagctttttagtttgatataatcctattagtctatttttgcttttgttgcctgtgcttttgaagtcttatacaaaaaatttttgcccagatcaatatcttggaacatttctccagtattttcttctggtagcttcatagtttcatgtgttaggtttaagtctttatccattttgatgcgatttttgtatatggtgagagatagagttgagtttcattcttcagtatagggctatccagttctccaagaatcatttattgaagagactgtcctttcctcattgaatgttcttggcacctttgtacttttggtattgacataaaatgagttggctgtaaatgcatggatttatatatgttccattggtctatgtgtctatttttatgtcagtaccatactgattgggttaccatagctttgtagtagattttgaggttgggcagtatgatgccttcagctttgtgctttttgctcaggattgctttggctctttggggtcttttgtggttccatatagattttaggattgttttttctatttctatttctgtagagcagcagtccctaatctttttggcaccagggaccgcttttatggaagacaatttttccgtggacgcggggggatttttttttttaatggtatgaaccatatttattgaaaacattatttctggcctttctcaaattgaagactgcaaaaaataaaagcagtgctttattgagttgtcattaaccttgagagcagtggcgctgcctctccacgctctggggacggtggaaaccgtggctggtgcgtgccacatctatcacacctcggtctacaaaacagtcctgacgtcaaataaaactattgtggccgggcgcggtggctcacgtctgtaatcccagcactttgggatgccgaggcgggcggatcacgaggtcaaggaaatcgagaccatcctggctaacacggtgaaaactcgtctctactaaaaatacaaaaacaaaattagccaggcatggtggcgggtgcctgtagtcccagctactctggaggctgaggcaggagaatggcgtgaacccgggaggcggagcttgcagtgagcgtagatcgcgccactgcactgcagcctgggcgacagagcgagactcagtctcaaacaaaaacaaaaacaaaacaaaacaaaacaaaaaaaacaaacgctcgtacatgacatttacattagaaaaagagagctgaaagtagggatggggggatggtttggggatgaaactgttccacctcagatcatcaggcatcagattcttgtaaggtacgcagcgccgtagaaccctcgcatgtgcagttcacaatagggttccagcctctgtaagaatctgatgccaccactaatctgataggaagtgagctcaggcggttattctcacttgcccaccgctcgcctcctgctgtgcgtcctggtttctgatgggtactggtccatagcccgggggttggggatccttgctctatctagagaatgccatttgtattttgatggggattggactgaatctgtaaattgctttaggtagtgttgtcttttttctttctttcttttttttttttttgagacggagtctcgctctgttgcccaggctagaggctggagtgcagtggctggatctccgctcactgcaagctctgcctcgcgggttcatgccattctgctgcctcagccttccgagtacctgggactacaggcgcccgctaccacgcctggctaatttttttgtatttttaggagagacggggtttcaccgtgttagccaggaaggtctcgatctcctgacctcgtgatctgcccgcctaattcttctaatccataagcgtggaatatctttcctttttgtgtgtgtgtcctctttcatcagtattgtatagttttccttgtatagatctttcatttctttagttaaattgattcctacgtagtttatattctttgtagctgttgtaaatgagattgcttttttgatttctttttcagattgtttactgttggtgcatataaatgctactgatttttgtatgttgatttggtatcctgaaacttttactgaattcgtttattatttctaacagtctttttcgtggagtcttttgatttttcaatacgatgagtttttatgtcttacttttgtatcctcttctgggaattattacctgctcatgtttggcaaacttctactcttcttcaagattcagtcttgagtgctactcctgggcagtgctgtattatccaaagagtaggaaaaaatgcatgcttatgtgccagcaaagcagagccaccagttatgaggcaagaaacaaacaaaaaagaaggcttgtaggctgtgggaaaagccagaactttgtagttttgtttggttattgagacagggcttgctgtgtcacccaggctggagtgcagtggcaaggtaatagctcgctgaagcctccatctcctgggctcaagtgatctccccacctcagcctctggagtacctgggagtacaggcatacggccaccatgcccagctaacttttttttttttctttttaaatttgtagtagagacgaggtctggctatgttgcccaggttggccttgaactcctgttctcaagtgaacctcccgcctcagcctcccaaagtgctgggattacaggcatgagccactgtgcctggcctgtagttcttctttaatcttatgttttattaattttgaattatttagatgcccttgatgagtcttcctttccccgcagtcgtcaggaactctctcttgtttccatttccttacacacttgtttcctaccacttggcctgaacccttcaaaaaagtcaatattacaaaaactaaaaccaaataggtaggagggcttttgtagattaaaatagagacagaaccaaatgcaagtgtgaaacttgattgcatctgaatcaaaacaagccccaaatataaaatcagtttgtagggaaatatggagaactttaaatatggatgtatattaggtaatattattgaataattaatgttaattttcttagctgtgttaatagtattacggttatgtaggaggatatcctaatcttaggagataaatggagatgtattcctgttgtccgcactttattttattttattttttgacacggagtctcgctctgtcgcccaggctggagtgaagtggcgcgatctcggctcactgcaacttcctcctcctgggttcaagcgattcccctgcctcagcctcccgagtaactgggactgcaggtgcgtgccaccacgcccggctaattttttgtatttttagtagagagggggtttcaccgtgttagccaggatggtctggatctcccaaagtgctgggattacaggcgtgagccactgcgcccggcctgtactttactttcaaatgattgagtgagaatggaagggcttgggcactttgagagaaagagaacacaagcaaatttgccaacatgctgagacttactgaatcaaggtaatagccattattcttttaacttttttttttttaatttgagacggagtttcgctcttgttgtccaggctggagtgcaatggcgcgatcttgactcactgcaacccccgcctccctggttgaagcaattctccaccatgcccggctaatttttgtatttttagaagagacggggtttcaccatgttgcccaggctggtcttgaacgcccgacctcaagtgatccgcccgcctcagccttccaaagtgctgggattataggcgtgagcgtccacgcccggcctcttaactttttgataggttaaaaacttacaaaaaacgtggatagagggggtctgtcttgcccactagaccgatatggttaggttaggttaggttaggttaggttaggttagaacccgacattgtgctctgtacttcctagccattcattcgcttcaagtgctctgaaatttaatttaaaaaatcatagttggaatcctttcggtcactttctctttctcccttcgttcctccctttccctcttgattcttccttgaggcgcaaacacctgagagaggcttctgtccctcggcggtctccgtaagtaagtgaaccgttattggctggagggcgctgacgtctgattgttgcgcggtcgcatttttccggggagcgcggattcgcattcccaattttaggtggcagtcgcaacccatactattcggacagatggcacagaaaccgctgcgcctgtgagtgaccgtgaatggaagcctctctccctgtgtctctttcgtgtgtgtaggtgacgacacgggcgggagtctttcccatgacgggaagggagaaggaaaaggcggagagacacggggctgctggggagcttaggtgatgtctttgcctggccggggctgacctcttttcctggcccttttcgcttctgagggggtttctcttggcgacgctcgttcggagaggcggaagctcccagagttaggcctcctccatcttagggggcagtcctggcctctgacacatcctttccccttcgtttctcctgaccccatttatttactcgccaaatagccattgggcccactgatgggccctgggcagtggtggacagagtagatagggacccttccctggggcattttttttttttttttttttttgcgaggaggaggggtgggggtggtggtgaagagagggcttcatgcagcaagtatttattgaagaactgcagtgtgccggacgctgtgctaggtgttgcaacagatggagttcctgctttaatggagcgtagagtctagaggaacaggtactaaagaatccagataatgggccgggcgcggtggctgaggcaggagaatcgcttgaacccgggaggcggaggttgctgtgagccgagatcgcgccactgcactccagcctgggcgacagaacgagactctcaaaacaaaacaaaacaaaacaaaacaaacaaaaaacaatacaaataatggccgggcgcggtggctcacgcctgtaatcctagcactttgggaggctgaggcgggcggatcacttgcggtcaggagttcgagaccagcctggccaacgtggtgacaccccgtctctactaatacaaaaaaaaaaaattagccaggcgtggtggcgcgtgcctgtaatcccagctacttgggaggctgaggcaggagaatcgcttgaacccggaggcggaggttgcacagtgagccgacactg

SEQ ID NO: 1600 - DNA, 6000 bp, Homo sapiens
aacctgactccgggggccagatggaggggactggccagattgggtgacagggaaaccagaatccgggtggcctggcatatgggggcagaaaggggccccagggaatttgcctcctggactaagggattcttgtcccccacacaccgtggggtctgggggtctttggtgcctggaatcaggtagttctggcacttggctgcctttgtgccaggaagaactgacacacctggtttgaggatgagtgtatgtgaccagctctggggtcagcagttcagcagctgtgttggttgtggggggagggttgtcaatgcccacaaacaaacaaacaaacaaaacattgcctccccagacaacctggggccagacaggctgaggatagacagagaacagggcctgatgggggtcaggccaactcccactcccagcctctagtcaagggggaggggccccgggatatcgcgggctggtggttctggggcaggtgaggtcagctttgaagaccttgcgtccgcagtaccgacccgcacgctcttcagcgcatccctagtgaaggaggttctcccccagcccgtggtgaggaactaggggtccagtttccaacctccctcttcctcaagttgaggacaaagggagatgacgcccgtctgtgttgcggtgatctgggtcgcaggcgcctttctccgatccaggagggcgctgctaaaaatgcttccctggggagcccggcggaggggcggcctggctgggaaccatgggtctcgctgcggagcgcggtcggcagggagagggaagtcggggctggcgccctctggcgggcgaggttgaagccgctcgtggtcgtaccgcttccctggcctctagaggctccgggcgggcgccgtggggccggggcctccgagtcccgccactgctctgggcggccgaatcttgggcggaaggcgggggaatgccactgaggcttgcatgcatgcgtgcatacgttcattcattcattcgaacgacttgagttggagtggggaagtctggctgtggccctcactcctctttcccttcctcttcttggccccagcctccaaagtcctcggcacgtgcttggcaggaggagcgggagactggctgagtcctctctcctgggaggcctccctagctgacccatctaccccctgcgcggctccgccccaatatttaccccacccaccccccgcgatgccactgatcgctccttgcatttctcgccggttttccgggtaggtctcccggtgggcgcgggcctgcgccgagcacgctcctgcccgcagtgggggcccaatccacatcagcctctcggcccaagagtttctcggccggttggggcgccccgcggacacagctgggcaaggtttattcctctctcctcgccccagcctctcctcgagccctcttctttgcccttcagcgcacagtaggagcgctgccggctcactgtggcctcagacccctgggggatgaaggcatacgccggggtttgccgactgctggaggaagggcaggcttctatttgggggccgagggagacgactcccagacagtggccgaagtgcttaacgtagtctcggcgatttgcatttgaacggtcggcagtgagtccgcggcgctttgaacgcccggcgcaggaagcgcgcgtcggagcgagctgcggtctccggcgggtgtggattggaggggccgggggatgggctgggatcgaggggtgcgtttggaaataggctgaagtagtgtgtctgggtgcaggcgagggcgtgtctgcggagatgggccgtttgtgttggcgaggagtgtgtgtttgtgtttgcaggcgagggagtttgtgtctgtgcgtgtgtgtgtttgtgtttgcggagtgtgggggcggccaggaaaggtggccgggctgtcactcagcgatcaggttgacaggcgctccctcatctgggccagggagctctgattgcagattcgaggaaacaaaatagcaattgtaattaccgggctttgataagataaaggagggagggagctggccgggaggcgggcgagccagcaagggagggagcggcctgcgggggcccggcgggacatttgcatctgtcagtcacggggcgtgccagggcagagccaggtgcttgctcccggggtgtccccatctgctcctctcccccagagaaacggacttttggggagatgagaatttcaacgaactaggtgagggtccgcttctcaggagggtctccaaatccaaatgtaaaggaatcctggtccagcacaggctccctggcagaggctgggacaggactgaaacttgacctcggacccttcagatcccaggacgcccatcttctctggggcagaggaagaagggtggctgaagaccattgagggtcaacccagggccctcagaatcttctgggggttccacagctggagctgaatgctggtctcagccaggggctctgcccctacccccattccagggaggggcaggtacccagagtggctctggctgtgaccccaggaccatgcaaacactgttggatgggcgggtcaccctcacccctgcctggggcctactccctgctctgcttatctcactgatgttcagagagtccatggtgggagaaagcccatttcttacaggaagtgcctgctctccatctctccattcaatcatttgttcatcgacatacgcaactaaacatgcttgagggcctactgtgtacaaggatgagggtaagaccacaagcaaacagacataacctttgcccacttgaagcagtgcagagagggaaacagacactcaatgaattgtgactcaggccttacacagaacacagggaaggcaagggctggcctgggctgtggccacttgtgtccacctgacttgtctccgcctgatggacccacctccccatgggctttagaggagacagtgcctgccaagcctgtggcagatacaagtgctcactaactggtggtgttcctggtgataatctgttgggaggaggtgaaggcaggtcttcctggggaagttgcaaataggctgaagtctacaggctcagccacttcccccatcattcattcattcattcattcaacgaactcttaattgcagaacagctctgcccagccttgtgccacgagctgtgatttctgagctcataagacatggtccttgtgggcaaggtctgtgtgggcaagagcccactgaacagactcctggaggaggatggcaagtgtgctctggaagtctacttctctgaggagggataagatcttggaacgcaccctctaactgttttcccatctctccattgctcagtgtttgcatttatggctgggagttggaaagatggggcacagggaaaggtgggacacagagcagggagggaggcagggcctggctgtgctgctggactagggctgccgctaattttggcctaatggcttcctgggaccacaccaaaccctccagccctacccccaggggaatggagggtcactggggaaggggaggttgtaagtgaagacagcagtctggtagggcatcacctgctcctcacaaggcacctgtcccagagcatctctgtccacccaggctgctcccacagaagcagcatgggggctcagggtttccagaaacctcaggggggaagccacaaggtggggggctaggaaaggcttagacaagtgcctaccttctcctatgccccaagcccagctgaccagcccctgcctagaatacagtaggtgtgtaaatacctgtgaaatgaaaaacgagtggggctttgagggggaaagggctgggtggcctggatggaagtcccttcccccagtaaaagctactgagagtttttttgcccctgctgcctgctgaggtacggggacagtgggtcctgccagggacctccggactctctcttccacacaggtggctcggggtgctcctcaagcttcaggctagtgtgtgtgtgtgtgtgtgtgtgtgtgtgtgtgtgtgtggtgaggggcacaggggaaggggtgatagtgataatgggatggggggagggggaggcatttctggctcccagggcctcctcgggagagtgaaggagactggagagaccgacaggacggggcacgcggccgaaacaggggagcggggtccgggtggcaccggcacgcactgcgcgagggccgggtgcgcagccattcgctgcatggttagcggccgctcccaggggcccggcgggacacacagtaggtggctcggagaccactgcgtagccggcggcggaagcggctgggcccggaggcggagacccagacccgccagactcgggcgctccaggcggtcggggaagcccaggctcggggtctcccggcccgcagagtttgcagccctaggcgcccccatccccgcgcgtccgggaccggggagcgcgcgaggggacaggccggggatagggggaggcgcccagaccggccgcccccgcccctcccgcgggtccccagacccctcccctagcccagaccctcaatcccgaacccgtcggccgcccctccccggccgccccgcccccgccccgggctgcatccaggccccagttcccagccgggggctgcgggctcccgccgcccgccccgcgctcccccctcgcgcccggtgcggcgccccccgcccccacccctccccgccctcccacctccccacccaccccgccagcccgtgaccctcccgcccgctccggctcccgagcagccagcggccaccggctccggcagcggcgcacagcgattcggtgcggcgcggcgagcacgacgttccacgggacccgcggagccgcgtcgtgatcgccgccggcctcccgcacccgcaccctctccgctcgcgccctgctcagcgcgtcctcccgcggcggcccgcgggacggcgtgacccgccgggctctcggtgccccggggccgcgcgccatgggcagcccccgctccgcgctgagctgcctgtgagtaccgcgccgccctgccccgccacccgccccccgcgcccctcgcctcacccgcgcctctctctcccgcccgcttttgtctcccacaggctgttgcacttgctggtcctctgcctccaagcccaggtgaggaggggtgcgcggaggcgggggccgggcgcgccggtgtgagacccgggtgggcagcgccggtcgggggcaccgggactgactctgcggccggcgcgggagggctgagggcaccttagaaacccagccccgagccaccccgaggagggagctgaggcacagagaggtagcacccctcctgaggtcacacagcgagtgagtggccaggatagaaacgaaggtctcggagcccagcactgtcccccatgcatcctcgccggctgggggcatagggaacacccagccgccgaggaagggggcagccgcggccaggggatggatgttcgatgccaggggaagccgggtgactgcagcagagaccctctcagcgcccctcgggggaggcttgtggccgatttggcccaatgatcgggtgcccaggttccctgcactctcaacatttgctccgtaaatttgtctttataaatgtcaggggtcggggagggctgcctccctacttaaaagcgccctgctcctctaggaaggcccgggcaggggccctgcgctgggcagggagctcgcttccctgttccgggctggccgggagccccagggtgtctcccaacaggtgggtccagcttctccctggggctcgttcatcctgggctgggtctgcccgacttgcgtgggtgggggatggtggcctgggctggcatgttgggggaacccccagcacctgctggcggcttggggcagtgagggggacgcagggtgatggggccactcgggcccctgggcggagtagcattataatggtgtattgtgtatttttcaatttcctaaaggtaactgttcagtcctcacctaattttacacagcatgtgaggga

SEQ ID NO: 1601 - DNA, 6000 bp, Homo sapiens
ggatcagagcccaggactgtcttggaggagtccagccagcccaagccactccctaggtcccgcggaccccacctgcctgctggggcctcaccttggcgatcagcttccccttcttgttcatgcagatgtagaggcccgtctcggctcctcggactcgaactctgcttccaaaggtgtccgtctccacgatgagctttgctgtcagagaaggtagcaggatggctattggcagatccctgaccccagctggcccacacacttgtcacagcccagcagcaactgctccaaagaccaggaacccaaaacatggactccagctccagcccagctactaacatgctgtgcaacccagagaaagggcttttctggacctcgggccccacccctgggtttacagagggcagtggacgggattatggttttcaaactgggttctcaagagaggtcttgggactatcaaattgaaaaggctgaagtgccattccttccaccctctttttaaaccagacagtgatgtctcttagattgaggatctaagtaaaatttaattgaatcagagttccatagctaatcaaaagatctccgaggatccttccaactccaaatattatgtgtgcgtgtctcacaggtcattacaaacacttgggtgaaggggtgacctccagtcccaaggccaaagatgaaagcattgtctcctgtttctgccactttgggttctaactcacagctttggccacccccagcccctcaacatcaccaggctctgctctgctgagaaggtgctagggatggggacagctctccctaaacacacagcccaaagcaggctgctttcccagaacctcagacacctgccaggaggatcctgcctcttccctgtggcttcccagtcaccagggtccccagcccagtgtctagaaatcaacaactcaattgtcttttctctttcagcctcatcacagctgggcttctcagcccagtgaccaaatagcttctgtgggtgaggaggagggagaatcctgcctgctggcctcttagactggaggccaggaggcagggctgaattctatgcctcctttcccattcccctccccttagacagccaacttgccacagaagcctgtcctgttcacctctctgtgcaatcatctcttataggctgtcctcaagaaagtagtgagggtgacttcactgtttaggaagggacagaaggcgctggctctcctgccgtccctgccgcagagcccagcctctcccctccctgagaaagcagttcttggacttagcctgcattgacatatggcacctcctctgtccctgaaacccatggcaggggtttggggcatcgaggtcagcaagtcagtcatcactgctcagcttgtaatgttccccgcttcacacaggctcagtgctgggaccagtggccaagcccccggtttggccccaagtcagcagggaaatgcagctgtcacctccctgcctgcccacctcctcctggacctagccagtctgctcatccctctcccgctctgccttccacagcaagaggcagctatttttaagggccaggaaggatgctgactggaggagtgagaggatgccactctggggattctggccagatgcggcaggcagggatgaagtaggtgcctctgcatcttcctggggccggtaaagaagccattgagacctctctgctattctccccggactactcctgtcctggctgaacaccctgagcctctgttcttagggcctccagctcctatcctgctgtggggcagggactagggaaggcgggaaacctcttatatggccacggagagaagtggacatcaggcttcctctgatgtctgaagatgaattcccccacaccagcttgacttctgcttccctccccgaaatccaaggatgctgggccatttgctctgacagagcaaaccctggaagagccaggcattcgtctcctctccttagaagctgagaagggcagcaagcagctaatttggagggacaaagggatggtaggcctgctctgccagcccagtaggggagctcggccaccaggcaggccgcccccacccccaccccagaaagcccgctctctcccatgtcggttgaatctgctccgatctggggagctggggccgcagtttacggcagctctcccgaccgggcttttggaaagcttaacattttcaaacctattcttccaccccagtgacagatttatcccaggaaaattatgtctcctccagctttgaagggaagtcagctacgtcgatgcagaaaaaatgcagcgagacatactcgatcccccaaactggctcaagaagaggagaaagtattcaggaaatgttaaaaaaggtgaaagtaagaagagttttaatcgctctgccagacgcaggggtctctccagagattcagagagaacaatcttgaacctcttttttaacatttacagacttgcaactcctttcaaactccacatctgaaaaaaagctcgttctttttctgttttatatcattcttcatttttcttcttagctcttaaaatgcctcacctttttattacattttaatagagtcttcccctctcctttcatgcttgtttaacgtggtcattatttaaaggtttttaaactcacaataatcgctctctaaaaacaacaccagccgcccagagggcttgcttttctcttggtacatccaggactctggaaattggccccgtttcaaggcaggaatattgaatgttttagaaatcaatcagtcctcagcctctctgccggcagtagctctccgcacttgccaccccacagggagccgggagccctgccccagccgcctgggttccccagggaatggagcagggagagcccccttccaagcccagtttccacgtgtaaattgacccatccgattaaagtatttaagggttcccagcaacctccttttccaactgggagagttgaggggatttctctcccttctctttcccactctccttttgtgggccctggcgacatatcctctttcaagcgcttgccttaaacctaggccccctccccctgaaccccctgcctccacctgcagctggggaggagtgtatgaaggggggaggtgtaaagggagattcctagattcattcatttgctgggcagggaagggggcacctgtggccaagtactccccgaggccccttccctagccctctcttccccagctgaccctcaagacacctttctgccttaactccttcccttctgagctggggaccctgcaggcccccggccagtgcagttgggactggtggtccaggcgccgcgcatcccacaagctaccttcagcgcgccttaccgaaggggtcgccgtcctctgccatggcgttgatgcgcttgttggccaggacctgcacgtgcttcccgctggtgcggctgtagagttggtaggtccggatgaggcggcggctgagctgatccgtcaccaggctctgctccctcacatgctgtgtaaaattaggtgaggactgaacagttacctttaggaaattgaaaaatacacaatacaccattataatgctactccgcccaggggcccgagtggccccatcaccctgcgtccccctcactgccccaagccgccagcaggtgctgggggttcccccaacatgccagcccaggccaccatcccccacccacgcaagtcgggcagacccagcccaggatgaacgagccccagggagaagctggacccacctgttgggagacaccctggggctcccggccagcccggaacagggaagcgagctccctgcccagcgcagggcccctgcccgggccttcctagaggagcagggcgcttttaagtagggaggcagccctccccgacccctgacatttataaagacaaatttacggagcaaatgttgagagtgcagggaacctgggcacccgatcattgggccaaatcggccacaagcctcccccgaggggcgctgagagggtctctgctgcagtcacccggcttcccctggcatcgaacatccatcccctggccgcggctgcccccttcctcggcggctgggtgttccctatgcccccagccggcgaggatgcatgggggacagtgctgggctccgagaccttcgtttctatcctggccactcactcgctgtgtgacctcaggaggggtgctacctctctgtgcctcagctccctcctcggggtggctcggggctgggtttctaaggtgccctcagccctcccgcgccggccgcagagtcagtcccggtgcccccgaccggcgctgcccacccgggtctcacaccggcgcgcccggcccccgcctccgcgcacccctcctcacctgggcttggaggcagaggaccagcaagtgcaacagcctgtgggagacaaaagcgggcgggagagagaggcgcgggtgaggcgaggggcgcggggggcgggtggcggggcagggcggcgcggtactcacaggcagctcagcgcggagcgggggctgcccatggcgcgcggccccggggcaccgagagcccggcgggtcacgccgtcccgcgggccgccgcgggaggacgcgctgagcagggcgcgagcggagagggtgcgggtgcgggaggccggcggcgatcacgacgcggctccgcgggtcccgtggaacgtcgtgctcgccgcgccgcaccgaatcgctgtgcgccgctgccggagccggtggccgctggctgctcgggagccggagcgggcgggagggtcacgggctggcggggtgggtggggaggtgggagggcggggaggggtgggggcggggggcgccgcaccgggcgcgaggggggagcgcggggcgggcggcgggagcccgcagcccccggctgggaactggggcctggatgcagcccggggcgggggcggggcggccggggaggggcggccgacgggttcgggattgagggtctgggctaggggaggggtctggggacccgcgggaggggcgggggcggccggtctgggcgcctccccctatccccggcctgtcccctcgcgcgctccccggtcccggacgcgcggggatgggggcgcctagggctgcaaactctgcgggccgggagaccccgagcctgggcttccccgaccgcctggagcgcccgagtctggcgggtctgggtctccgcctccgggcccagccgcttccgccgccggctacgcagtggtctccgagccacctactgtgtgtcccgccgggcccctgggagcggccgctaaccatgcagcgaatggctgcgcacccggccctcgcgcagtgcgtgccggtgccacccggaccccgctcccctgtttcggccgcgtgccccgtcctgtcggtctctccagtctccttcactctcccgaggaggccctgggagccagaaatgcctccccctccccccatcccattatcactatcaccccttcccctgtgcccctcaccacacacacacacacacacacacacacacacacacacactagcctgaagcttgaggagcaccccgagccacctgtgtggaagagagagtccggaggtccctggcaggacccactgtccccgtacctcagcaggcagcaggggcaaaaaaactctcagtagcttttactgggggaagggacttccatccaggccacccagccctttccccctcaaagccccactcgtttttcatttcacaggtatttacacacctactgtattctaggcaggggctggtcagctgggcttggggcataggagaaggtaggcacttgtctaagcctttcctagccccccaccttgtggcttcccccctgaggtttctggaaaccctgagcccccatgctgcttctgtgggagcagcctgggtggacagagatgctctgggacaggtgccttgtgaggagcaggtgatgccctaccagactgctgtcttcacttacaacctccccttccccagtgaccctccattcccct

SEQ ID NO: 1602 - DNA, 6000 bp, Homo sapiens
gtcctctccatttaggaagttcacgtacttctgtggtttactttgaaagcttttacccgttgactttggtactttcaggcgctaaggcttctatttctgactttggcttttgtgttttcccttttcctggattgttgaaggaggcaagctgtgagacaattgcttctgtcccctgttggagcttggggtgtcaggtctcctgcttctttgagacctgccttggggagacttttagggtttgattttgaccatgttgatttttttcacatactgtatcagccttcatttttggtattctgggcgctatgtgaggtagtgggttacttgttaatagaaaatagttcttcccttaatcatctgctgaggaaggtgtctggggcagttcctttgggtgtcactatggcctcatctatttcctggcagtatctttttttctcagtaaccaagttttcccacttaatgaagaattcttgggttttggagatgatatatgtcttcagaactggcccatactacaagtctagcagttaacctctctcatggtcacagtatttcagtgagacctggtaggggagcaatagtaacccaaaagacccaggcttggccccagcaccacagatagctgggtgtgagacctagggctcacccctctccctgagtctccatttattgttcttcctctttctgatttgttaaatatttttcaatttttaagtgcacaattgaaaatgtgatctcttccaaaacacttcacaacattccaggtacacctaaagttccatgaagggcctcagtttgttcatctctgaatgaaaattgttcttctagacctcttctactctgctttgtctttggtcctgagcttcctaaaagaaaggcaggactggggcctgggtgagataagcagagtatacctgaaccactcccagcattcctgcatgccctcttatccttcaggtccagctgtagttcctctggacgttctcgaagatgctcttcctcttcttcgtcatcatcttcctcttcgtcttcctcatcctcatcatccagttctcgaagccgctcacgatccccatccccccgccggagaagtgacaggaggcggcggtgagcatgtgttcagggagcgccatgcacctgggatgcaggtgcctaagagttgagtcttgaattgtcttatgtttggggggctgatgacaccctcttttgtcaggtacagctcttatcgttcacatgaccattaccaaaggcaaagagtgctacaaaaggagcgtgcaatagtgagtagaggaacagatcatgggaggatggggcttaccccctgagccttgagctcagagagctgcctgcagctgtagccctggctaatggtgtgttgattttttttcatttccaaacataggaagaaagaagggtggtcttcattggaaagatacctggccgcatgactcgatcagagctgaaacagaggttctccgtttttggagagattgaggagtgcaccatccacttccgtgtccaagggtaagcttgggccccaggctcaggatgttctttctatcccattcatctaccttggtgtttctttgtcttgcctccttgctctggtgtgctgagcaatatggggcaccttcatttctgcagtcagagggttggccactgggaatgagaagaaccacctctgtaccttgggatgctgtgtctcctctatggcatgggcccatatagccactccagcccctgcctcactctcctcctactagggacaactacggcttcgtcacttatcgctatgctgaggaggcatttgcagccattgagagtggccacaagctgcggcaggcagatgagcagccctttgatctctgctttgggggccgaaggcagttctgcaagaggagctattctgatcttggtgagtggagggagggcctaaagctttggaatgcttcatcccctccccagaagggttcctaaccctttgtgagtggggctaggcagacttaccttagtttgacatacaaagaacccaagggggctgggcatggtggctcacgcctgtaatcccagcactttgggaggctgaggcaggcaaatcacgaggtcaggagttcgagaccagcctggccaacatgatgaaaccccatctctaccaaaaatagaaaaaattagctagaggtggtggcacgcacctgtaatcccagctactcgggaagctgaggcaggagaattgcttgaacccaggaggcggaggttgcagtgagctgacatcacaacactgcactccagcctgggctacagaacgagactgtctcaaaaaaaaaaaaaaaaaagacccaaggggtgggacgagaggagaaatggggactggggactctcctatctctttgacttaaaattagagcagttttcactccatccgtttttgggatgggagatagctagccatttgcagaccctgtggttgggaagtgtggtcagagaccttgaagtttgtctttacctttatagactccaaccgggaagactttgacccagcacctgtaaagagcaaatttgattctcttgactttgacacattgttgaaacaggcccagaagaacctcaggaggtaaccttgggcccttccctgctatcctttttctcctttggaggtgcccaacctcctccacccccttcccctactctaggggagagagctgctagtgagatgactgttttataaagaaatggaaaaaagtgaaataaaaaatatgttgaatcagattttttaaaaggggtatttgtttttttataacaggtattgaaacaagttaacttgcattcctatgtaagataggaggggctgaggggatccccagtgtttggaacataagtcactatgcagactaataaacatcaactagagagaactcccaactgctgttgtgcgtctttatatggtgctaatgccaaatgtattcacttttcctatctgaacatggtccagggacatgcctctccctggtcaggtgcaaaaatcccactggatttgaaccttggttcctcagatgtattgtctaaaatgagtcatttaggacagtgcttctcaactttaaagggaatttgaatcatctagcgatctttttagaatgtagattctgacaatgggatgatgatactggtccaggaagggattttgataacaaggacctagagaagctcacacttgttccaaagaaaggttttctaaactgcgacaggtgtatacattcatcatgtcagttatgttcatcattttataatagcttgagcacactgcatggcacagcaggtgctcaaatgttttaaataatgcatgcatgtgggtagaacaggaagcgtggggaagagggaactgtggagttttttgtttctgtttttgaatttttttgttttgttttggagatggagtcttgttctgtctcccaggctggagtgcagtggcacgattttggcttactgcaacctctgcctcccgggttcaagtgattctcctgcctcagcttcctgagtagctgggattacaggcacccgccaccatgcctggctaattttttttgtatttttagtagagacagggtttcaccatgttggccagggctgttcttgaactcctgacctcaggtgatccacccaccttagcctcccaaagtgctgagattacaggcatgaaccaccgtgcccagctttgtttttgatttttgagataggatctcactctgtggcccaggctggattgcagtggcaggatcatagctcattgcagctttgacctccctggctcagttgatcctcctgccccagcctcccaagtagctgggaccacaggtgcatgccactacacctggctaattttaaaaattttttgtagagataggggggtttcactgtgttgtccaggctggcctcttaactcctgggctcaagggatcctcccacctaggccttccaaagtgttgagataacagttgtgagccactatgcctggccaattttatataggagaggggggtgtgttcccatgaggatccttatctttcctgagcggcattagtgggaggtagccaaggggtagtgggtaggattgaagggattgctaactgctaatatctggaatgtggcagaacttggaattaacttggtaggtctgagcattgatactggagttactcatgacaaaggcattgatactggagttactcatgacaaaggcagagtgtgaactctgatcccggaggaagaagggttattttcaacaatctcttcagcttgaatagattgttgctgtgtgtgattcaggtttggtgcatgacacctttcctcttcatggagctgacctaaggcggaatataagggagatgggaggggcagcttgggaaatcaacacctcccaccctcacgacggataacccgaaggatcttctgcagcagaggcaggagtctggaggctgggatggtatcagaaagggcctccctgggtattggaggcagtgaagatgaagggcgagaatccattggccgtgccagtacgccatgggggcggttgggagatcttgtagaacaactgttcgagcccgcttgtccactcattactctggaatccgagtcccagcaggggcgcgggaaaccgctgctctgagaaaaggtacctcccccagaaagactgcgcgggaagtcccgagttttcccgccacgccgagggcgtgatccctgacgtcagagctccgcctccacaagctggcggccggtgggctccgcccttaaccaagatggcgatacgcgtgggaccggaaagagtttatagatttcccgtctaccctacctctgaggtgaaggtgggactgccctgtggagcccaccctttccgttatgcgcccgcgcggcgcaatgacgtaacacaggcccgcccactgcccctgttgggttcctgagtcgtgctgcgtcgacaacggtagtgacgcgtattgcctggaggatggcggacgccggcattcgccgcgtggttcccagcgacctgtatcccctcgtgctcggcttcctgcgcgataaccaactctcagaggtggccaataagttcgccaaagcgacaggagctgtgagttccgggcttggggcggggaccgggctgagatgaccacaaggcttcaggccctgacgtgcttaggtttccaggtggggaagtctgggggtccgccagtccagtgtctgcaaggcctttacgccgacccctcggcagtgaccagagaaagcctgcggcctcggtcgcttaccttcctccatgtctgagtagatatcgctgagtcttgttgcttttttcttgtgacctgtgcagcggcggcagcgtgggagcctcgtggccccaagccacatggctggcagagtgcagcggggaggtagagtcttgttccactgaggacgttggttcttcggcatcttctggggggcttttcgttgggtgaggcaaaccgtgatttgaccttagcctcagtcacatttactgggattcaaaagcaagtgaaatttctttagaatgaagtctgggattttcgtttgtaaagaagaaaatgaatgaaagtagaagcagagttttgttttgagttacactgagaattgagagtcatcaacagccctaccaagtaggcatagtagtgggcttggagctttggctaattgaatcaaacaaacctaggtttgggaccaggctctgccactttttagatacgtgacccgggcagtttatttaacctttctgagtctttctacagggatgtcatcatccactttataggatttttgtgagtttcagtaagatgatgtgtaagagtagcaatctcagtgctggtacagaggaatcttgtaaaagtgaaagctgtaccatagttatggcaatttaggatgctccaaacacatgtaagagtaagagaaccaggaatgtgaaaggtttgtaatctacatcaacggacattcctgcatgggaag

SEQ ID NO: 1603 - DNA, 6000 bp, Homo sapiens
aacgattcttctgcctcagcctcccgagtacctgggattacaggcgcctgccaccacacccggctaagagacagggtttctccatgttggccaggctggtcttgaactcctggcctcaggcgatctgcccgccttggcctcccagagtgttgggattataggcgtgagccactgcatcccgcctggaggcttatttctaatgatttggtattataatccacattgcaggaaaaaccttcttgtattagtgtttgtaccctcaagtaatggataagattacattcttagatagtacattgctagagtaaagagagagccttttttttggcagaggggtagagatgggggtcttgctatgttgcttaggctggtcttgaactcctggcatccagtgatcctcctgtctcagcttcccaaagtgctgagataacatgagataacaggcataagccactgtgcccagtcaaaagtgatttttttttttttttgaaatggagtcttgctcttgttgctcaggctggagtgcagtggcgcgatctcctaggttcaagtgattctcctgcttcagccttctaggttcaagcaattctcctgcttcagcctcccaagtagctgggactacagacatctgccatcatgctgggctaatttttgttttagtagagatggggtttcaccatgttggccaggctggtcttgaactcctgacctcttgatctgcctgcctcggcctcccaaagtgctgggattacaagcatgagccaccgtgactggctgattttttgttttgttttgttttaggactttgatcaatatagattggcaggcagggggttagatggttagatggtgccgcaaacataggagtagcccgttttttacatcagaaattgggaaatccacaaatagaatatttttctcctgatttatgcacgtagcaaaagttttatgaagatgtaacatttataccaaatttagtaattatgtatgtaacaggccacatttaatgaaagcataaccaggataaaataatttccttacccagctctttttcttctacagacacagcaggatgccaatgcctcttccctcttagacatctatagcttctggctcaagtaagcctttcctgttccattttggctattttctcccccaagataggctgggctgtgtttcttggtttgggaagattccagtcccctagaaattggtccaatctacctcagcaggtctgccaaggtcccagagcgaaagttacaggcaaatggaccagtggctaagaaagctaagaagaaggcctcatccagtgacagtgaggacagcagcgaggaggaggaggaagttcaagggcctccagcaaagaaggctggtaaggcagagtagcaggtgggcttggtggtgccaggaaaagaatttacagcctgcttgtttcacatggctgattcttactgggacctgtgtgtttgttcagctgtacctgccaagcgagtcggtctgcctcctgggaaggctgcagccaaagcatcagagagtagcagcagtgaagagtccagtgatgatgatgatgaggaggaccaaaagaaacagcctgtccaggtttgcagctttgggaagaaaaaggggtttaaggattagaaaggaagaaacctaaaatcttggcctctagcttgtaaccaaggggtgatggcggcaatacaataggtgattatgaggaagaaaatctggggattttcagggagctgataaaagtatgaggtctggaagggatgtgtgaggttgaggtcaggctccgaatctagaggaaattaaacccattctgcttgaggagtttgggttcttctgggacactattcagggctccaagaataagagagagtgttttcctgggagctttggcaggataaggcaggaacagggccagtgtatcaagtggctgaactttgttgttttttgccctttccgtatcctgtccttagctttcttttgctcttactgctccattaggcccctaaaaataaaaggaacctaggatgccctttgggtacccggaagcttttgctgatttctctccttgtgtcttttctaacagaagggagttaagccccaagccaaggcagccaaagctcctcctaagaaggccaagagctctgattctgattctgactcaagctccgaggatgagccaccaaagaaccagaagccaaagataacacctgtgacagttaaagctcagactaaagcccctcccaaaccaggtactgtttctgttcccaagaggctgggctggggaccagattgctctggggactggagttaaaattgccgatttggcacaggggtgaaatggtactgtttgttgaactggaggtgttgattactggtcttttaattttaaaggttttactaataaataacaagatttcataggagctagtaaatagagaaagttattgcagcaagaaaaaatgtgtattttttttaatggtatccatttggtattttgtgacatttcatagacattttatgttttcacacatcccattccactgtaatcacttaaatatctatttgttgtgcttttcactgccatttttactcttgtatgttcattctatgagacaaatgagaatttttctttttttctgtaacttgtgatgagggttaggttatttctctgaatggaggttgaagtgaaagattttagagggcgtattgagattatttatgtcatcttttctaagaagacagttttattcctgccatgggataggaaaggtatcctttgatgtggtaaaccatggctggcattctcctcgatggctgctctaaagttgaaagaattggtggactcctggccaggcacagtggctcacacctataatcccagcactttgggaggctgaggcgggcggattgcttgaggtcaggagttcaagaccagcctggccaacatggcgaaaccctgtgtctactaaaaatataaaaattagctgggcatggtggtgggcacctgtaatcccagctactccagaggctgaggcgggagagttgcctgaaccactgcacactagcctgtgcaacagagccagagccagactccgtctccaaaaaaaaaaaaaaaaaaaaaaaaaaaaatggtggactcctaagttctctgctcataggaaggaggtttttcatggtcctgacttgccctaatactccttactctttctttttcttgggtattccagctcgagcagcacctaaaatagccaatggtaaagcagccagtagcagcagtagcagcagcagcagcagtagcagtgatgactcagaggaggagaaggcagcagccacccccaagaaggtctggaccataacttctgtcagggcagaggtgaccagggtgtgatgtgtgtgtgtcttccttccctggcaggattggttgggtcagcattttcctgtggtaatcaattttctttctaatgcagactgtacctaaaaagcaagttgtggccaaggccccagtgaaagcagctaccacccctacccggaagagttctagcagtgaggattcctccagtgacgaggaagaggagcaaaaaaaacccatgaaaaataaaccaggtgactggacatggggagcgaagctgtgtgactgtggtcagggcccagctgcagtaaccacatggacctctccatagaggtgcatgagcgtcctcatgacatgacagctagcttctccgagcactagtgatccaggaaagcaaggagaaatctccagtgccttgtgtaacctagactcagaggtgacaccatgttctgttagaactgagtcattgattctggcccatactcaagtgaaggggaattaagcttcatttctacaagaaagtagtatcaaaaaaagttgtagacatatcctaaaaccatcacactatcctttttaaacaggtccctacagttcagtccccccgccttctgctcccccaccaaagaagtctctgggaacccagcctcccaagaaggctgtggagaagcagcagcctgtggaaagcagtgaagacagcagtgatgagtctggtgagtcagagggatgcagcctcccctcagcgtgggtctggaggaggggatgaggaataagggagagagaaagccttccatccttcggttgctttttgcttaaagcaagacagagctaaggctctgtgcgtgtctttgcattctttttattgctgtcctggttgggttgggactctggacccagcataatgctacaggttctcctcagattcaagttctgaagaagagaagaaacccccaactaaggcagtagtctctaaagcaaccactaaaccacctccagcaaagaaagcagcagagagctcttcagacagctcaggtaaggcatatggaggccctcagttcagtgagatgctctcaggcagctgctaagggctcccctgaatccaatttggggagctgttgattccatcccttctgtgtctagactctgacagctctgaggatgatgaagctccttctaagccagctggtaccaccaagaattcttcaaataagccagctgtcaccaccaagtcacctgcagtgaagccagctgcagcccccaagcaacctgtgggcggtggccagaagcttctgacgagaaaggctgacagcagctccagtgaggaagagagcagctccagtgaggaggagaagacaaagaagatggtggccaccactaagcccaaggcgactgccaaagcagctctatctctgcctgccaagcaggctcctcagggtagtagggacagcagctctgattcagacagctccagcagtgaggaggaggaagagaagacatctaagtctgcagttaagaagaagccacagaaggtagcaggaggtgcagccccttccaagccagcctctgcaaagaaaggaaaggctgagagcagcaacagttcttcttctgatgactccagtgaggaagaggaagagaagctcaagggcaagggctctccaagaccacaagcccccaaggccaatggcacctctgcactgactgcccagaatggaaaagcagctaagaacagtgaggaggaggaagaagaaaagaaaaaggcggcagtggtagtttccaaatcaggtctgtacccaatgaacatgccctctgggttttgtccccccaaatcaggatgggatatactctttgagagtagggtagtgagaggaggcccaccactgggcttccagttgtggaaactgggaggaagaacaggaaactggttacctttttttttttttattagagtctcactgtgtcacccagaccagggtgcaatggcatgatcacggcttgtgcagccttaacctcatggactcaggtgatctttccaccccagcctcctgagtagccgggactacaagcatgcaccaccatgtctggctcatttttttaactttttatagagacagaatctcactatattgcccaggctgatctgaatttcctgggctcaagcgatcctcctaccttggactcccaaaatgctggggttacagttgtgagccactgtactcggcctgagtctggctttttgttttgtaggttcattaaagaagcggaagcagaatgaggctgccaaggaggcagagactcctcaggccaagaagataaagcttcagacccctaacacatttccaaaaaggaagaaagtaagttgtctcactttcttctcaggagccagctctttaaaagtagaaaaatctaggatcatcttgacagctctgcctggcgtgacctggtacatgtgcccatgtgtatcactcaggagaactgttacatgaccactctgtctttaatttcctacttcattcttctgtagggagaaaaaagggcatcatccccattccgaagggtcagggaggaggaaattgaggtggattcacgagttgcggacaactcctttgatgccaaggtgagagagagatctgtgccattcttgggag

SEQ ID NO: 1604 - DNA, 6000 bp, Homo sapiens
tcacaattgtcttatgattgggaaaggctgtgaacttaatggggctctttccctgctttctttctcctgcattcttttgattatactcttctgcccataaataaagtgtagcaacatgttaagctatggagttaacatagctagtgatacattattctcattatatgtaataagttgtctcaggtatttcaaataatgtttcctatacatctaccatcttgaaaataataaaaacaaaatgaccccccaaatgttaaacaacaaggactacctgagaccgcacatgtaaaaatgtggcagattttcagcaaatactaataggaaaatgacttaagtttctcctacttcaccttttggcagaaatactggcataataaaggacatgttttcccagagggggaaaaaaaagacaagtcaattctttaaatcttgaaactaaaaatgcatcactgctgtaatgcatttcgaaacatactaccaggaaagagaaagaaaaaaattaagacgcattagtgtaagtgatattaaagaaaatggccggagatggaactcctgcctagcaattcaagaagcaaaggagctggtgggatagacaggttgttccttctgcattgctgatgaaaacaggaaattgaatttctatatatttttcctttttacaactaagaaaaaggcagaagaagcacaaagagcctggctaaagacagaaatcgtagtgctctctgaaaatcaacatcaagaacaaaaagtcctactcaattatctgcagtaactaactagagaaaactccccatcttttctttatttaggaatatctttgttactttgatagagatattcagtcattcatccaatcacccatcaatccaatgaaaaaacatttattgagcacacagaggtgccagaccctaggtatactgtgtgtgtgtggagagaagtgggtgaagtgagactaaaggaatatcatctttcttaaattttttttcccaacaccactaaacctgtgggagaatatcatctttttccacaaggatttaatagtctagtgagggagacaaaaagatcctctcaaaaatgaagtatctgggctgggtgtggtggctcatgcttgtaatcccagcactttgggaggccaaggcgggtggatcatttgaggtcaggagttcaggacaagtctggccaatatggtgaaaccccatctctactaaaaatacaaaaattaggccgggcgcggtggctgacgcctgtaataccagcactttgggaggccgaggtgggcggatcacgaggtcaggagatcgagaccatcctggctaacacggtgaaaccccatctctactaaaaatacaaaaaattagccgggcgaggtgacgggcgcctgtagtcccagctactcgggaggctgaggcaggagaatggcgtgaacccgggaggcggagcttgcagtgagccgagatcgcgccactgcactccagcctgggcgacagtgagactccgtctcaaaaacaaacaaacaaacaaacaaacaaacaaacaaacaaaaattagccaggcgtggtggtgcacatctgtaatcccagctacttgggagtctaggctggagaatctcttgaacctggaggcggaggctgcagtgagctgagatcgcacaattgcactccagcctgggtgacaaagcgagatcctgttccctccacccccccacaccaaaaaaagaggcgtctctgccaggcacggtggctcaggcctataatcccagcactttgggaggccaaggtaggagaatcgcaacagcccaggagtttgagaccagcctggacaacatggtgaaacccttcctacaaaaaatacaaaaattagccaggggtggtggcgcgtgcctgcagccccagctactcgggaggcttaagcgggaggatcacttgagcccaggaggttgaggctgcagtgagctgtgatcgcgccactgcatttcagactcagcaacagagcgagaccctgtctccaaaaaaaaaaaagaaaaaaaaaatgagctgtctcattgagctcaatcctgcccctttctaagggggaataataaaaacaaaatacccatggagagaaggaaaatttaatgaaaacaacaacaaaaatatattggaaaaagcaagcaacttggaactggatcttagtctgatgactggctcctcaattcctaaactggatggtttgaaatctgttatttaacatccctgcatacactggggatagtaattcctatctacctaacagagctgaagcttaaacgagaacattgtaatatgcctaaggtcccaagagctgaatcaacaaagggaatctgacagagtcagcttacaacagagggaactggtagttttgcctcaatggagggacctacaagggacacagacagggatcaatctctgtgggaccaaagctttgaatcgaaggcagaaatgcagtcgttttacaattttctcctttccccccaaaataagagcagtatttagattctttctattggtcaatattgatgcttctgcatggtggtgctggcaaaagggatgacggataaagtactggatttagggcacctctgctatgtgaccttgggctcacgttacgtcttcgcgcttcagttttctcatcggtaacacgaagatcaaagttccttttaaactatgcgtccagtttttgtgaggatccaactcgaatgtatgtgaaaacgccctggaagcgctagagcgccaggcaaatattaagtttggtaattttttccccgtaagaactaggcgttccaaagaggaggacaacctctctgcttcctttgtcactctcctttcttctcgacctttaccaactttgtaatttataatcacagtaatagctgacatcctacagcggtttctggcaccagattctcgggccccacccagatccacaccaccaagccgcagcgccggctgagaccgaaggaaaacttagccgttctccacccgcgggcgggcactcgcctctaggccccaccacccagagtcccggaagccaatccccacagccctggagcactgccccgccccttcaagagggaaaacaatatggcggcaaggaagaatggcaggggcgtgagccaatcaccgcagaggcctagcctcatccggcaaggctaagaggcggtatcattggctaagatggacagccagagcaaccaatagagcgatcggaaatgggggagagggcgggcgacgggaatctcacacagcggttaaggcccctagagccaagggcccaaggactggcttggactataactctttcctttatccactccagagttctccatcccacttttgctggctggccgccttgcctgcggactatgtgataaggggaggaaggaggcggcggtggctgaacgcgcctgacaggccgggccagtgacaaagagccggcggctcaggctgaaccccgggaagcgatcctttcgaggaggagagcccaagtccccttatagataggaaagacgcaactcacgttgtcgatcacgacaggctggttggcgatcacatcgtaggactccatggcagaggaatctctccttctggggaaggaactgcccagccgggtccgccgctagcgccactgacacgcatgcgcagtctagccgccggttcagggcggcgagggagcggcccgacctcgcctctgaagaactacaatccccagcaagctttgcgcctgggttagcgatctagcttgctttgttgcccgcctagtttaagattgggagtcgcatttccaatgcgcagtaccctgggatttgtggtctccctagattaaacagccagagacacaggttgatggtcatgttgcatgcctggatctgtagtccctttgaaggagttcgcagtgcatgctgaggtatgtagtcttctcgagtacttgtctgtagttcggtttggattggtcgtaattcatggatgtttggattttgcagatcagccctgccactccccccgacgttcccttagacaatataaggttctcatgtttttatttgggtctgtaagactttaataaacatctcctagcacctcacactctaacaaaaaggaaatgttaacacacgtacgcgagaggacatattcctacaacaaaggaaaacaatttaaattgcataaaattagctttaagtttaaaaacctgtacattgtcgttgccttttgcattttctttttttctgcataacaggctaacattgatccgaagattggcaattggaactactggtataggtaatcttttggtcattaaaacatcatctaagggtttcagaaactgctcgagtatctctttaattttcataacgagctagaattgacactgatggttgagaaaatggaggtgaagagaggttatgtgtcactgctttcaaatgagcccagtgcatttttttctctggattatgttctcccccagcccccttgaaatttcagggacctttttgtcaatagccctagaaaacattagatttattatcatctattaatactaacgccccatggatgaatgaatcaatccattgtcagatttatgtttaaatcctagttagcagcgcgtcagcaaaacagtaacaaatcctttgttggcgcacttctcgctgctttcgtgggaccttagcacctcagagggtgctcagcatctctaaacttgggttcctcctaacactagggggagaccaagagccttgggacactcccaacacagggaggggaggcggggcctattgtcaagtcacaccttccctgcctgtgactggcacagacattagccaatgggtgcttggatagggtgcgccggcgccccgccccccttagcgccccgccgccccgaggcaccctctggcagactcggcggcggcgacagcctgggcggacagtgcgccgtgcgcaggcgcggagctagacctcgctgcagcccccatcgcctcggggagtctcacccaccgagtccgcccgctggcccgtcagtgctctccccgtcgtttgccctctccagttcccccagtgcctgccctacgcaccccgatggcggagctgcggcctagcggcgcccccggccccaccgcgcccccggcccctggcccgactgcccccccggccttcgcttcgctctttcccccgggactgcacgccatctacggagagtgccgccgcctttaccctgaccagccgaacccgctccaggttaccgctatcgtcaagtactggtatgctctgggccgcggggagacggacaggcgcgggctggaaagggttaaagcgccgagggcgaagtaatttgtgggaggtgggaggaggggtagagaatggttaaagcactcagaaggagggcttcttgctgcgagggaaggagttaaggctcaagttgggaatggggacaaaggggttaacggagcccgtgggtactgaggggttaaccgggattaggagaatagagtgaggactgggggtgtgtgtaggagcagaggggggaacggcaggagcgagggaactgtaaacgtggtgaaaagagggggcgcctgtagggggtcattagtgggcgaggggaagccaagcgggggcggccgaagtgggatgggagaggcgaggcggggcctggggagcatttgagagggctttggaggagcgaagccgaagaagctcagagggcacgagactgcatagaatggggggttcggggggcccagggctctcctgtggtgggtaggagggccaaagatgagggcctggtgcttgtggagagaggaggaggtctccttttgataccttcccgattagctcagacgtcgtatcagggcaaagcttttgcttttgaagtttgacggagcagctcttcctgataaactttttgcttactctgcactgttctctttctccgtgcagagcttcctcctagctctgcagttgcttcgctttagggcattaggtagagagaacc

SEQ ID NO: 1605 - DNA, 6000 bp, Homo sapiens
gtcaataagaaaagtatatttatggaggactgatgtctttcagaaagctgttcctgtcacaaatgcctatagcagtggtaatcggcttatgaaggcaggtgatgaaaccctgtacagatgcgtacatctccccattaacccttggatcatcaggtattattgtcactttattacctggacctgttattagctgaagcaaggtgatcaagccgggcacttcagaaaaatgtcagaacagaagagtgttcctcagggtttcaaggggagagagtatgtgtctctccaagtcccttcacagagtctttggggggatagaggatgcctgtgaagtgggcgcttttgcctaacccttcctcttgctaaatttgaaaactcttgggtgtccaattttttaacgttcctatgttggctaagggagtagctttcctcaaggtccaaataaggaaccatcacccacgcagaacaaaaagcaaacagaaaatctcacagcggaatcaggactttggcttctaaacatttccccattttatagcttccttatgttttcagagtctttttttggcttcctttagcacactcccggcatagataagtccaacacagtggggtaacagatcatccatcttggagcccagatctttaaagaaaaatcacacaggaacacaaatacacacacccacacatgtacatatcactgtcaagggtaacttagcagaatcttgccgagtgactgggggagctgaatatggttgtcaacatgtattccccacttcgggtaaatctgacagactagccttgtttttctcaaattccagagccaagctttcaatatggtttgtcttctttgctggtgtgcgtgaatctctgagccataactggggcgtgtggtgaaacgatggaatcacggacttttaaatattaacaggcaacttaaaaaagcccattccaaccacctcatccaccaggtgagacaagacgaaggggccgtgggtgacacagcctgtggcaggcctatttctgcagtcccctgtcaggcacattcctgtatttcaatgggcacctaacacttcaccatatctcccacgtggggaaccaacacttaaaaggtgatttgtgtaaacagaaacctccttttcatgctcattgatagggataaacaaggaagcacctctggaagaggtaacactactcacttaagttttaaggtatcagcatgtatccaaagagaaggatttaatcaagggagggctgaaggagaggagaaaacagaagagaagcagcagaagggcagtggatgaagagggcgaggtcaaagtcagagaggcctagggacagctacttacagttcaggacctggactggcgccaggaatggactccaaggggtgagggcccagcttctccctgccttcctcccaaaatatgcagagacctaactggattccaagggatgagggcacagcttctcccccctcccacccatttcccaacatgcagagcccatggtggcaaaatcccctggctcaggctaaagtcagaactggtctggtttcctgtgtttttcaaatctctgccatttgggcagaacgcttggtcctataaaccaggagtcatcagtatccacagagaagttgcctcagcacttggacccaagtcaactgtgtttaaaatttcacaccaaatctataaattacacattcacattgtgggccagcctaccttttttttcaaatagtattcaaggtatttttctttttttttcttttctttttttttttttttttgagacggagtctcgctctgttggccaggctggagtgcagtggcgccatcacggctcactgcaagctccgcctcccgggttcacgccattctcctgcctcagccttccgagtagctgggactacaggcacccgccaccacgcctggttaattttttgtatttttagtagagacggtgtttcaccgtgttagccaggatggtctcgatctcctgacctcgtgatccgcccgccttggcctcccaaagtgctgggattacaggcatgagccactgcgcccggctattcaaggtatttttcaataccttgctgcctggctactgcagtgccaattctgccattcccccccgctcctcaattcaggcatcacctgagggacttgcagagcatcagggatctggcccctctgagatcttgctggtctactcaagcctttgtacagcaccaggcaacgaaattaaatgtgggacatgcactatcacagaataactttttaattgcttaattaaatcagagatttaaggaaggagagattcaaaagagttccctttgaatgagaaaaataaggatatgccaaaatggataaagttactaatcatgggaacaaagcccttagtatttacatatgataaaaatgcaggccagtatagtaaaatcagtaagtacattctttaaaatttcaattcagtatattcctgagattttattatacaggtagtactataaagaacatagaagacctcattatccaacttaattcagaccagggtttgattaaaaaaataaaaaacaaaaaactaccacacaggacaaagaaattgccataaaattgagttcctataaatgtgttccagtttaagtaactaagtccctaaaatgagccttagtaaagtctacgctgcatatagacagacttaggcacatcaagtatacaggtgacaattagcaagtgtataaagctatggtcatttcgctaaatgtgtaaatctaaaggcaaccaagtaaaagacctaaaaaaggaaactgttaagtccatttgtacatggatttaacagtgaagcatttcattcttcatgttttcacttggtgtcttgaaataatcccctttctgtctccactctccctcttagacactgcacctgccttatttatttatgaagtctgaaggttagtcctacctgctgagactaattagccctgtgctttgtatcctatgcaatcctgtctgattaaatgtacacatttgttttacttcttttcaggctccttctcactctacttctgatattctgattaatatcaaagttgggagttacagtgattctcctctgcctcccccccaacccatttttattttgcctgcatcttattctttagtgtgcaaatgtggttgtgatttttttccagtgcaggggaattcgttggccttgtcaatctcggtatcattatttttagtagtctttctgagactttagcctataaaacagttttgctgaaaccccaaactctctaaatattacatggcaaatttgctttcttttggaaacctcggtgctgatgggccagctgaagtgcaggtgagctttttcagggaagggtgggacaacagtacatcctggactctagactaatactactcctaagaggcaatttgctaaatcctactgatttatttttttcttttttctctttttcatgttgtagtgtccagtctacttcttactgggtatttgcaaaaatgaattttcttgctctatcacccaggaacattgtgttttgggagctgggtctttcctctttaacataattccattccccattttgtagcaaatcagtctgctcctcctctaatacctaaaagtcaacaaatacctgcctcaagccccaggtttcccatcttctcccgaaggtcttctagcatcggtttggttagcaatttcctgccagagccacctacatcttgattattttggtcagtctttcggggatttcatttcagacccccttcgagaaacactgtagcccaactgatcccaggggttggtgaactttcagttttattttccctgacggtgttaacgcccaaacttttcacctcctaagtcaaaaaggactttgactctagctcatttcctactacctccaacgtcagttaaaaaaaaaaaaaaaaaagcaaaacaccactctacatttaaaagaatcatatatttttccttaaggatacttttaatgtttctgacatttagcatttgttttttgcataaaaagtcgttttggcatatccatcctagtgggacttaacatttcatgaaatgattcactactaataaacaaaaaagggaggagggaggcctcatgggttaatagtttctttcattgtagatgaccaggaactttgaccagccccttcacttccccaagctctctgaaagtggagggttgatctttccttttgaccacttttgtcgcatcccgtctaagggtggctgatttcactgctgaattaaccaccaagcacccccccaccccctcccccagccaccactttctcaaatactacccttccttttccccctcccttaagacttatttctaatatttctaaagtgcactgttttgggcctctccccatccccgccccccaagtgggctttccttccgccttcctcggctcggattcctgacttggtcgccacccccttctcctcctctcccaccccgcattgtctttctgaaaccgccccctcccggagcaagtccctgcaccctcgcccagaatcccgggctcgcacacactccgcgcaggccgctccccctgcacactcctccctccgtctccccccggcttccccgcccctctcttcctccttctttccctcctccctctcccggcgcccgaaaggatcattgttagccgcccccgccccgcccaccccggctgtttatttatgcacacgtcactgggccggccccgccctccggcatctcattaaggcagtgtgttcctctcgccctgtcaataatctccgctcccagactactccgttcctccggatttcgatccccctttttctatctgtcaatcagcgccgcctttgaactgaaaagctctcagtctaacttcaactcactcaaatccgagcggcacgagcacctcctgtatcttcggcttccccccccctttgctctttatatctgacttcttgttgttgttggtgttttttttttttttaccccccttttttatttattatttttttgcacattgatcggatccttgggaacgagagaaaaaagaaacccaaactcacgcgtgcagaagatctccccccccttcccctcccctcctccctcttttcccctccccaggagaaaaagacccccaagcagaaaaaagttcaccttggactcgtctttttcttgcaatattttttgggggggcaaaactttttgggggtgattttttttggcttttcttcctccttcatttttcttccaaaattgctgctggtgggtgaaaaaaaaatgccgcagctgaacggcggtggaggggatgacctaggcgccaacgacgaactgatttccttcaaagacgagggcgaacaggaggagaagagctccgaaaactcctcggcagagagggatttagctgatgtcaaatcgtctctagtcaatgaatcagaaacgaatcaaaacagctcctccgattccgaggtaggaaaagcccctcgggctggtggggttttttatctgtttcctgggcttggcaaatgttgctgaaaggggagaaatcggggctgggggcggcggcggggcccggcgggcggcgtgtgcgtacggtgccaccattgcaaaaacttgtaaccctgtttttttctacccccccctcgacctcgccgattctttttctcccccttctcccccttctgcgtggcgtttgcccctcgccctccccacctccacccctctgggaaggcggaaagacggcctccgcctcgctccgaaagtttccgagacaaatcccgggaaagtttggaagaaggtgagtacgccccgcgcgccccgcagccgcccggagccgccccccgggccggccgccccgcgcgccccggccccgcgcccggctcggcctggccctgcgccggcccggtcggggcgcccggcccctcggggcactttctaaaaagtttctcctcactctctcccgctccgcgcggccg

SEQ ID NO: 1606 - DNA, 6000 bp, Homo sapiens
actcccggcatagataagtccaacacagtggggtaacagatcatccatcttggagcccagatctttaaagaaaaatcacacaggaacacaaatacacacacccacacatgtacatatcactgtcaagggtaacttagcagaatcttgccgagtgactgggggagctgaatatggttgtcaacatgtattccccacttcgggtaaatctgacagactagccttgtttttctcaaattccagagccaagctttcaatatggtttgtcttctttgctggtgtgcgtgaatctctgagccataactggggcgtgtggtgaaacgatggaatcacggacttttaaatattaacaggcaacttaaaaaagcccattccaaccacctcatccaccaggtgagacaagacgaaggggccgtgggtgacacagcctgtggcaggcctatttctgcagtcccctgtcaggcacattcctgtatttcaatgggcacctaacacttcaccatatctcccacgtggggaaccaacacttaaaaggtgatttgtgtaaacagaaacctccttttcatgctcattgatagggataaacaaggaagcacctctggaagaggtaacactactcacttaagttttaaggtatcagcatgtatccaaagagaaggatttaatcaagggagggctgaaggagaggagaaaacagaagagaagcagcagaagggcagtggatgaagagggcgaggtcaaagtcagagaggcctagggacagctacttacagttcaggacctggactggcgccaggaatggactccaaggggtgagggcccagcttctccctgccttcctcccaaaatatgcagagacctaactggattccaagggatgagggcacagcttctcccccctcccacccatttcccaacatgcagagcccatggtggcaaaatcccctggctcaggctaaagtcagaactggtctggtttcctgtgtttttcaaatctctgccatttgggcagaacgcttggtcctataaaccaggagtcatcagtatccacagagaagttgcctcagcacttggacccaagtcaactgtgtttaaaatttcacaccaaatctataaattacacattcacattgtgggccagcctaccttttttttcaaatagtattcaaggtatttttctttttttttcttttctttttttttttttttttgagacggagtctcgctctgttggccaggctggagtgcagtggcgccatcacggctcactgcaagctccgcctcccgggttcacgccattctcctgcctcagccttccgagtagctgggactacaggcacccgccaccacgcctggttaattttttgtatttttagtagagacggtgtttcaccgtgttagccaggatggtctcgatctcctgacctcgtgatccgcccgccttggcctcccaaagtgctgggattacaggcatgagccactgcgcccggctattcaaggtatttttcaataccttgctgcctggctactgcagtgccaattctgccattcccccccgctcctcaattcaggcatcacctgagggacttgcagagcatcagggatctggcccctctgagatcttgctggtctactcaagcctttgtacagcaccaggcaacgaaattaaatgtgggacatgcactatcacagaataactttttaattgcttaattaaatcagagatttaaggaaggagagattcaaaagagttccctttgaatgagaaaaataaggatatgccaaaatggataaagttactaatcatgggaacaaagcccttagtatttacatatgataaaaatgcaggccagtatagtaaaatcagtaagtacattctttaaaatttcaattcagtatattcctgagattttattatacaggtagtactataaagaacatagaagacctcattatccaacttaattcagaccagggtttgattaaaaaaataaaaaacaaaaaactaccacacaggacaaagaaattgccataaaattgagttcctataaatgtgttccagtttaagtaactaagtccctaaaatgagccttagtaaagtctacgctgcatatagacagacttaggcacatcaagtatacaggtgacaattagcaagtgtataaagctatggtcatttcgctaaatgtgtaaatctaaaggcaaccaagtaaaagacctaaaaaaggaaactgttaagtccatttgtacatggatttaacagtgaagcatttcattcttcatgttttcacttggtgtcttgaaataatcccctttctgtctccactctccctcttagacactgcacctgccttatttatttatgaagtctgaaggttagtcctacctgctgagactaattagccctgtgctttgtatcctatgcaatcctgtctgattaaatgtacacatttgttttacttcttttcaggctccttctcactctacttctgatattctgattaatatcaaagttgggagttacagtgattctcctctgcctcccccccaacccatttttattttgcctgcatcttattctttagtgtgcaaatgtggttgtgatttttttccagtgcaggggaattcgttggccttgtcaatctcggtatcattatttttagtagtctttctgagactttagcctataaaacagttttgctgaaaccccaaactctctaaatattacatggcaaatttgctttcttttggaaacctcggtgctgatgggccagctgaagtgcaggtgagctttttcagggaagggtgggacaacagtacatcctggactctagactaatactactcctaagaggcaatttgctaaatcctactgatttatttttttcttttttctctttttcatgttgtagtgtccagtctacttcttactgggtatttgcaaaaatgaattttcttgctctatcacccaggaacattgtgttttgggagctgggtctttcctctttaacataattccattccccattttgtagcaaatcagtctgctcctcctctaatacctaaaagtcaacaaatacctgcctcaagccccaggtttcccatcttctcccgaaggtcttctagcatcggtttggttagcaatttcctgccagagccacctacatcttgattattttggtcagtctttcggggatttcatttcagacccccttcgagaaacactgtagcccaactgatcccaggggttggtgaactttcagttttattttccctgacggtgttaacgcccaaacttttcacctcctaagtcaaaaaggactttgactctagctcatttcctactacctccaacgtcagttaaaaaaaaaaaaaaaaaagcaaaacaccactctacatttaaaagaatcatatatttttccttaaggatacttttaatgtttctgacatttagcatttgttttttgcataaaaagtcgttttggcatatccatcctagtgggacttaacatttcatgaaatgattcactactaataaacaaaaaagggaggagggaggcctcatgggttaatagtttctttcattgtagatgaccaggaactttgaccagccccttcacttccccaagctctctgaaagtggagggttgatctttccttttgaccacttttgtcgcatcccgtctaagggtggctgatttcactgctgaattaaccaccaagcacccccccaccccctcccccagccaccactttctcaaatactacccttccttttccccctcccttaagacttatttctaatatttctaaagtgcactgttttgggcctctccccatccccgccccccaagtgggctttccttccgccttcctcggctcggattcctgacttggtcgccacccccttctcctcctctcccaccccgcattgtctttctgaaaccgccccctcccggagcaagtccctgcaccctcgcccagaatcccgggctcgcacacactccgcgcaggccgctccccctgcacactcctccctccgtctccccccggcttccccgcccctctcttcctccttctttccctcctccctctcccggcgcccgaaaggatcattgttagccgcccccgccccgcccaccccggctgtttatttatgcacacgtcactgggccggccccgccctccggcatctcattaaggcagtgtgttcctctcgccctgtcaataatctccgctcccagactactccgttcctccggatttcgatccccctttttctatctgtcaatcagcgccgcctttgaactgaaaagctctcagtctaacttcaactcactcaaatccgagcggcacgagcacctcctgtatcttcggcttccccccccctttgctctttatatctgacttcttgttgttgttggtgttttttttttttttaccccccttttttatttattatttttttgcacattgatcggatccttgggaacgagagaaaaaagaaacccaaactcacgcgtgcagaagatctccccccccttcccctcccctcctccctcttttcccctccccaggagaaaaagacccccaagcagaaaaaagttcaccttggactcgtctttttcttgcaatattttttgggggggcaaaactttttgggggtgattttttttggcttttcttcctccttcatttttcttccaaaattgctgctggtgggtgaaaaaaaaatgccgcagctgaacggcggtggaggggatgacctaggcgccaacgacgaactgatttccttcaaagacgagggcgaacaggaggagaagagctccgaaaactcctcggcagagagggatttagctgatgtcaaatcgtctctagtcaatgaatcagaaacgaatcaaaacagctcctccgattccgaggtaggaaaagcccctcgggctggtggggttttttatctgtttcctgggcttggcaaatgttgctgaaaggggagaaatcggggctgggggcggcggcggggcccggcgggcggcgtgtgcgtacggtgccaccattgcaaaaacttgtaaccctgtttttttctacccccccctcgacctcgccgattctttttctcccccttctcccccttctgcgtggcgtttgcccctcgccctccccacctccacccctctgggaaggcggaaagacggcctccgcctcgctccgaaagtttccgagacaaatcccgggaaagtttggaagaaggtgagtacgccccgcgcgccccgcagccgcccggagccgccccccgggccggccgccccgcgcgccccggccccgcgcccggctcggcctggccctgcgccggcccggtcggggcgcccggcccctcggggcactttctaaaaagtttctcctcactctctcccgctccgcgcggccgccgctgtcccctcgccgccccgccatgttagcggccaagaggcaagatggagggctctttaaggggccaccgtatcccggctaccccttcatcatgatccccgacctgacgagcccctacctccccaacggatcgctctcgcccaccgcccgaaccgtaagtgcctccgcgcccggcccccgcccgctgcccgcccgcccgcgccgcccgccgggccccgcatgcggcccctgccctgccccctccccgcctccccctccccgcctcctcccctccctccctcccctcccccgctcgtggcccaggaggcccgaaactctccaaacttttctgccttttgtggactggatttgtttgcacttcgccacgttcttgctttcagtttgctgcctcgtgatgttggggagacctctctgtccaagcagggctttgttggtggggaggggggggaatccgaagaactttcctttgcgttctggttccccctccccctttggtggtggtgtttgtttcttcaccctgggaagatgactctgtggctcttcctttgctctctctccctctctctccttctc

SEQ ID NO: 1607 - DNA, 6000 bp, Homo sapiens
aatacaccaatcagcaccctgtgtctagctcaaggtttgtaaacacaccaatcagcaccctgtgtctagctcagggtttgtgaatgcaccaattgacactctgtatctagctactctggtggggacttggagagcctttgtgtccacactctgtatctagctaatctattggggacttggagaacctttgtgtctagctcagggattgtaaacgcaccaatcagtgccctgtcaaaacagaccactcggctctctgtaaaatggaccaatcagcaggatgggggtggggccagataagagaataaaagcaggctgccggagcctgcagtggcaacccgcccccgtccctttcaacactgtggaagctttgttttttcactctttgcaatatatcttgctgctgctcactctttgggtctacactgcttttatgagctataacactcactgtgaaggtctgcagcttcactcctgagccagcgagaccatgatcccagcagaaggaagaaactccgaacacatccgaacatcagaaggaacaaactccacacgtgccaccttaagagctgcaacactcactgcgagggtctgcagcttcattcttgaagtcagtgagaccaagaacccaccaattctggacacactgggattacaggtgcatgccgccacgtccagctaatttttgtatttttagtagagacagggtttcaacacgttggccaggctggttttgaactcctgacctcaggtgatccacccgccttggcctcccaaagtgttgggattacagatatcagacactgcctggccggttatgtctttcttgattctaatcagtatgtacataattttgcatagatatattgattagggaggcatttatgaagggcaggtagtggagaggctggggtaaggttaggtaataggagttctaggggattccatactttggcctataatggaattgtagcctacccagcactttaaacattcccgattgactccaatatttgttcttctagccactccttcccctctcagccaatgtacttagggagaagctgatcccatgctaagttccaggaatgggctttattttccaggaatgaatccataccctttccagtaaagggctctggaatccaggtctaatgagtccataccctttccagtaaagggctctggaatccaggtctaagtgccatgtgattggtttaggaatggaccaatgagacactgtgaggaagtttcctgagggcttctgggaattttctcataatagaaagctaccagaattcacaggcccttttcatcttgacttcttgtccatagacctgaggccaggggctgtggcaggcattttgtaggcagcctaagggtgaaacatgcacaagagagaacaagacaacaccacagagaagcagagctcagtaatggctgagccctgcctcacctccaccattcctagaccttctcagtctcttagccaatgaacagccttgattttaaagcaatttttatttgagtttttgcttctggaagccaaaacaaacattttagcctatggaatcccaatttatacttaacgtttttatttgttaatctttaagtttcagaattcttttctgattataaaaataatacatacttattgtagagaaccaagaaaacattgaaagatataaagaagaacattaagaccatccataatctcactatccctagataactgctattgagttttgagttagtttcctctttatgtatccaaacttacacagaaattttacacatatatttatcctgctttaatgaaattcacagcctagtgggaaatagaaacagacaaacaaaaaccgaacaaatagatgaatatctgcgactatggaacgtcatagtaactactaaccttgtgttcactgtttttgggtaaatgttgctaataatgttataccccatctccacaacccagaacaaatcaaagatttatgttaataactattaaaatataatatgctctaaagtataacaatgtctcataatgccacaaaatcaaccagttaccaatatgttcatttggtttcccttcagtaggatttcttatgggaaattgtcccctgtcagtgactggtttcgctcaactgtcattaggtcttgtcacagtagtttaattacagcaaaaatggctgttatattgatcattttgacaacacacacacaaaaggttcagtattcatcagtgtgctgggtaaaaacccttggagcagggccctcaagaggatggaagttacattgctatgattagtaccaagcccatcagttctaaatgttttctaatttctattatgattttatgacccatgagttaattggaatagtggaaatatggggcttgccagttaccttttggttattgatttttaacttacctatatagtgaccagaaaatgtggttactatgatataaatccttagatatgtggagacttgctttatgacacagtatgttcaatttttgtaaatgtttagcatattcttgataggagtgtgtattctatggtcattaaggcaatattctacacatatatattagattaagcttggtaattgtgttactcaactcttccagtaccttaaagatttttttggtcccctcggtctatgtattagtttcctgtaatcagttgcttaacaaattatcacaataggtggcttaaaaaaaccgacatgaattctcagttctggcatctagaagtctgaaatctacatgttggcagggtcacaatccctccagaggctcaagaggaaaatttgtctcttccagctttgggtgctgtcagcattccttgacttgggaatgccatcactccaatctctgcttctgtggttacattaccttctcttctcttctacctctcttttataaagacacctatcattggattgatggcccacctggataatccaggatgatcttctcatctcaagaactttaattacatctgcaaacgccgtttttccaaataaggtcatactcgcaagttctaggaattaggatatggacatatcttgtgggaggctgtattcaactcactgcaattagagagggagtgaaaaatcacctactctgatggtagatttctttgtcttcttatacttctgttcattttcgcttcatatattttgtggccatatagtcgctatgatataaatccttagatatgtaaagacttgctttatgacacagtatgttagagacacttttttgactctatcttccctgtatattggactttttttttaaatgtaaagacccttctttatcccatcgcactcacccagccatctacctagagtctgttgatgataaaccattagttgtttgaaacagaatttgccttccttctgcctctctttttgccacacatgtaattctaaggttttatgttttccccttcagcataccacttaattctctttttttttttggagacagtctcactctgtcacccaggctggagtgcagttgcgcgatctcggctcactgcagccttgacctccagggctcaagtgatccacctaagcctccagagtagctgggaccacaggcacacgccaccatgccaggctaattttgtttttagaggcgtggtcttgttatgctggtctggctggtctcgaattcctgggcacaagcgggcctcccatctctgtctcctcaagtggttgaattacaggcgtgagccactgcgcccagctcgcattttttttttttttttgagatggagtctcgctctgttgcccaggctggagtgcagtggcgcgatttcggctcactgcaacctctgcctcccgggttcaagcaattctgcctcagcctcccgagcagctagctgggacaacaggcacgtgccaccacgcccggctaacttttttgtatttttagtagaaacggggtttcccgtgttagccagaatagtgtcgatttcctgacctcgtgatccgcccgcctcagcctcccaaagtgctgggattacaggagtaagccaccgcgcccggcctgagccggcatttttaaaagttgggttgctggccttagtgcatacaaacgtaaaggaattttaaaaacacatgagtaactcaaacgcatttcttttttgcgccatcctgctatgtgtgattcggtttttattctcgattttgtgcgtgtgtgtcgcgacggctggggaccgacccaagagcagtcggaccacgggccgcccagggcggtctcatccgtttataacctgcgaccccggggcctcttgtggtcccgtacctccgtcccaagcaaaagccggggctctcaggcactcagaggtgcgaaggccccgtagacttggaggacgcgaggaaaacacctccaatcactctggccagtccacagctactgccaagactgctccgcgcgcgtcctcaggaaccggcgagggcctcgtcgtcatggtaaccagattgcgaacgcgcgtgcgcaagacacacctttgtcacgtgaggccgggcagggggcggggccggcgaatgcccgtcccgacccgtcgcgcctcccctgttagctccctgccagccgaggcggggcgaacctctgccctgttgcgtgggagtgactcacagctcccgccccttttggctccgctttctcgcggccagtccctcgcaccacgtgccctcctggccgcgcccccagctgccctttccaactgcctgttggaagccgctgtaaaacgtcgtgaggagcgccgctgctttacggctgcctctcccagactagagccccggagcgcccaccgccgtcagccgcgtcttcaagctagtcggccccgcggagagcgagagaccctgcgcaccgcagccctctccgctgcgcccattcctgccgccggcgatgtaactcggggaggcagcggtgcccgctggcccggggttgagacaggcggcaggtgcctgtgaggcgggcgggtgccgggggccagcaggatggaggaaagcatggaagaggaggaggggggcagctacgaggcgatgatggacgaccagaaccacaacaactgggaggctgcggtggacggcttccggcagcccctgccacctccgccgcccccctcgtcgatcccggcccctgcccgagagcctccgggggggcagctgctggcggtgcccgcggtctccgtggacaggaaaggccccaaggaggggctcccgatggggccgcagccaccgccggaggctaatggggtgatcatgatgttgaagagctgcgacgcggccgccgccgtggccaaggcggcccccgcccccaccgccagctccaccatcaacatcaacacctccacctccaagttctgtgagtccagcctttccctgcagccttggcttttctccacctcactcggacgccgaatccaccccctcttggagaaagctccgcttcctttgtttcaggcctcggtctttcctcttctccccgtccgccttcgcctccctgcctccttccccctcaccgtcccctccccctcatttggtgtctgcggccagcgcctgagcggccctggcttcttgtattacctggcctagagaggcagcctggtacacacggagccccaagttcggtcagtgcgatccctatcacaactggcagtctctcaacattgggaagctcttttcgcacccgtcttctcttgaagtttcaccctcaaagtgaggggaaaataaggctgcctgagtctcgttagggaaaggccttcagtcttctgcagccagagagagaaaagaaatctggcaacttgtgttcttgtgtttttggccaggctgtgttaaacaagtaaggaatttgaaagttgacctatatctacaccttgttccttctctactgtgttacacttttgcatcctgctagggaaataatgagttgctttccgatgcagtggcagctccgacatcgtcttgaagctaataatgcat

SEQ ID NO: 1608 - DNA, 6000 bp, Homo sapiens
aaaatgtatatgccacctgaatttattcttagaccttctctcaaagatgtctgcattcaacacaggcaataactgcaggtaatagtgaagaatccttcaggcatgatagaggaacagactaagtgtgggaaaaggaagaactaggccgggcgcggtggctcacgcctgtaatcccagcactttgggaggccgaggcgggcggatcacgaggtcaggagatcgagaccatcccggctaaaacggtgaaaccccgtctctactaaaaatacaaaaaattagccgggcgtagtggcgggcgcctgtagtcccagctacttgggaggctgaggcaggagaatggcgggaacccgggaggcggagcttgcagtgagccgagatcccgccactgcactccagcctgggcgacagagcgagactccgtctcaaaaaaaaaaaaaaaaaaaaaggaagaactagtcaaaattgctaataaggccgggtgcggtggctcatgtctgtaatcccagcactttgggaggctgaggcaggccgatcacctaaggtcaggattttgagaccagcctgatcaataggatgaaaccccatctctacccaaaatacaaaaattagctgggcgtggtggcatatgcctatagtcccagtgactcgggagggtgaggcaggagaattgcttgaacccaggaggtggaggttgcagtgagccgagatcatgcccattgcactccagcctaggcaacagagcgagactccatctcaacaacaacaaacaacaacaataacagcaaaaactgctaataaaaattttaacgagaatatttcaggaagtgaatgagttgtgttcatcttcaaatgtgtgaaaaattattcagtgaaaagatgggcagcttagtcttatgttgctctagacactatcatcaggagcattgggtacaaataggaaaacaatcagagcagtacatacagggaatgtgtattctgcagtcaacataattgttggagttgttagagaggttactagtgtgtggagagaagtatgacgaaagtccagtcatgaagagttttgttttgttttagcagagatgactaagtgataagaaattcatttgatgcctgtgtaatggggcattttgctataatgtaagctgttataatcagacttttcttgttcatagattggcaaagcatcatattggatatcttagattactgacatcttaaaaaattaatcagcctaatatttttaaatgcatttctttttgagtttacttttagttgaattttgagatttgtttcaatcattattggaattttgtagatgtcttctgatttccctagggaatgcctttgtgtccaagaacaagaaacataaccaataaagaacaatacatccgtagttttcctatattagtagaaactatttaaaggagatgaaaatggaaagaagatcatgaaaaaaataaaactccaaaaatggagctacaaaaccgacttgtaggtccaagatcaatgaaagtagaatacggaagtctggaaggaactatacattgtccctgacttacgtaacagagaagaaagttgggaagaaaagtgtgggcaacctccccacaagagaccagattaaaagccaggaagaagtctgggcacggtggttcacgcctgtaaacccagcactttgggaggccgaggcggacggattgcttgaggtcaggcgttcgagaccagctggccaacatgtgaaaacctgattctactaaaattactatatatatatatatatatatagtaatatatatactaattatatatagtatatatactctatatataattgttatatatagtatatatactatatataattactatatatacagtatactatatatatacacacatactatatactatatatagagacagtatactatatatatacacacatatatatacatatatacatatatatagcgacagtatactatatatatacacacacacacacacacacatacatatatatacacacacacataatatatatatatatataaactgtgcgtggtggctcacacctgtagtcctagctactcagggggccgaggcaggagaattgcttgaactcaggagccagaggttgcagtgagccaagactgtgccactgcactccagcctgggtgacagagtgagactcagtctcaaaaaaaaaaaagtgaaaccccatctccactaaaaatacaaaaaaaaaaaatagctgggcttagcagcagacacctgtaatcccagctacttgggaggctgaggcaggagaatcgcttgaacctgggaggcggaggttgcagtaagcagagattgcaccactgcactccagcccgggggacagagtgagacttcatctcaaaaaagaaaaacaacaacagcaacaacagaaaagaagtaactcaaaatgtttcaaagaagtaactcaaaatgtttttctttctttcttcctttttcttctctctttctttctttttctcctctctttttcttctctctctctttctttctttctttttctttctttctttccttcgttctttctttctgtctctctctcttttctattttttttttttgatggagtctcgctctgttgcccaggctgaagcgcagtggcgtgaccttggcttactgcaaccactgcctcccgggttcaagtgattctcctgcctcagccttccgagtagctgggactacaggcgtgtgccactacacccgactaatttttgtatttttagtagagatggggtttcaccatattggtcagtctggtcttgaattcctgacctcatgatccacccaccttggcctcccaaagtgctgggattacaagcatgagcccctgcgcctggcctagcaccttctagttctaattaggctgcatccatgagggtggaagaactgtctctggaaacaagcagtaattaggatgagaaaagttgtgttttatggggttatgcagtggtgggctttgtttgatcgtttaatgggggaaaacatggaaactcatgccccctaaaacgtttatataatagtatccccgcactgaatttttctacgtcagacttggcccatacaatttagagttgctgtcctgtgcttttatgttgctttcccagtttctctatttccatcagcagctgatatctttgtagttgctctagagcagagggctcagtcttttcaatcttgtggtccctttacactcttaagaattattgagaaccaccaggaatttttgttaatgtggatgggttatatctagctatatttatatattttaagttaaggctaaggaatttaaaaatattcatttattgattcattttaagatagtgatgcacctatttcatgctaacaccaataacttatttttatggaaaaaaaacaacaaaatgaaaacagcgctttagttcacatttttgcaaatctctgtaatacctggttgaaacggagacagtgggagtctcctcactgcttctgcatttgcagaaccacaccccacactcttgggagcatgagaatgagaagggcaagtaacacagagggtcattagataaatggttttgaccttatggactctctgaaaggaataggaagtcctcaggggtcccctgcatcgaggcctccctgatcaagggagccaagctccaagggttgctggggagctggaggaggtgagatggggcagagaggccgttgtcaccaaaagcgtgtttaggctccattcacttcaccccaggtggcctactgagcccacatggccaccagcgcaactgaagcagaccccgatagaatcctgtgtagaattattttaggattcacccatcttggcatgcacaagccatttcaattgaagaatgttttctaataacaaaacattgtaaacctaagtatgtggcaatagtaatgattaagtaaattatggtttcccgaagcccagtgctctgcagccatcagagagtaaaagcgagaatgtgttcagtggagatagcctcaggatatttaaaagcagagagcacaaagtatagaatcgtgttgtgtatgttatgacctttttttctgtgcttttgaaaaagagaatacacgtatagcaggaaaagacacaccaaactactttatataattggttgtttttgtgtttggtaagatgtatgcactgaagaggaaggtttcgattttttttttttttttttttttttttttgagacagggctttgctctgtcgcccaggctggagtgcagtggcgcgatctcagctcactgcagcctcgaccgccccggctcaagcgatcctcccacctcagctgtcccagtagctagaactacaggggcgccaccacgcctggcgaattttttgtagagatgggttctctccaggtggcccaggctggttctgaactcccgggctcaagggatcttcctgcttcagcttcccaaagtgcggggattaccggcgtgagccaccgcgtcccgcctgtttttaatttttagcagttttaaatcttctggcaatgagtaatgttatagtgtcccagatgtttggtcctttaagaaaaggatagcaggacgggttatctcggtgggagcgtgttccacctctgccctccgccagccgccctcgccggggatgcacccaggtattttcctccggatgcgtgagtggctcgcccgcggacacgccagccccgccccgcgagcccggtttccccgccccctccccgcccacgccctgcgctcccttcctattggtcccatgccgcgctttcccgttcaatcgcagcgcttagcgccagaatttgaatcttcgttttcgtttgaattgggcgggcgcgccgggctggaagaaggaagtggagggctgacgctgcgggcgggcgggcgggcgggaggactcgactcggtgggagccgctagagccgggcgcccggggacgtagcctgtagggccaccgggtccccgtcagaggcggcggcgggagcagcggggactgcaggccggggtgcagcgaacgcgaccccgcgggctgcggcccggtgtgtgcggagcgtggcgggcgcagcttaccgggcggaggtgagcgcggcgccggctcctcctgcggcggactttgggtgcgacttgacgagcggtggttcgacaagtggccttgcgggccggatcgtcccaggtgagctgcggccgggactcctgggagctgtccggggtcgagggctgagccgcggggaccccccgagctctgcggggacgggcaggggacagacgcgcggcctgggcccgactcctcctgggctctggcgagggcgtctcggtggaagctcccaggaggcgcaggcgctggcgacaacaccccagctgccggactttggggcgccgggggctgcggtcggatcgtcctggggtccccgctagctagctgcggtgtgcgcttctgtggccggggataggtgaattgggcacggggcccttcttagctcctttgctatcagagtaactcgcacctcttttgcagtggaagagttgtaaatttgcttctggccttcccctacggattatacctggccttcccctacggattatactcaacttactgtttagaaaatgtggcccacgagacgcctggttactatcaaaaggagcggggtcgacggtccccactttcccctgagcctcagcacctgcttgtttggaaggtgagccccgcgggcgcgcgcggacgttttagctgagaaagaggaaaataccttagtcacagaataaagtccagaaacgcgctctaggattgggtcctgccgtcacttttccttggtgcttctcccattcgttactaagttgacatagttgtgtttttttgttttgtaagtataaatttgatgctagtttgtatgtttaagtggttttaaaaatcaagccaattaaaaaaatcgatttgctaatgttgcggtaaagaaagatgtagat

SEQ ID NO: 1609 - DNA, 6000 bp, Homo sapiens
cagcgatagatcaggaggcatcattgaggccaggagctctgcccgtgacctgtatcccacgtactctatcttccattcctcgccctgcccccagaggccaggagctctgcccttgacctgtattccacttactccaccttccattcctcgccctgtccccacagccgagtcctgcatcagccctttatcctcacacgcttttctacaatggcattcaataaagtgtatatgtttctggtgctgctgtgacttcacctggggagcggtcctgctggttctgagattaaatgtaatgccaaacgttcttgccttagccacaccaaagaattgggtgtggcggctgcccgcggcgagtgatggagacacagaccaagagaagaaaaaaactgtaggttttattgagcagagtgacagtacaaagcttacacagcatggaaggggtccggagagggtagccactgttggttttgggtgattgccttttaatctctttaaggcgggaaatacatgtggtgggaagatgttaccagagagagaaacaaaggcagtaaattattttgtgacatgtcttagattttgaggaaaaacagaattgcaacttaggttttatctaattttatctactttatgaccttgcagcagcatggcaaaagagacaggattttacaggactttacaaagtatgttcacaaggaattggaattgggagcatagataaggtccgctggtcacagaaaaagggtcttttaacattccttttagttttaggggagggggaaggaagagagggagagaggacacagggaagcttacagcagaatttttgctgtttatagctttcttggggaaggaaacacatgcacaaatcctggtgttaggaatattttaggcatgtatcttcagtactcttcatccaggaccgaagtaagtcctgatgcaggaaatgagtgtttcacagctttctgaacccctactcgacccaggaagcccagctggaccctcctttcatgagcaggttggtcagcccctgcactgccccttccagcctctgtgcatctcttggggacggggcaagtgctcaggccttctggtttcgggcctcctgccgtgagcagcagctggatccaggaccctgggaggagttcctgtgtcctgcaggtctcagctcctactcaacgtgggctctttccgggaacgtcagtgctgagtccgggacaccctgggcccaaggccacgctcgcggcctgtcggcaatccaggctgtcggctcaggacagagggaagggttaagcccccagcagggccagggaggggcaaggtggcaccggctccccagctgctcccaggccctgctctgtggtgctggggacctggctttagttcctcgggggtggagggggcaccgcgctgcctgcctccgagctgtctggagcagccagtcctgcagatgtgggcagctcagggcccgtgggagggagggggctttgtgcccagggcagcagctgaaggagccccgggcctcgcagcccctcctgggtgaccaggtgctgcttcgtggcagctgccccctcccgtccagcgggtatgggccctgctcccccgtggtgggggcggcgcaggagagtggagcgaccctcatctaagttacctctacccgggtctgagcccccggacagacacccccgccccgacctggttacagcgcccttccccggttcggtctccggtgtgcgcatgtggggtgccccatgggcggccgcggtgggagctggggtggccatgcgcgcccccgccccgccgtccacccgcgactccaggtctggatctactcgccctccccaccctttcccgcccccagccccggagccgcgctctcaccccaggggcggcaagggcgatggacgcggaggaagcgccctctccccctcgggggtctcccggaggcgagtcccgaagggggcgaactccgaagtgggtcccgggtgggaggcgcgcggccccgcccggcggggagggggaagcggcggaggcgggtgctcagcggcgcccctggcggcggccggcgcaggtgcaggtcccggaggaggctccgcccgcagcccagacccccgcggggtgggcgggacgcggaccctgagacccgcagcgccggacccggacgggagcccctctcctccccctcgggcacgtccccggccgagccttcccgccctcctctggggctcccacctccccttcacccgcgggggacccgatttccgcgtctcctgggcccctccctgggcagggggtccagccggaatccaggagtgacctgctggaggacttggtggccagggagtcaccctgggagcccggtcctgtgaccccttaatggattctctgcgctcctgggcgggccccttggtcgcatcggggcaggggaatcgcaataaggaaagtgtaattcacgcagagccggctgcgggggagacgggagttttattattactcaaatccttctccccaaaaacgtggggatccgagtttcgaaggatgatatggtgggtaggcggccagtgagtcaggagcgctgaccggtccggttggagatgaagtcttggggagtcgaagctgtcttcccaaccctaacccagctcctcggtgggggccacaggaccacatgagcaagattgtggatttaggtggtgccagctgatccattgagtacagggtctgtaaagtatctcaaactctgatcctaggttctacagtagtgctgtgatccccgggagcaatttaggggtggcggggtcagaatcttgcatcctccagccgcgtgactcctaaaccataatttctaatcttgtggctaatttgttagtcctgcaaaggcagtctggtcctcaggtaggaagggggcttgttcagccttgatctataaactgtttctctccagattagtttaggctaagcccagggatgagcaagggcagcttggaggttagaagccaggcggagtgggttagggtcagacctccttcactgtcatcatattctcagttatgacttttgcaaaggtggtttcagttccatgcctgcccctcagaatcctgtctccctcttgtgccctgcagtttcttccttcctaaactgcccgtgatttaaagaagcttccaaaataccttccacgggaaattcaagccccaccccactccgcagtgatgtgtggcctttgataggaggtcacagagccttgtgaggagtttgtgtaggcagtcctcgatgtctcagagcacgctccatccacatccacccctggcttgccgggacccagacatagtttggtctaagtggcctgggatgtggctggggctggaggcggcctgttgaggggtgggtggagggtgggggggttggtgtgcgatttggggaggcccagcagggactccaagcaagggcaagggctagttctttttttttttttttagctgcaatgggtagggaggggctgatggttttggagctcggtgtttgagatgttaagtctgctgatgctcctggccgaataaaggccaaataaagccctttctttcctcaactcgatgtctgagggttttgtctgtggctcgtcctgctacaatttctaacgttaccagtaattttaaagctagcttattaaagattctacttaagtcacatgaacgtgaaaagcatttaggcttattatttaatttatgagtactctttaagtttaagctaaatttggtaacttgtggccaaaaacacataacgaaatatgtgtatgtgcacatatacacacatacacactcaagcaaaagtatggttttacttcagaactccagccatgagatagtaatacaaattcattggtttacacaaacaataaaaagaaatggttggatgcaaacagtggattttatctctgtagaaaagtaacagcagacttaaagcaggcagaaacgaaagcagaaagagaacttaagaacattacattaataattgcaggcccacctttgggctctgatttttcctttatgtaatttgcaatttgtaattcatgatccttgtgcctgagggctcccttctgctactcagtctacaattccccgtccctgtgaaggggcacccaggcctgacagccccagacttggctttgccaaccctccaggtctctcctgcatggctaggacccaacgcctaggtcatccagcactcaccccaaccaaagccatgggaattgctgggacccggaaggtagggggtggcacatgtgtgccctgtgctctgaagctgcccctacaggccctggaatcctccccgtgtctcaacacactaccctctggggagtcagttctccccagagtccccgttcctgggcctggagggctgctttggggcaggaaactttggccaccaggcctctgacctgcaccaggagacactgggaggtttagtccccaaacccgcacagagcaggactgcagcctgaggaaagagcaaggatttcaggagagaggcctgcgacaagtgaggtgagggcttttgggggattgtcctggcgcctggagtgtgggggcctggcaggggccctgaaccgggacagtgaggtcctgtacttgctggcctggggtggacagaacccaagcctgggtaaaatccccagggccccctaaacccaacacttaggaagtcactagtcctgacttgagtttctgatgaggaagcctctctccttagccttcagcctttcctcccaccctgccataaagtaatttgatcctcaagaagttaaaccacacctcattggtccctggctaattcaccaatttacaaacagcaggaaatagaaacttaagagaaatacacacttctgagaaactgaaacgacaggggaaaggaggtctcactgagcaccgtcccagcatccggacaccacagcggcccttcgctccacgcagaaaaccacacttctcaaaccttcactcaacacttccttccccaaagccagaagatgcacaaggaggaacatgaggtggctgtgctggggccaccccccagcaccatccttccaaggtccaccgtgatcaacatccacagcgagacctccgtgcccgaccatgtcgtctggtccctgttcaacaccctcttcttgaactggtgctgtctgggcttcatagcattcgcctactccgtgaaggtgcgtatggccctggcggaaatccagggggtgccggtgagcctggggctccacctgcccacatgctgcctggggtggggacttgtgtgtccctgtgactgtgagtttgtgtgcacctctgccccgtgtgtgctcacgtcagtagctttgtctgtgtgatctgtgtgtgtgtgtggctttggggaatctgcccagtgcaggtctaggaggaggctccaggaggctggctggctggctcagagtctgtccctggctatccattagcccagagcaattctccctatagcccagtaagaaattacaccctcaccttccagactggcacccaggctctcccagaaagtgagaagggaactcacaggtgacttcaccccatggtggggagaacagcctgtgctggggccaaggcagaaggaggatgagccccgaggctcctggagagtctgagcccgggtgaggaaggggaggaggtggtccctgatctcagggcggggaggagacggagccatagcacgcggctctcagctgggggatcctggtcccctcaccatctcctctcccccagtctagggacaggaagatggttggcgacgtgaccggggcccaggcctatgcctccaccgccaagtgcctgaacatctgggccctgattctgggcatcctcatgaccattggattcatcctgttactggtattcggctctgtgacagtctaccatattatgttacagataatacaggaaaaacggggttactagtagccgcccatagcctgcaacctttgcactccactgtgcaatg

SEQ ID NO: 1610 - DNA, 6000 bp, Homo sapiens
tgtgtttctgcccatcctcagggtccatgcagggagtgctggcttcaggcctccccacctgaggcccacaggggctgtgagcctggggtgccgggccagctgccggtggctgtggggctcccggcactgcctcaagctgtgggctatgggtccttctccacctgatggtctctgagcctggggtccaggatcaagtcccaggccttcccctaccccagccctgtgccagccgagccccttcacctgcaggcagctgccctctcctgctgtgggtcaaacatccaggcaaggaggtggcatgtaccctcaggcagtacctgcaagagtcagagtggcttcctggccaggttactgtgcccatgggagcctggaatgggccaggctgaggtcacagcacctagaggtgagcagatcagcccaggacctgactatccacggacccagctggcgaggaggaagagagtcaggtgtgtgaccgatgctggggtacctctgggtcccccaacacaatgcctgctgctcatccaaatcccacttccctccttctccacaggggtcctctcttgcaccctgttcttcctgagcccctccccaggcctctgagggtattggcccagtgtgtccctctcttgcatcccattcttcctaagcccagtgtgtccctcgactacgtgcatcaggcttacctggtgttgccccttaaagatgcagacgtctggcggggcgcagtggctcacgcctgtaatcccagcactttgggaggccgcggcgggcagatcacgaggtcaggagattgagaccatcctggctaacacggtgaaaccctgtctctactaaaaatacaaaaaaaaaaaaaaaaaaattagctggcgtggtggcaggtgcctgtagtcccagctacttgggaggctgaggcaggagaatgccatgaacccgcgaggcggagcttgcagtgagacaagatcgcgccactgtcctccagcctgggcaacagagcaagactctgtctcaaaaaaaaaaaaaaaaaaggctgggtgcggtggctcacacctgtaatcccagcactttgggaggctgaggcgggcagatcacaagatcaggagatcaagaccatcctggctaacgaggtgaaaccccatctctactaaagatacaaaaaacatagttagccaggcgtggtggcggacgcctgtagtcccagctacttgggaggctgaggctggggaatggcatgaacccaggaggtggagcttgcagtgagccaagatggcaccactgcactccagcctgggcgacagagagagactccatctcaaaaaacaaacaaacaaacaaagatgcagacatctgcctcggccccaggccctggaatcatgagctccaggcgtggagtgacaagtgtgctcggagcgtccagtgtcctcctccctgaccaccttcatgtgtcttcagtctggacctggactgatcccctgactgcactccccacccagccttcccagatttatcttcctgatgagacgagttcccttcggagccctgtgtgtcttactacgtgttcggttgagggcctgcctcgccccagagctgtgggctgcacgtggcctgcacgtggcctgcgtgctcctctgctgtccacagtcgcaggaggggatgctcaaatatttgtcgaaggaatccgtgaacaggcagatgcacatgtagccacttagaacgttctggccatggcttttatctgttgaccacgtgtggacactgaagatgcatcctctccatcccgtctagagctgcccctgtgccaggcgagttggccggctgttgacagaggtggtgggtgggagtgttggagcggggcagtggctcaggctctgggtgcctcactggcctggtctggaaggtgaccatgcaccaaggatcaaagaagtgaagcccaaagcagaatctcatggagtttccagcccaaatctcccccactgcctgcctttctccagccagtgcaaggccccaggcctcacagcaggaccccaacactgcatccccccaaagactctggccacctccatcccaggcctgccagcctcgagcctcatggagggcgtgagctggcggggtcacgggcagcccctggacacctatgggtgacactaagggctgagtcagctacccttgtctcctctgtgcccaagagccccaagcatcagactggtctgagccccaaggcctgggggtgcaaggggttggaggctgtgggatccaaagaccccattgaactcccacctcagacactgcacctagtgttctcacccaggcctgaacccatccacacacttcacggccctgctcccaccctgtgtcccctctgcaagcccccatgctccccaaattggtaactggggggcctgtctccacacccctgctagtgccattccctggtgggtagccatcacctctgggtcccctgctgccctcgccccttcaccatgggggctcggaaggcagagcccgctcccctcctgagccccaccctggaaccctgagcaccctgggtcattgcctctgagtctccctcaggggcagggcttggggcccctcctgtctcctgacagggagccctttcagtgcagggccagggggtggtggaggcaagggtcctcaggggaccagatctgacatgcggggccatcactgggtccccgatggctgtgctgcttcgtccccgcgcccacgcctcggcgcaggttccctcctggcaccggtcatagggcgaggcttgcggctcccaccccaagggtgcgctcggctctcacctgagggctcagcctaggtgtccggccctggcagctcggccctgggcgccctccacctccaggcgctgtctcctactccaggctgttcttccggccgccgcggggttgcggcctgggcgccatagcaacgggagccaggcctcatttgaatacgcaaatatttataagtcgccgggggctcgggttccgtgcggctgagccacgccccttagcaacggtcgctagggcggggccacgtggactggcacgtgcgtgggcgcccctgctgcgggcgatcccaggggaaggtgacgcgccaccaactcgagttgggtgggcgcaggcgcgtcaggtgccagcttcctgcggctccgtgcctgggccgtcgcgatgcacgtgtcgcgtttcctcgcgatcctggcgcttcccacgcggggcgggtaaaggcggtctctgctggaggctcgcgcccacctttcccaggtggaagggtcgcccctggggccgaggcctgccgtcctgaccttcggttggaagtgaggccgacggcaaaaggaagcaccgggggaagcgcccccgaggaccaggaaacacacaccggacgccggagcgcacccgagtgcccggcccgcgggacacgctgccgcccgccgtccagtcgccgcttctcactcgcgttcatgcgtgtccgccccgagccgagctctgactgcgaccgcgcggtggacggacggcaggcgggacccccgggaccgcacgtgggtggagccccgggtcagcagcgaccggcgcaggagggcgaggcgggcgctggactgggcagaggcagggtttgcctgactgtaaaacgccttttttgttttgagacgaagtagcgctctgttgcccagtgcagtggcgcgatttcggctcaccgcaacatccgcctcccgggttccagcgattctcctgcctcagcctcccgagtagctgggactacaggcgcgcgccactgcagccgactaattttttgtgtttttagtagagacagggtttcatcatgttggccaggctggtcttgaactcctgacctcaagtaatccacccgcttaggcctcccgaagtgctgggattataggcgtgagccaccgcgcccggccctttttgttttttaatgaggatgtatttctgattcctttgcaattttaaaaaatgttaaaaacatgtctttttgggtttgaaagagctaggatgtgcgtctatgtgcttggggtgagccctgggcacttcgctcccctgtggcaacttgtgggtacggtttaactggaccacgctgagcttctgcagcgttggaacctcaagtttggggggactgggcgggcagggtcgcctgccacgcaggcccgagaaagaggagagtggtggagggggcgttctcacgcctggccccagggcacacggctgcgcccgccgcccggaaccccaccggggctgcaagcgtcctcggggtgggttgcggtgggagtaggggagctggggtgcgtggtggtaggtggggtgcgcggccgctccacctgcgcggaagggcagccgggcaaccggaccccgcggccacccgggggcccccagctccgagcatcccgccttggtcccggcggatcccagcctttccccagcccgtagccccgggacctccgcggtgggcggcgccgcgctgccggcgcagggagggcctctggtgcaccggcaccgctgagtcgggttctctcgccggcctgttcccgggagagcccggggccctgctcggagatgccgccccgggcccccagacaccggctccctggccttcctcgagcaaccccgagctcggctccggtctccagccaagcccaaccccgagaggccgcggccctactggctccgcctcccgcgttgctcccggaagccccgcccgaccgcggctcctgacagacgggccgctcagccaaccggggtggggcggggcccgatggcgcgcagccaatggtaggccgcgcctggcagacggacgggcgcggggcggggcgtgcgcaggcccgcccgagtctccgccgcccgtgccctgcgcccgcaacccgagccgcacccgccgcggacggagcccatgcgcggggcgaaccgcgcgcccccgcccccgccccgccccggcctcggccccggccctggccccgggggcagtcgcgcctgtgaacggtgagtgcgggcagggatcggccgggccgcgcgccctcctcgcccccaggcggcagcaatacgcgcggcgcgggccgggggcgcggggccggcgggcgtaagcggcggcggcggcggcggcggcgggtgggtggggccgggcggggcccgcgggcacaggtgagcgggcgtcgggggctgcggcgggcgggggccccttcctccctggggcctgcgggaatccgggccccacccgtggcctcgcgctgggcacggtccccacgccggcgtacccgggagcctcgggcccggcgccctcacacccgggggcgtctgggaggaggcggccgcggccacggcacgcccgggcacccccgattcagcatcacaggtcgcggaccaggccgggggcctcagccccagtgccttttccctctccgggtctcccgcgccgcttctcggccccttcctgtcgctcagtccctgcttcccaggagctcctctgtcttctccagctttctgtggctgaaagatgcccccggttccccgccgggggtgcggggcgctgcccgggtctgccctcccctcggcggcgcctagtacgcagtaggcgctcagcaaatacttgtcggaggcaccagcgccgcggggcctgcaggctggcactagcctgcccgggcacgccgtggcgcgctccgccgtggccagacctgttctggaggacggtaacctcagccctcgggcgcctccctttagcctttctgccgacccagcagcttctaatttgggtgcgtggttgagagcgctcagctgtcagccctgcctttgagggctgggtcccttttcccatcactgggtcattaagagcaagtgggggcgaggcgacagccctcccgcacgctgggttgcagctgcacaggtaggcacgctgcagtccttgctgcctggcgttggggcccagggaccgctgtgggtttgcccttcagatggccctgccagcagctgccctgtggggcctggggct

SEQ ID NO: 1611 - DNA, 6000 bp, Homo sapiens
gcgtcccctggagagaagggcgagtgtggcgtcccctggacagaagggggagtgtggcgtcccctggagagaagggccagtgtggcgtcccctggagagaagggggagtgtggcgtcccctggagagaagggggagtgtggcgtcccctggacagaagggggagtgtggcgtcccctggagagaagggccagtgtggcgtcccctggagagaagggcgagtgtggcgtcccctggacagaagggggagtgtggcgtcccctggagagaagggcgagtgtggcgtcccctggagagaagggcgagtgtggcgtcccctggagagaagggggagtgtggcgtcccctggacagaagggggagtgtggcgtcccctggagagaagggcgagtgtggtgttcgctggagagaagggcgagtgtggtattccctggacaaaagggggagtgtccctgcagccctggccagccagcggcatgccctgctagctctcccccaacctcagggatagggaaccctgacagggcacaagtccccgtcccagaggggcctggcccagcctcaacccgggccctgggaggggaggggcaccaggggcgctgtgggcccccagcagaagccaggatgaccacacaggggactgagctgtctgtggctgtggccagacctagaacttggcccaaggcagggcaagccccttggagcagagtgggtggcagagcctgtgtatacccagcaaggctgagccagtgacactaccaggctccaagagcaaccagccatgaggcaggcgtggggcaagggtagggtgagggcaggggcgggggagagtggggcaggagcagacggaccagctgccaacctcgtccactccaggaggcagggatggccaggctcccacgccctactggccgctacccgaccaccaatgaggcagaggcctgaggccagtcggtgctggagccctacttccaaggtccacagaccgcttcaggccacagagccgaagaaaactgggcatgtgaaggcccaggaggcggggtccctatgtctgccattcttggcaggtgcatttcacgctgggagcaagtcaggaaaggtgatgcctctcaccgccaagaaggctcccagcagagaccagagccaccggcacagatccccaacccctgaaaccacctccctctggaggaccaggacgccctcctagttggtagaagcacagtaagctctctgtccttatgatctgcctgcttgtccagagctctctgccagaagccgtggacactggggcaggcgggaggagagagcaccacagcccagacccctgaccggcctctcccaacctccccctcccaaaggctatggagagcccagggctggacaggcctgaggttccgacatacctcatgccaggccacacgcgcaccgtgtcccaccctcagccgaaaaccaagatcaagaccatccaataatttactgtgatcccatctgtgcccgacaagggcccacagaggcctgggaggggagctaagggctggggttccggtggcatttgggatgttcaagacagtctgtgcacagcctccctgggagggtctgcagtcacctcggcccacggtcccggggtgactgggctccagcagcccttccttccttccttgcttccgtccttccttcctcctccttccgtctgcacctccttcctgcatccggcacctccatgtcctgagcttgtgctgggcggggcacaagggaggctgctgaccgcaggccaggagaccggcaggggcggggagccggggtcatccggtgggcgtggcggccgccctgggagtccccctcacctgcgtcaggagagcacacacttgcagctcatgcagccggggccactctcatcaggagggttcagcttccgcagcttgtgctgccggatctcacgcaccaacgtgtagaaggcatcctccactccctgggaaaggagggatgggatcaggagggaccggcctgtggccgcctgcctgggtgaggggctccctgctgtgggatcaagccttgcctggcccgaagctcccgactccaccagccacttccccaggcccaccacacacacgggaagctggactctggccatctcgaagtgcccagggccacccgcatcatgctacagcagcccctcaaaggtcagggtggcccggggccctcctgaactccaggtctggccagggtttgaccaccctgcacccagctctcgactcagctacggcccgtgtccccagtagccccactaagactcagaaccaacaggtgcccgtgggacactctggggacaagaggggccgggccccagggtcaccgctccggcctggctcagggcagctctccccaaggacctccgccttccccggagctgtgtcggcccaggactgcagggcgtgagcccagaccccggccctcgcctccctcactgccctgccgtcccgggagacttacagcgcgaggggccgctgggtcacatgggtcccggggggtcccagagggtcccggagctggagctagagccagagcggctgccctgtgtcaagggagagggtcagtgagtgctgctccctggctggggcggggcggggcgggtccctggctagctgtggggtggagagctgcctcacctgccgggtcttggccgaggtctcgatgtaggggatgccgtagcttcgggcgaggtcctgagcctgccgagattccacagtgcgtgcagccaggtcacacttgttccccaccagcaccatgggcacgtcatccgagtccttcacccgtttgatctgctccctgagaggtggaaagcgagagctggctacgggggctgcaggcgcagcggcatccaggacatgcgcagagaggacaggaggcccctgcctggacgcagccggcctggccccacctgtgcggcgtgggctcccgggccagcctcacggggttcacctgtactggtggatgtcctcaaaagacttggtgttgttgatggcaaacacacacaggaagccctccccggtgcgcatgtactggtcccgcatggcgctgtactcctcctggccggcggtatccaggatgtccaacaggcacgtctccccatcaatgaccacctgcttccggtaggaatcctgcaggaggacagggctcagggaccccctcaggaccttccgtggggggagttcacacagccagcctctccctggtacctctcatgcccctcatgccccctcctctcctggggtgctgagacgagggactcccctcctctagaggaagcaggagacagggccacagcaccatgcaggggaccaggggctgcagccagccctatcctggctgtgtcctgggctcgcccgcagcagctgctggcacctggacggcggcgccaggctcacctctatagtggggtcgtattcgtccacaaaatggttctggatcagctggatggtcagcgcactcttgcccacaccgccggcgcccaccaccaccagcttatattccgtcatcgctcctcaggggcctgcggcccggggtcctcctacagggtctcctgccccacctgccaaggagggccctgctcagccaggcccaggcccagccccaggccccacagggcagctgctggcagggccatctgaagggcaaacccacagcggtccctgggccccaacgccaggcagcaaggactgcagcgtgcctacctgtgcagctgcaacccagcgtgcgggagggctgtcgcctcgcccccacttgctcttaatgacccagtgatgggaaaagggacccagccctcaaaggcagggctgacagctgagcgctctcaaccacgcacccaaattagaagctgctgggtcggcagaaaggctaaagggaggcgcccgagggctgaggttaccgtcctccagaacaggtctggccacggcggagcgcgccacggcgtgcccgggcaggctagtgccagcctgcaggccccgcggcgctggtgcctccgacaagtatttgctgagcgcctactgcgtactaggcgccgccgaggggagggcagacccgggcagcgccccgcacccccggcggggaaccgggggcatctttcagccacagaaagctggagaagacagaggagctcctgggaagcagggactgagcgacaggaaggggccgagaagcggcgcgggagacccggagagggaaaaggcactggggctgaggcccccggcctggtccgcgacctgtgatgctgaatcgggggtgcccgggcgtgccgtggccgcggccgcctcctcccagacgcccccgggtgtgagggcgccgggcccgaggctcccgggtacgccggcgtggggaccgtgcccagcgcgaggccacgggtggggcccggattcccgcaggccccagggaggaaggggcccccgcccgccgcagcccccgacgcccgctcacctgtgcccgcgggccccgcccggccccacccacccgccgccgccgccgccgccgccgcttacgcccgccggccccgcgcccccggcccgcgccgcgcgtattgctgccgcctgggggcgaggagggcgcgcggcccggccgatccctgcccgcactcaccgttcacaggcgcgactgcccccggggccagggccggggccgaggccggggcggggcgggggcgggggcgcgcggttcgccccgcgcatgggctccgtccgcggcgggtgcggctcgggttgcgggcgcagggcacgggcggcggagactcgggcgggcctgcgcacgccccgccccgcgcccgtccgtctgccaggcgcggcctaccattggctgcgcgccatcgggccccgccccaccccggttggctgagcggcccgtctgtcaggagccgcggtcgggcggggcttccgggagcaacgcgggaggcggagccagtagggccgcggcctctcggggttgggcttggctggagaccggagccgagctcggggttgctcgaggaaggccagggagccggtgtctgggggcccggggcggcatctccgagcagggccccgggctctcccgggaacaggccggcgagagaacccgactcagcggtgccggtgcaccagaggccctccctgcgccggcagcgcggcgccgcccaccgcggaggtcccggggctacgggctggggaaaggctgggatccgccgggaccaaggcgggatgctcggagctgggggcccccgggtggccgcggggtccggttgcccggctgcccttccgcgcaggtggagcggccgcgcaccccacctaccaccacgcaccccagctcccctactcccaccgcaacccaccccgaggacgcttgcagccccggtggggttccgggcggcgggcgcagccgtgtgccctggggccaggcgtgagaacgccccctccaccactctcctctttctcgggcctgcgtggcaggcgaccctgcccgcccagtccccccaaacttgaggttccaacgctgcagaagctcagcgtggtccagttaaaccgtacccacaagttgccacaggggagcgaagtgcccagggctcaccccaagcacatagacgcacatcctagctctttcaaacccaaaaagacatgtttttaacattttttaaaattgcaaaggaatcagaaatacatcctcattaaaaaacaaaaagggccgggcgcggtggctcacgcctataatcccagcacttcgggaggcctaagcgggtggattacttgaggtcaggagttcaagaccagcctggccaacatgatgaaaccctgtctctactaaaaacacaaaaaattagtcggctgcagtggcgcgcgcctgtagtcccagctactcgggaggctgaggcaggagaatcgctggaacccgggaggcggatgttgcggtgagccgaaatcgcgccactgcactgggcaacagagcgctacttcgtctcaaaacaaaaaaggcgttttacagtca

SEQ ID NO: 1612 - DNA, 6000 bp, Homo sapiens
gcagggaaagcaactccacctggcctcaggaaggtggacaggactaggcttccatctacatctacagaagggcctcagagcagccccgaccccctgggggtcagcaatgccacctgggccctggaccctccagcttagacctagcactgaggtgcagagccagggaccagctcaggaagggcatggtgccccccatatccaatctgctcttctccaacccccagccctcctcatcttcaaggctaatccctcctcctccaggcaactccccaaaccaccgcccaccctctcccttcccttggagtggttctcagatggtgtgggcagtgacactgtccgtgtagacgtgtccccaggcctcagaggcttgggtgacagcccagcaccctccagtgcccggcacaggagaaatgctagggacagaggcagccatcaagggacagggcttgaccaggggcagaccctgggggccaggatgcaagcacgcccccaacccagtcaggcccctccccaccgcctgcccagcactgaaggctgcagggccctgggcacacttctgggctccttctgtggcgcccctgtccctccatccccacagcaggcggggcacaggcagatccactgcccaaggctgctggaaagttcctggagggggatggagagaagaggctgggccaggctcccagcagcccagcctacccctcctcccatgctcagggacccttgaaagctagaggccagcacccttgggacaggtgggtacaggctgagccctggcaggaggcagtggtactaatgacatctgggcagcctcaaccttggaagggggctgagtccctgggtgagagtggccctgagcccccatctccagccacagatacggtttccagaaccttttagaggttgcccagccccagtcctctaaggctgttggtgggggaggcattccctggagttggtactgatggtactttgctttttctctgaaaaagccccccaggctcctacccttcgtggcacccccatctttgagaacttggtgcctgacactgtcccagaccccctggcttcaggtgcacgacagtgagtctgagagtctggcttccagctctctcatttctccatgtatgtgatcaggggacggagagaggtgtccacacccctaaggccttccttccccttccctcttctatccccctctgcctgcttccaggtgctcagccccttccctccctctggcagtccagtacccaagtcagagagtggaacactcagaagatcatgacttttaatgctttattgggattgcaagcgttacaaggttaaagacaaaacccaagcatgggattttgccggaaatattagcgttaaaggagttgagttgagtcaaacacgggccgcaaggtggaccgaggcggcaggcacaggtgacattcagtgtttggcgtgggggtcttcaggtgatggcagaggaggggacccaagagggggccccccactgaagacattggggacacggggaggagacaagatggagagccacgactaggcacggaggtcagacaggcagcccgggccaggatggttagtggcccaggggagagctgcaaacctggggacgcaaggggctggtcggcaagtgcccccgggaacacccactccggcgaggcagaatataacactgggtgggtgggtgtcctgacgaatgggcaggtaatttggggtgcctcgaagcgttttggatctcaggccaatgtgggttccacaattgtgacaatttggctctttgggcttctgtccaatgttccgaatggcccactcacagggcgcttgccgagggaccctctgcgactgaggcggactggcatggacgacccccggggtcatgccagccccgtcaccaggacccagaagcctcaggcctctagactgctagtcgggctgcgtgcaggggggctgagctgggggcacaagtgggggcgaggtaaacctcccagaggccgagtccctgccgcagccctaggcgccgcggtggtggctgctatggcatcaccagacccgtgggctccggggcccaagcaacctggtcgatgggcagacctggcagctctcctgctctgtgggctcagacccgcctgacctccctactccccggcctcaccccaccttgcccccaagaggtcccacagagcttcggacctcctggagacaaggcagggtgctgaggggcgggcaagatgtcaccgagggagaggggagggttcctcaagtgtgcggaaggcggccaccctgccccagcctgatggaaccctctgtttacacacctgctagccccttcccctccggccagcctcaggccagccaggagccccctcctgtggcctccgagcaccctcctgacacctgaggagaccctgcccaacccccccctccgccctcaggacttctggggaccagccactgtccccagaagccaggccggacagtggccttctccactcccctctgacttctccaagggggctcagtggccagtgccccccaggaggctccaccctcaactcaacccaagcaacagggacagatgaaaaacaaaatccaatcagggcgataaatggcggggggcaggacgtggtggtctccaggctggcttcgtgcgttcttgcttttgtcactgcccccctgttacatggggggggggtttaatttggtttctgagcgcataaagctaaggaggggtaaaaaaaaaacaaaaaaaaaaaaaaaaggaaaaatgccccaagaaacaaagagggggaatagatcaattgacatgaaatttgggggttcctaatttctctatgtaattctgcaagtctgctgtcaatcctcctgacttttccatccaaaatctcccgggaccacttcctaccccagaactccccccgcccagcccccactgccccccacccacccctccaaccgccagacttcccacactccccgcatcagtgcacggcccccgaggactccacatttcttggggggtccccaggagacgggcaaagatgatccctaggtgtgctccggtgggggggtccccaagatcttccttccaggagcacaccagggagtcaggctactcgtgggggcatgtctgctcagctaccgccatctccaatgtggccaaactccttcctcactctggctgggccaacacacagtaagtaaggtgtatcgggaatgggtggggtatggggagcatcgtggctcacgctgcgggggccgtggggacaggcgccaaggaggccagcctcacaagggcatctctgtcatggtggaaagatggaattaggcctgggacacaccccgcccaccctacgggtgtatcccaaatgccgccggccgcacactcaggccgcaccatctgagccccctcctctgagaggcagggcacagacagggccgaggggcagtggagatgggaacaggagcggggctcagaccatgaaaacattggagaatcttagcgggactttggcctgatccatacagatatcgtagttgcttagatatgcttattgttttcatccaattttgtgggggtgtgcgtgtgtgtgcgcatgtgtgtgtgcaggtgggtgcttgcgtgtgcaacgtgtgtgctgcgtgtttgtgtgctgtgagctgtgttcatgtatgtgctgcgcatgagtgtgtgtgctgtgtgtgcatgtgtgtgctgtgtgtttgtgtgtgtgctgtgttcatgtgtgctgtgcatgcgtgtgtgctgtgtgtgcatgtgtgtgctgtgtgctgtgttcatgtgtgtgctgtgtgtgcgtgtgctgtgtgcatgtgtgtgctgtgtttgtgtgtgtgctgtgtgtgctgtgttcgtgtgtgctgtgttcgcgtgtgtgtgctgtgtgtgcatgtgtgtgctgtgtctttgtgtgtgtgctgtgtgctagtgtgtgtgctgtgtgtgcatgtgtgtgcgtgtgctgtgcgtttgtgtgctgtgtgctcgtgtgtgtgctgtgtgtgcgtgtgtgctgtgcgtttgtgtgtgctgtgcgtttgtgtgtgtgctgtgtgtgcatgtgtgtgcgtgtgtgtgccgtgcgtttgtgtgctgtgtgtgcatgtgtgtgcgtgtgtgtgctgtgcgtttgtgtgtgtgctgtgtgctcatctgtgtgctgtgtgtgctgtgcgtttgtgtgtgtgctgtgctcgtgtgtgtgctgtgttcatgcgtgtgctgtgtgttgtgtgtgtgtagctgcggggatgcataaagtatgagtgctttttaggatgggaattgagatgtaagatttgggggtgagggtcgtgccaattacatttcatttgcatggattttggttttcatgctctgtcctcccctcctttggtcttactgggtccctctgactgctctgtgatttttagtgatggaaaagggagtgaggagccagtctgggttgttgctattttcggatggccagtttaccctgaaaattcccgtgagaagggagatggcggtagcagcgacgtgcccacctgtgatttctggggtccttcttttctctttgctggttcagggactcaagtccaggccaatttgactcaaagtccaagggagaagagaaagaggggggtggggagtgccaaattcctttattttgccaattgtttctcagccaattcgtttttaatactttttttttttagccaattgattttttttggtggttgttttttttaaagccaatttctgagcttttgtggggtgtttctaaaaagccaattagttttaagagggttgttgtgggggggggggaagggggttagtttaatgttttgattttttatgtgtggggataattggggataatttggggggagggtatgtgaagggtgtttaaagccaatcgattttgtacatgtttgaagatgctgctgtgcttcctcagcccgatggagggggccgaggagagtagcctgtttcggggaggcggggcacggggactgggtcaggagaagccccagggggacgtggaaccgagagattttcgggatggaacctgatggaaacgtccgtggtcaggaggaggctgcaggatggtggcgccgggctgcagacttgcggcagttttgctcacttccgattgctggccatctctgggggggcgcccccgtgggcggggtcttgggtgggtagagcaatcaggggacggtgacgtttggcctccctgaacgcctcgagctccttggcgagcacgtgaccccggcgggcacgcaggagggcaggcaggcccctgcgcaggcgctgggtggactgcttccaggtgtcatattggaagaacttgcccacggggtatctggggaagttgtcctgggaggggaaggggctggtcagcaggtgcctgctctccacgctcttccgcctgagccgcccgcctgacctgacaggccacccctgtgactgatcagtgacttgagctaatgtccacgggcagagggacagaaggagccagcgtctgagctgctcccgggccacacagcaagcaaggaagtcacgggtccttgtccctggccaagaggtcccagaggccacaggaaacgctgggcgcccgaagccctatttctctgtctctagagagtgggaaaggggcccaggaccctcaccggaagcacggtcggaggggtcgacacgtccctctcggacttggcgggggtagcacagtacgtctccaggagggccaggtcacagctgcggaaacagcactcctcaacgatgccacggctgcgacggctcacacggcttgcgggcctgcctggaagtcccacagcacagagagagccgtgttagcaccgcactgaccccagcccccggaggctgaagggggagcaaaccacccctgccctcaggccaggccctggaaggacgcagccaccctgcgggtcaggggagggaagtgagagctggcaggcagaggcgtcccagga

SEQ ID NO: 1613 - DNA, 6000 bp, Homo sapiens
gcccacgcctgggcctcgggccctgcagccgccagcccgctgcctctcggacagcacccccctcccctcttttcctctgcccctgcccccacctggtctctgctccctcacctgctccttccctttctgttccttcccttcggccccctccttgcccagctcaggacttttcctgggccctcacctgctccgcaccgctgcatgcttcctgtcctgctttctgccggtcccctgacccggacctccaagttcagagtggtggggcttgttgcggaagcgcggcgagggctagagtggccagctggcggagtgtgctcttagaatttggaagggggtggcagagggggcggtgagaggactggccagggtccagtcaaggagatgaccaaggaggctttcagatcctcggcgcagctgcccactagtctttagagagggcatgcaaagttgtgcttctgtcccactgcctgctcagtcgctcacataatttattgcatcaaaaactcccctgggtctgcggagcgaaggctggggctgcccgcctggagggttccaccttctgcaggggcagggccaacttgctgtggtggctcccggcctcccacccccgagtgggttaacccggccctgtggccctgcagcctgtggagggggtgtgtcctaagactggcctccccttccagattgtagtctggggaacctggtgtcggacttcccaggtggcctgagctggtctctccagctcccacggggagagtttggtagcgcaaatagggagatgttctggaggcccctggccttactggttcgatttgaggcctggaaaggaggctctgggcgtgtgtgtgtgtgtttgggggtacccaaggcagactggagttggagaactgggtgactgggaaaacaaggtttctagagcatgggtggcgtggttgtgttaaccattggagtccttgacccaggcctggctcagctgcagactggaaaggtggaaaagccagggggaggggcggggctggcccagcaggactggcctgctgctttgagggcgatggtcctcctggaccccccctgctcagctgggggttgtggggaggaagggactggtcctcctggatgcacatgctctgtaggggtggggctgtctgccatcttggctggcgctggaggcctgagaagtggcgatgtgacgctgggctggccctgcccccatggtgtcataggacggaggccaggtcgggtgtccagcctgggcccctgcagctgtggatgccgctgagctcctgcaataatgaccgtggagatggtcacccctcgtgtaaaattactagtgcttcttgcaaatggaaggaactgggccttttctgtgtgcttctggacgcttcattctgcacatggccctgcgccctcacctcggcattatgacctgtgtgttacttttgtaataaaaataatgtttataggaaagccgtgctttcaattttcaactgaatttgtaggttggcaaatttggtttgggaggggcacctctggcctggggcttggcctggctgccccgctcacgccacttctctcccgcccccagacaccaatgggaatcccaatggggaagtcgatgctggtgcttctcaccttcttggccttcgcctcgtgctgcattgctgcttaccgccccagtgagaccctgtgcggcggggagctggtggacaccctccagttcgtctgtggggaccgcggcttctacttcagtaagtagctgggaggggcttcctcagacctggtcaggcccctagagtgaccggtgaggacgcccaacctcaagccaggggagcacactcctaggtcagcagcccagccgcttgctctgagactttgaccttcccgccgcgtttctgagcacgtgcggtgtcccagggcatccacaccagctgcctttcccatcacacgcctccttcgaagggtgggccagaggtgccccctagacgtcaggggcactcacaggggtctccctgggcatcagaatttctgttgggggccgtgaggctcctgctcctgaggcaccgcacgcctagtgcagggcttcaggctctggaggaagagcctgcctttcttcctgcaccttttggacattctgacaagggacgtgcgttcggtgaatgatcagaattaaaatcaataaagtgatttatataattaaaatcaataagacaagtgcagttggtgggtggcaggggtgagcggtgcatgcgcctccttgggccccaaggctgccgtggggggtgcccacctgctgacctcaaggacgcttcagcctttcctcatgtttctctcttggttctccagcctgggggctggcaggtgggtgcatggcccattgtccttgagaccccacccccagataggggggctgggtggatgcagaggcaggcatggtgcctgggcatgcctgatggggcaggggaggggccgctccttactggcagaggccgcacggcttattccacctgacactcaccacgtgacatctttaccaccactgcttactcacgctgtgaaatgggctcacaggatgcaaatgcacttcaaagcttctctctgaaaagttcctgctgcttgactctggaagcccctgcccgccctggcctctcctgtgccctctctcttgcctgccccatttgggggtaggaagtggcactgcagggcctggtgccagccagtccttgcccagggagaagcttccctgcaccaggctttcctgagaggaggggagggccaagcccccacttgggggacccccgtgatggggctcctgctccctcctccggctgatggcacctgccctttggcaccccaaggtggagcccccagcgaccttccccttccagctgagcattgctgtgggggagagggggaagacgggaggaaagaagggagtggttccatcacgcctcctcactcctctcctcccgtcttctcctctcctgcccttgtctccctgtctcagcagctccaggggtggtgtgggcccctccagcctcctaggtggtgccaggccagagtccaagctcagggacagcagtccctcctgtgggggcccctgaactgggctcacatcccacacattttccaaaccactcccattgtgagcctttggtcctggtggtgtccctctggttgtgggaccaagagcttgtgcccatttttcatctgaggaaggaggcagcagaggccacgggctggtctgggtcccactcacctcccctctcacctctcttcttcctgggacgcctctgcctgccagctctcacttccctcccctgacccgcagggtggctgcgtccttccagggcctggcctgagggcaggggtggtttgctcccccttcagcctccgggggctggggtcagtgcggtgctaacacggctctctctgtgctgtgggacttccaggcaggcccgcaagccgtgtgagccgtcgcagccgtggcatcgttgaggagtgctgtttccgcagctgtgacctggccctcctggagacgtactgtgctacccccgccaagtccgagagggacgtgtcgacccctccgaccgtgcttccggtgagggtcctgggcccctttcccactctctagagacagagaaatagggcttcgggcgcccagcgtttcctgtggcctctgggacctcttggccagggacaaggacccgtgacttccttgcttgctgtgtggcccgggagcagctcagacgctggctccttctgtccctctgcccgtggacattagctcaagtcactgatcagtcacaggggtggcctgtcaggtcaggcgggcggctcaggcggaagagcgtggagagcaggcacctgctgaccagccccttcccctcccaggacaacttccccagataccccgtgggcaagttcttccaatatgacacctggaagcagtccacccagcgcctgcgcaggggcctgcctgccctcctgcgtgcccgccggggtcacgtgctcgccaaggagctcgaggcgttcagggaggccaaacgtcaccgtcccctgattgctctacccacccaagaccccgcccacgggggcgcccccccagagatggccagcaatcggaagtgagcaaaactgccgcaagtctgcagcccggcgccaccatcctgcagcctcctcctgaccacggacgtttccatcaggttccatcccgaaaatctctcggttccacgtccccctggggcttctcctgacccagtccccgtgccccgcctccccgaaacaggctactctcctcggccccctccatcgggctgaggaagcacagcagcatcttcaaacatgtacaaaatcgattggctttaaacacccttcacataccctccccccaaattatccccaattatccccacacataaaaaatcaaaacattaaactaacccccttcccccccccccacaacaaccctcttaaaactaattggctttttagaaacaccccacaaaagctcagaaattggctttaaaaaaaacaaccaccaaaaaaaatcaattggctaaaaaaaaaaagtattaaaaacgaattggctgagaaacaattggcaaaataaaggaatttggcactccccacccccctctttctcttctcccttggactttgagtcaaattggcctggacttgagtccctgaaccagcaaagagaaaagaaggaccccagaaatcacaggtgggcacgtcgctgctaccgccatctcccttctcacgggaattttcagggtaaactggccatccgaaaatagcaacaacccagactggctcctcactcccttttccatcactaaaaatcacagagcagtcagagggacccagtaagaccaaaggaggggaggacagagcatgaaaaccaaaatccatgcaaatgaaatgtaattggcacgaccctcacccccaaatcttacatctcaattcccatcctaaaaagcactcatactttatgcatccccgcagctacacacacacaacacacagcacacgcatgaacacagcacacacacgagcacagcacacacacaaacgcacagcacacacagcacacagatgagcacacagcacacacacaaacgcacagcacacacacgcacacacatgcacacacagcacacaaacgcacggcacacacacgcacacacatgcacacacagcacacacacaaacgcacagcacacacaaacgcacagcacacacgcacacacagcacacacacgagcacacagcacacaaacgcacagcacacgcacacacatgcacacacagcacacacactagcacacagcacacacacaaagacacagcacacacatgcacacacagcacacacacgcgaacacagcacacacgaacacagcacacacagcacacacacaaacacagcacacacatgcacacagcacacgcacacacagcacacacatgaacacagcacacagcacacacatgcacacacagcacacacgcatgcacagcacacatgaacacagcacacacacaaacacacagcacacacatgcacacacagcacacacactcatgcgcagcacatacatgaacacagctcacagcacacaaacacgcagcacacacgttgcacacgcaagcacccacctgcacacacacatgcgcacacacacgcacacccccacaaaattggatgaaaacaataagcatatctaagcaactacgatatctgtatggatcaggccaaagtcccgctaagattctccaatgttttcatggtctgagccccgctcctgttcccatctccactgcccctcggccctgtctgtgccctgcctctcagaggagggggctcagatggtgcggcctgagtgtgcggccggcggcatttgggatacacccgtagggtgggcggggtgtgtcccaggcctaattccatctttccaccatgacagagatgcccttgtgaggctggcctccttggcg

SEQ ID NO: 1614 - DNA, 6000 bp, Homo sapiens
ggcggccccttccccttggctaggcttaggcggcggggggctggcggggtgcgggattttgtgcgtggtttttgacttggtaaaaatcacagtgctttcttacatcgttcaaactctccaggagatggtttccccagacccccaaattatcgtggtggcccccgagaccgaactcgcgtctatgcaagtccaacgcactgaggacggggtaaccattatccagatattttgggtgggccgcaaaggcgagctacttagacgcaccccggtgagctcggccatgcaggtaggatttgagctgtgtttcccgccctgatcctctctcctctggcggccggagcctccgtaggctccaagcctggcccagattcggcccggcgcagccggccttccgcgcgtcccgcacctggcgggggctccggggctccggcgcggcaccggggggcgctcgggatctggctgaggctccaagcgccgcgtggccggctcctcctgctggggcaggtggcggctgcgcgccccgcccgagcccaggggccccctcagccgcaacaaccagcaaggaccccccgactcagccccaagccacctgcatctgcactcagacggggcgcacccgcagtgcagcctcctggtggggcgctgggagcccgcctgcccctgcctgcccggagaccccagctcacgagcacaggccgcccgggcaccccagaaacccgggatggggcccctgaattctctagaacgggcattcagcatggccttggcgctctgcggctccctgccccccacccagcctcgcccccgcgcaccccccagcccctgcgaccgccgccccccccccggggccccagggcccccagcccgcaccccccgccccgctcttggctcgggttgcgggggcgggccgggggcggggcgagggctccgcgggcgcccattggcgcgggcgcgaggccagcgaggcccgcgcgggccctgggccgcgggctggcgcgactataagagccgggcgtgggcgcccgcagttcgcctgctctccggcggagctgcgtgaggcccggccggccccggccccccccttccggccgcccccgcctcctggcccacgcctgcccgcgctctgcccaccagcgcctccatcgggcaaggcggccccgcgtcgacgccgcccgctgcctcgctgctgactcccgtcccgggcgccgtccgcggggtcgcgctccgccgggcctgcggattccccgccgcctcctcttcatctacctcaactccccccatccccgcttcgcccgaggaggcggttccccccgcaggcagtccggctcgcaggccgccggcgttgtcacccccccccgcgctccccctccagccctccccccggcgcgcagcctcgggccgctcccctttccgcgctgcgtcccggagcggccccggtgccgccaccgcctgtccccctcccgaggcccgggctcgcgacggcagagggctccgtcggcccaaaccgagctgggcgcccgcggtccgggtgcagcctccactccgccccccagtcaccgcctcccccggcccctcgacgtggcgcccttccctccgcttctctgtgctccccgcgcccctcttggcgtctggccccggcccccgctctttctcccgcaaccttcccttcgctccctcccgtcccccccagctcctagcctccgactccctccccccctcacgcccgccctctcgccttcgccgaaccaaagtggattaattacacgctttctgtttctctccgtgctgttctctcccgctgtgcgcctgcccgcctctcgctgtcctctctccccctcgccctctcttcggcccccccctttcacgttcactctgtctctcccactatctctgcccccctctatccttgatacaacagctgacctcatttcccgataccttttcccccccgaaaagtacaacatctggcccgccccagcccgaagacagcccgtcctccctggacaatcagacgaattctccccccccccccaaaaaaaagccatccccccgctctgccccgtcgcacattcggcccccgcgactcggccagagcggcgctggcagaggagtgtccggcaggagggccaacgcccgctgttcggtttgcgacacgcagcagggaggtgggcggcagcgtcgccggcttccaggtaagcggcgtgtgcgggccgggccggggccggggctggggcggcgcgggcttgcgccggacgcccggcccttcctccgcccgctcccggcccggggcctgcggggctcggcggggcggctgagcccgggggggaggaggaggaggaggaggaggacggacggctgcgggtcccgttccctgcgcggagccccgcgctcaccctggcggcggagctgggggtggggtgggggcgtcgggaagggccgagggaggtgtgaggtgtctgcaggggcgacttcccggtcggtctgtgggtgcagggggtgccgcctcacatgtgtgattcgtgccttgcgggccctggcctccggggtgctgggtaacgaggaggggcgcggagccgcagaagcccaccctggtatgttgacgcggtgccagcgagaccgcgagaggaagacgggggtgggcggggccaggatggagaggggccgagttggcaggagtcatggcagacgccacattcgcgacatctcccccacaccccctctggctctgtccgcaacatttccaaacaggagtcccgggagagggggagaggggctgctggtctgaggctaagaagggcagagccttcgacccggagagaggccgcggcccctgcccagtgggcagcgtggaagtttccatacaaggaggtgggaaggagacccccccccccttcactgccctgtgcagagatgagccgggggtgcaggatgggagcccatggcacttcgctacgggatggtccagggctcccggttgggggtgcaggagagaagagactggctgggaggagggagagggcgggagcaaaggcgcgggggagtggtcagcagggagaggggtggggggtagggtggagcccgggctgggaggagtcggctcacacataaaagctgaggcactgaccagcctgcaaactggacattagcttctcctgtgaaagagacttccagcttcctcctcctcctcttcctcctcctcctcctgccccagcgagccttctgctgagctgtaggtaaccagggctgtggagtgaggacccccgctgccatcccactccagcctgaggcagggcagcagggggcacggcccacgcctgggcctcgggccctgcagccgccagcccgctgcctctcggacagcacccccctcccctcttttcctctgcccctgcccccacctggtctctgctccctcacctgctccttccctttctgttccttcccttcggccccctccttgcccagctcaggacttttcctgggccctcacctgctccgcaccgctgcatgcttcctgtcctgctttctgccggtcccctgacccggacctccaagttcagagtggtggggcttgttgcggaagcgcggcgagggctagagtggccagctggcggagtgtgctcttagaatttggaagggggtggcagagggggcggtgagaggactggccagggtccagtcaaggagatgaccaaggaggctttcagatcctcggcgcagctgcccactagtctttagagagggcatgcaaagttgtgcttctgtcccactgcctgctcagtcgctcacataatttattgcatcaaaaactcccctgggtctgcggagcgaaggctggggctgcccgcctggagggttccaccttctgcaggggcagggccaacttgctgtggtggctcccggcctcccacccccgagtgggttaacccggccctgtggccctgcagcctgtggagggggtgtgtcctaagactggcctccccttccagattgtagtctggggaacctggtgtcggacttcccaggtggcctgagctggtctctccagctcccacggggagagtttggtagcgcaaatagggagatgttctggaggcccctggccttactggttcgatttgaggcctggaaaggaggctctgggcgtgtgtgtgtgtgtttgggggtacccaaggcagactggagttggagaactgggtgactgggaaaacaaggtttctagagcatgggtggcgtggttgtgttaaccattggagtccttgacccaggcctggctcagctgcagactggaaaggtggaaaagccagggggaggggcggggctggcccagcaggactggcctgctgctttgagggcgatggtcctcctggaccccccctgctcagctgggggttgtggggaggaagggactggtcctcctggatgcacatgctctgtaggggtggggctgtctgccatcttggctggcgctggaggcctgagaagtggcgatgtgacgctgggctggccctgcccccatggtgtcataggacggaggccaggtcgggtgtccagcctgggcccctgcagctgtggatgccgctgagctcctgcaataatgaccgtggagatggtcacccctcgtgtaaaattactagtgcttcttgcaaatggaaggaactgggccttttctgtgtgcttctggacgcttcattctgcacatggccctgcgccctcacctcggcattatgacctgtgtgttacttttgtaataaaaataatgtttataggaaagccgtgctttcaattttcaactgaatttgtaggttggcaaatttggtttgggaggggcacctctggcctggggcttggcctggctgccccgctcacgccacttctctcccgcccccagacaccaatgggaatcccaatggggaagtcgatgctggtgcttctcaccttcttggccttcgcctcgtgctgcattgctgcttaccgccccagtgagaccctgtgcggcggggagctggtggacaccctccagttcgtctgtggggaccgcggcttctacttcagtaagtagctgggaggggcttcctcagacctggtcaggcccctagagtgaccggtgaggacgcccaacctcaagccaggggagcacactcctaggtcagcagcccagccgcttgctctgagactttgaccttcccgccgcgtttctgagcacgtgcggtgtcccagggcatccacaccagctgcctttcccatcacacgcctccttcgaagggtgggccagaggtgccccctagacgtcaggggcactcacaggggtctccctgggcatcagaatttctgttgggggccgtgaggctcctgctcctgaggcaccgcacgcctagtgcagggcttcaggctctggaggaagagcctgcctttcttcctgcaccttttggacattctgacaagggacgtgcgttcggtgaatgatcagaattaaaatcaataaagtgatttatataattaaaatcaataagacaagtgcagttggtgggtggcaggggtgagcggtgcatgcgcctccttgggccccaaggctgccgtggggggtgcccacctgctgacctcaaggacgcttcagcctttcctcatgtttctctcttggttctccagcctgggggctggcaggtgggtgcatggcccattgtccttgagaccccacccccagataggggggctgggtggatgcagaggcaggcatggtgcctgggcatgcctgatggggcaggggaggggccgctccttactggcagaggccgcacggcttattccacctgacactcaccacgtgacatctttaccaccactgcttactcacgctgtgaaatgggctcacaggatgcaaatgcacttcaaagcttctctctgaaaagttcctgctgcttgactctggaagcccctgcccgccctggcctctcctgtgccctctctcttgcctgccccatttgggggtaggaagtggca

SEQ ID NO: 1615 - DNA, 6000 bp, Homo sapiens
ccagccttccaaagcaaattgagatttttttcccttcacaaaacaattgaggtttttttttttttaatactgatttatgagtctcctgactttatggtccctgccctgggtccccctacatttagaaaatgttccatggacccccaaagcacactaaaaaatgtccctgggtcccaagaaatcccaggcatggaaaaacctgcgacctataagtttcctagctactaactaggtttccagaaatttagatatcaaatctccattgggtaatttccatgtgtcccaaaaacttgaaatgtgtttcactggggctcccccaaatgcagacgacatccaggaaaatatatagtctttttcttatttaccaaaaataagctaatggaaatcatttaaaaattagcatagaaaaataatactgattttttatttttttattttttattttgctttccccaaatgtactgatcacactccaggctcccccaaaatctagacagtgctttcttccatctctgaagggtgttaaaacctttccctgaagccacagtaattatgaaggttattttttccccggctgctgccagcgtccaggccactaacttatattcttaagatgtgaaaattaatctcagcttccccctaacacaccaagaatgtgtttggatccccaaaatgtgttccttgctttcatctgccaattttacgtaatatggctctacggcaaaattcccaatttcatatggagaattttctttaactacccctcctcacaaattggtcccccaagctagctggcccctatttgagacctctttctctatgttcccaattgcatggagcaacttctctcatcccccaaacctgtaatctatttttctggagtctcgagtttagtcattaatcacggttcccacattaacggagtccccggggtcccctcctccaggacacccattcgctaagcccgcaaggcagaaagaactctgccttgcgttccccaaaatttgggcattgttcccggctcgccggccacccactgcagcttccccaaccccgcgcacagcgggcactggtttcgggcctctctgtctcctacgaagtccccagagcaactcggatttgggaaatttctctctagcgttgcccaaacacacttgggtcggccgcgcgccctcaggacgtggacagggagggcttccccgtgtccaggaaagcgaccgggcattgcccccagtctcccccaaatttgggcattgtccccgggtcttccaacggactgggcgttgctcccggacactgaggactggccccggggtctcgctcaccttcagcagcgtccaccgcctgccacagagcgttcgatcgctcgctgcctgagctcctggtgcgcccgcggacgcagcctccagcttcgcggtgagctccccgccgcgccgatcccctccgcctctgcgcccctgaccggctctcggcccgcatctgctgctgtcccgccggtgctggcgctcgtctccggctgccgccggggaggccggcgtggggcgcgggacacggctgcggacttgcggctggcggctgcgctcgctcctgctgggcgccccgaaatccgcgccactttcgtttgctcattgcaaagatctcatttgtggggaaagcggctggagggtcccaaagtggggcgggcagggggctggggcgagggacgcggaggagaggcgctcccgccgggcggtaaagtgcctctagcccgcgggcctaggactccgccgggaggcgcgcgcggagcgcgggcgaagtgattgatggcggagcgaggggggcgaggggggccaggggggcgcgagattccgccggcggccccttccccttggctaggcttaggcggcggggggctggcggggtgcgggattttgtgcgtggtttttgacttggtaaaaatcacagtgctttcttacatcgttcaaactctccaggagatggtttccccagacccccaaattatcgtggtggcccccgagaccgaactcgcgtctatgcaagtccaacgcactgaggacggggtaaccattatccagatattttgggtgggccgcaaaggcgagctacttagacgcaccccggtgagctcggccatgcaggtaggatttgagctgtgtttcccgccctgatcctctctcctctggcggccggagcctccgtaggctccaagcctggcccagattcggcccggcgcagccggccttccgcgcgtcccgcacctggcgggggctccggggctccggcgcggcaccggggggcgctcgggatctggctgaggctccaagcgccgcgtggccggctcctcctgctggggcaggtggcggctgcgcgccccgcccgagcccaggggccccctcagccgcaacaaccagcaaggaccccccgactcagccccaagccacctgcatctgcactcagacggggcgcacccgcagtgcagcctcctggtggggcgctgggagcccgcctgcccctgcctgcccggagaccccagctcacgagcacaggccgcccgggcaccccagaaacccgggatggggcccctgaattctctagaacgggcattcagcatggccttggcgctctgcggctccctgccccccacccagcctcgcccccgcgcaccccccagcccctgcgaccgccgccccccccccggggccccagggcccccagcccgcaccccccgccccgctcttggctcgggttgcgggggcgggccgggggcggggcgagggctccgcgggcgcccattggcgcgggcgcgaggccagcgaggcccgcgcgggccctgggccgcgggctggcgcgactataagagccgggcgtgggcgcccgcagttcgcctgctctccggcggagctgcgtgaggcccggccggccccggccccccccttccggccgcccccgcctcctggcccacgcctgcccgcgctctgcccaccagcgcctccatcgggcaaggcggccccgcgtcgacgccgcccgctgcctcgctgctgactcccgtcccgggcgccgtccgcggggtcgcgctccgccgggcctgcggattccccgccgcctcctcttcatctacctcaactccccccatccccgcttcgcccgaggaggcggttccccccgcaggcagtccggctcgcaggccgccggcgttgtcacccccccccgcgctccccctccagccctccccccggcgcgcagcctcgggccgctcccctttccgcgctgcgtcccggagcggccccggtgccgccaccgcctgtccccctcccgaggcccgggctcgcgacggcagagggctccgtcggcccaaaccgagctgggcgcccgcggtccgggtgcagcctccactccgccccccagtcaccgcctcccccggcccctcgacgtggcgcccttccctccgcttctctgtgctccccgcgcccctcttggcgtctggccccggcccccgctctttctcccgcaaccttcccttcgctccctcccgtcccccccagctcctagcctccgactccctccccccctcacgcccgccctctcgccttcgccgaaccaaagtggattaattacacgctttctgtttctctccgtgctgttctctcccgctgtgcgcctgcccgcctctcgctgtcctctctccccctcgccctctcttcggcccccccctttcacgttcactctgtctctcccactatctctgcccccctctatccttgatacaacagctgacctcatttcccgataccttttcccccccgaaaagtacaacatctggcccgccccagcccgaagacagcccgtcctccctggacaatcagacgaattctccccccccccccaaaaaaaagccatccccccgctctgccccgtcgcacattcggcccccgcgactcggccagagcggcgctggcagaggagtgtccggcaggagggccaacgcccgctgttcggtttgcgacacgcagcagggaggtgggcggcagcgtcgccggcttccaggtaagcggcgtgtgcgggccgggccggggccggggctggggcggcgcgggcttgcgccggacgcccggcccttcctccgcccgctcccggcccggggcctgcggggctcggcggggcggctgagcccgggggggaggaggaggaggaggaggaggacggacggctgcgggtcccgttccctgcgcggagccccgcgctcaccctggcggcggagctgggggtggggtgggggcgtcgggaagggccgagggaggtgtgaggtgtctgcaggggcgacttcccggtcggtctgtgggtgcagggggtgccgcctcacatgtgtgattcgtgccttgcgggccctggcctccggggtgctgggtaacgaggaggggcgcggagccgcagaagcccaccctggtatgttgacgcggtgccagcgagaccgcgagaggaagacgggggtgggcggggccaggatggagaggggccgagttggcaggagtcatggcagacgccacattcgcgacatctcccccacaccccctctggctctgtccgcaacatttccaaacaggagtcccgggagagggggagaggggctgctggtctgaggctaagaagggcagagccttcgacccggagagaggccgcggcccctgcccagtgggcagcgtggaagtttccatacaaggaggtgggaaggagacccccccccccttcactgccctgtgcagagatgagccgggggtgcaggatgggagcccatggcacttcgctacgggatggtccagggctcccggttgggggtgcaggagagaagagactggctgggaggagggagagggcgggagcaaaggcgcgggggagtggtcagcagggagaggggtggggggtagggtggagcccgggctgggaggagtcggctcacacataaaagctgaggcactgaccagcctgcaaactggacattagcttctcctgtgaaagagacttccagcttcctcctcctcctcttcctcctcctcctcctgccccagcgagccttctgctgagctgtaggtaaccagggctgtggagtgaggacccccgctgccatcccactccagcctgaggcagggcagcagggggcacggcccacgcctgggcctcgggccctgcagccgccagcccgctgcctctcggacagcacccccctcccctcttttcctctgcccctgcccccacctggtctctgctccctcacctgctccttccctttctgttccttcccttcggccccctccttgcccagctcaggacttttcctgggccctcacctgctccgcaccgctgcatgcttcctgtcctgctttctgccggtcccctgacccggacctccaagttcagagtggtggggcttgttgcggaagcgcggcgagggctagagtggccagctggcggagtgtgctcttagaatttggaagggggtggcagagggggcggtgagaggactggccagggtccagtcaaggagatgaccaaggaggctttcagatcctcggcgcagctgcccactagtctttagagagggcatgcaaagttgtgcttctgtcccactgcctgctcagtcgctcacataatttattgcatcaaaaactcccctgggtctgcggagcgaaggctggggctgcccgcctggagggttccaccttctgcaggggcagggccaacttgctgtggtggctcccggcctcccacccccgagtgggttaacccggccctgtggccctgcagcctgtggagggggtgtgtcctaagactggcctccccttccagattgtagtctggggaacctggtgtcggacttcccaggtggcctgagctggtctctccagctcccacggggagagtttggtagcgcaaatagggagatgttctggaggcccctggccttactggttcgatttgaggcctggaaaggaggctctgggcgtg

SEQ ID NO: 1616 - DNA, 6000 bp, Homo sapiens
tccaccttggggtgccaaagggcaggtgccatcagccggaggagggagcaggagccccatcacgggggtcccccaagtgggggcttggccctcccctcctctcaggaaagcctggtgcagggaagcttctccctgggcaaggactggctggcaccaggccctgcagtgccacttcctacccccaaatggggcaggcaagagagagggcacaggagaggccagggcgggcaggggcttccagagtcaagcagcaggaacttttcagagagaagctttgaagtgcatttgcatcctgtgagcccatttcacagcgtgagtaagcagtggtggtaaagatgtcacgtggtgagtgtcaggtggaataagccgtgcggcctctgccagtaaggagcggcccctcccctgccccatcaggcatgcccaggcaccatgcctgcctctgcatccacccagcccccctatctgggggtggggtctcaaggacaatgggccatgcacccacctgccagcccccaggctggagaaccaagagagaaacatgaggaaaggctgaagcgtccttgaggtcagcaggtgggcaccccccacggcagccttggggcccaaggaggcgcatgcaccgctcacccctgccacccaccaactgcacttgtcttattgattttaattatataaatcactttattgattttaattctgatcattcaccgaacgcacgtcccttgtcagaatgtccaaaaggtgcaggaagaaaggcaggctcttcctccagagcctgaagccctgcactaggcgtgcggtgcctcaggagcaggagcctcacggcccccaacagaaattctgatgcccagggagacccctgtgagtgcccctgacgtctagggggcacctctggcccacccttcgaaggaggcgtgtgatgggaaaggcagctggtgtggatgccctgggacaccgcacgtgctcagaaacgcggcgggaaggtcaaagtctcagagcaagcggctgggctgctgacctaggagtgtgctcccctggcttgaggttgggcgtcctcaccggtcactctaggggcctgaccaggtctgaggaagcccctcccagctacttactgaagtagaagccgcggtccccacagacgaactggagggtgtccaccagctccccgccgcacagggtctcactggggcggtaagcagcaatgcagcacgaggcgaaggccaagaaggtgagaagcaccagcatcgacttccccattgggattcccattggtgtctgggggcgggagagaagtggcgtgagcggggcagccaggccaagccccaggccagaggtgcccctcccaaaccaaatttgccaacctacaaattcagttgaaaattgaaagcacggctttcctataaacattatttttattacaaaagtaacacacaggtcataatgccgaggtgagggcgcagggccatgtgcagaatgaagcgtccagaagcacacagaaaaggcccagttccttccatttgcaagaagcactagtaattttacacgaggggtgaccatctccacggtcattattgcaggagctcagcggcatccacagctgcaggggcccaggctggacacccgacctggcctccgtcctatgacaccatgggggcagggccagcccagcgtcacatcgccacttctcaggcctccagcgccagccaagatggcagacagccccacccctacagagcatgtgcatccaggaggaccagtcccttcctccccacaacccccagctgagcagggggggtccaggaggaccatcgccctcaaagcagcaggccagtcctgctgggccagccccgcccctccccctggcttttccacctttccagtctgcagctgagccaggcctgggtcaaggactccaatggttaacacaaccacgccacccatgctctagaaaccttgttttcccagtcacccagttctccaactccagtctgccttgggtacccccaaacacacacacacacgcccagagcctcctttccaggcctcaaatcgaaccagtaaggccaggggcctccagaacatctccctatttgcgctaccaaactctccccgtgggagctggagagaccagctcaggccacctgggaagtccgacaccaggttccccagactacaatctggaaggggaggccagtcttaggacacaccccctccacaggctgcagggccacagggccgggttaacccactcgggggtgggaggccgggagccaccacagcaagttggccctgcccctgcagaaggtggaaccctccaggcgggcagccccagccttcgctccgcagacccaggggagtttttgatgcaataaattatgtgagcgactgagcaggcagtgggacagaagcacaactttgcatgccctctctaaagactagtgggcagctgcgccgaggatctgaaagcctccttggtcatctccttgactggaccctggccagtcctctcaccgccccctctgccacccccttccaaattctaagagcacactccgccagctggccactctagccctcgccgcgcttccgcaacaagccccaccactctgaacttggaggtccgggtcaggggaccggcagaaagcaggacaggaagcatgcagcggtgcggagcaggtgagggcccaggaaaagtcctgagctgggcaaggagggggccgaagggaaggaacagaaagggaaggagcaggtgagggagcagagaccaggtgggggcaggggcagaggaaaagaggggaggggggtgctgtccgagaggcagcgggctggcggctgcagggcccgaggcccaggcgtgggccgtgccccctgctgccctgcctcaggctggagtgggatggcagcgggggtcctcactccacagccctggttacctacagctcagcagaaggctcgctggggcaggaggaggaggaggaagaggaggaggaggaagctggaagtctctttcacaggagaagctaatgtccagtttgcaggctggtcagtgcctcagcttttatgtgtgagccgactcctcccagcccgggctccaccctaccccccacccctctccctgctgaccactcccccgcgcctttgctcccgccctctccctcctcccagccagtctcttctctcctgcacccccaaccgggagccctggaccatcccgtagcgaagtgccatgggctcccatcctgcacccccggctcatctctgcacagggcagtgaagggggggggggtctccttcccacctccttgtatggaaacttccacgctgcccactgggcaggggccgcggcctctctccgggtcgaaggctctgcccttcttagcctcagaccagcagcccctctccccctctcccgggactcctgtttggaaatgttgcggacagagccagagggggtgtgggggagatgtcgcgaatgtggcgtctgccatgactcctgccaactcggcccctctccatcctggccccgcccacccccgtcttcctctcgcggtctcgctggcaccgcgtcaacataccagggtgggcttctgcggctccgcgcccctcctcgttacccagcaccccggaggccagggcccgcaaggcacgaatcacacatgtgaggcggcaccccctgcacccacagaccgaccgggaagtcgcccctgcagacacctcacacctccctcggcccttcccgacgcccccaccccacccccagctccgccgccagggtgagcgcggggctccgcgcagggaacgggacccgcagccgtccgtcctcctcctcctcctcctcctcccccccgggctcagccgccccgccgagccccgcaggccccgggccgggagcgggcggaggaagggccgggcgtccggcgcaagcccgcgccgccccagccccggccccggcccggcccgcacacgccgcttacctggaagccggcgacgctgccgcccacctccctgctgcgtgtcgcaaaccgaacagcgggcgttggccctcctgccggacactcctctgccagcgccgctctggccgagtcgcgggggccgaatgtgcgacggggcagagcggggggatggcttttttttggggggggggggagaattcgtctgattgtccagggaggacgggctgtcttcgggctggggcgggccagatgttgtacttttcgggggggaaaaggtatcgggaaatgaggtcagctgttgtatcaaggatagaggggggcagagatagtgggagagacagagtgaacgtgaaaggggggggccgaagagagggcgagggggagagaggacagcgagaggcgggcaggcgcacagcgggagagaacagcacggagagaaacagaaagcgtgtaattaatccactttggttcggcgaaggcgagagggcgggcgtgagggggggagggagtcggaggctaggagctgggggggacgggagggagcgaagggaaggttgcgggagaaagagcgggggccggggccagacgccaagaggggcgcggggagcacagagaagcggagggaagggcgccacgtcgaggggccgggggaggcggtgactggggggcggagtggaggctgcacccggaccgcgggcgcccagctcggtttgggccgacggagccctctgccgtcgcgagcccgggcctcgggagggggacaggcggtggcggcaccggggccgctccgggacgcagcgcggaaaggggagcggcccgaggctgcgcgccggggggagggctggagggggagcgcgggggggggtgacaacgccggcggcctgcgagccggactgcctgcggggggaaccgcctcctcgggcgaagcggggatggggggagttgaggtagatgaagaggaggcggcggggaatccgcaggcccggcggagcgcgaccccgcggacggcgcccgggacgggagtcagcagcgaggcagcgggcggcgtcgacgcggggccgccttgcccgatggaggcgctggtgggcagagcgcgggcaggcgtgggccaggaggcgggggcggccggaaggggggggccggggccggccgggcctcacgcagctccgccggagagcaggcgaactgcgggcgcccacgcccggctcttatagtcgcgccagcccgcggcccagggcccgcgcgggcctcgctggcctcgcgcccgcgccaatgggcgcccgcggagccctcgccccgcccccggcccgcccccgcaacccgagccaagagcggggcggggggtgcgggctgggggccctggggccccggggggggggcggcggtcgcaggggctggggggtgcgcgggggcgaggctgggtggggggcagggagccgcagagcgccaaggccatgctgaatgcccgttctagagaattcaggggccccatcccgggtttctggggtgcccgggcggcctgtgctcgtgagctggggtctccgggcaggcaggggcaggcgggctcccagcgccccaccaggaggctgcactgcgggtgcgccccgtctgagtgcagatgcaggtggcttggggctgagtcggggggtccttgctggttgttgcggctgagggggcccctgggctcgggcggggcgcgcagccgccacctgccccagcaggaggagccggccacgcggcgcttggagcctcagccagatcccgagcgccccccggtgccgcgccggagccccggagcccccgccaggtgcgggacgcgcggaaggccggctgcgccgggccgaatctgggccaggcttggagcctacggaggctccggccgccagaggagagaggatcagggcgggaaacacagctcaaatcctacctgcatggccgagctcaccggggtgcgtctaagtagctcgcctttgcggcccacccaaaatatctggataatggttaccccgtcctcagtgcgttggacttgcatagacgcgagttcggt

SEQ ID NO: 1617 - DNA, 6000 bp, Homo sapiens
ttcccggggagggcgccagtgctccgcgcgcgccccagccaaggtgaatccccggcagcgccttccttccgctgcccgggaagcttgagctcaacaattagcccttgatcctcgggggattccaatccacggaacaacttccctgctttccccgaactcggacattttactttttctgggatcctctaaatttaagcattgcttcccaagtcttctaaatatactcaccatttcgacgggtcacaataattttcttggacgttaatttccggggacgtcaaaacacatcagtcccggcgggcttttccagacttacactatgtggcctggggccccagatgtgctttctcccaggctctggacagttttatacaccccctccaggtcccacagatttacaggccactaacccggcttccctaattttaaagacgaagcccttggtccgtggtggtcgcgctgaccaatttgcctggctccccaggatgtggacagtgccttttccacatttaggcattgtttccaaaacaagtggaactttcccgcataattttgaatattaactccagggtctcctaagcttactgtttccggcacacgtccgccccattccgcgcccccccaccccacccccgcgccccttcccgttcacctcagcatgggacatttgctgttgggtcccgcaaatctattcacactaacctgggttccctaaactttacacgttgaatcccaagtccctcatgacactcagcagggctggaaggttggaaccctcagagtatgaaaattgcttcccataccttcccccaaattcggtcattacacccagagcatgttgaatccttttctgaatcataaacgacctgccctctgattgcctgagtttcataaaatggagggatttccccagtgattccccaaagctattgagaatgttgtgggtgtgtgagtcacaaagctttggggcattaacgtctatggctctatatgctgcctggccacgaatcaggtcccttaagatgtagacagtgccacccaggtccctggagcacactgagcagttaccaggaggtgctcaagtgtgacccaggattctccaggtccccccaaatcacacagggtctcccgggtccctctgggctacaccaagcacaaaaggaccccttgggcagagcctacttttatttctgttatgccaggtgttgctaacggccccagttcccaaacattccgagcactttctctgcatcacaacatattgactattaaacaattctctgggtcccaggagcttcataacaagaatcttgcttttctaaaattcaggcattggtctgaaaccccaacggccaggatcacactggacccttttcctggtcccccatacttggatgttctggacgctgccctccaggccctctaggaacattcagcattgccctcggatcacaggacagcactgatttcttgggctccaaacaacccactgagtcatctcaaagttaagcaatatttccttcaagcacactgcacactccctatcacaaaatctgaaaattcctaagtcctaagacctaggaattctgaatcccctttctttaaaatgtacatatggacccccaagtcctccaaggactctgagcaacttccctagatctttagattcaaaaacgattttcctggagcccccaaattgcggtattgtctcccagccttccaaagcaaattgagatttttttcccttcacaaaacaattgaggtttttttttttttaatactgatttatgagtctcctgactttatggtccctgccctgggtccccctacatttagaaaatgttccatggacccccaaagcacactaaaaaatgtccctgggtcccaagaaatcccaggcatggaaaaacctgcgacctataagtttcctagctactaactaggtttccagaaatttagatatcaaatctccattgggtaatttccatgtgtcccaaaaacttgaaatgtgtttcactggggctcccccaaatgcagacgacatccaggaaaatatatagtctttttcttatttaccaaaaataagctaatggaaatcatttaaaaattagcatagaaaaataatactgattttttatttttttattttttattttgctttccccaaatgtactgatcacactccaggctcccccaaaatctagacagtgctttcttccatctctgaagggtgttaaaacctttccctgaagccacagtaattatgaaggttattttttccccggctgctgccagcgtccaggccactaacttatattcttaagatgtgaaaattaatctcagcttccccctaacacaccaagaatgtgtttggatccccaaaatgtgttccttgctttcatctgccaattttacgtaatatggctctacggcaaaattcccaatttcatatggagaattttctttaactacccctcctcacaaattggtcccccaagctagctggcccctatttgagacctctttctctatgttcccaattgcatggagcaacttctctcatcccccaaacctgtaatctatttttctggagtctcgagtttagtcattaatcacggttcccacattaacggagtccccggggtcccctcctccaggacacccattcgctaagcccgcaaggcagaaagaactctgccttgcgttccccaaaatttgggcattgttcccggctcgccggccacccactgcagcttccccaaccccgcgcacagcgggcactggtttcgggcctctctgtctcctacgaagtccccagagcaactcggatttgggaaatttctctctagcgttgcccaaacacacttgggtcggccgcgcgccctcaggacgtggacagggagggcttccccgtgtccaggaaagcgaccgggcattgcccccagtctcccccaaatttgggcattgtccccgggtcttccaacggactgggcgttgctcccggacactgaggactggccccggggtctcgctcaccttcagcagcgtccaccgcctgccacagagcgttcgatcgctcgctgcctgagctcctggtgcgcccgcggacgcagcctccagcttcgcggtgagctccccgccgcgccgatcccctccgcctctgcgcccctgaccggctctcggcccgcatctgctgctgtcccgccggtgctggcgctcgtctccggctgccgccggggaggccggcgtggggcgcgggacacggctgcggacttgcggctggcggctgcgctcgctcctgctgggcgccccgaaatccgcgccactttcgtttgctcattgcaaagatctcatttgtggggaaagcggctggagggtcccaaagtggggcgggcagggggctggggcgagggacgcggaggagaggcgctcccgccgggcggtaaagtgcctctagcccgcgggcctaggactccgccgggaggcgcgcgcggagcgcgggcgaagtgattgatggcggagcgaggggggcgaggggggccaggggggcgcgagattccgccggcggccccttccccttggctaggcttaggcggcggggggctggcggggtgcgggattttgtgcgtggtttttgacttggtaaaaatcacagtgctttcttacatcgttcaaactctccaggagatggtttccccagacccccaaattatcgtggtggcccccgagaccgaactcgcgtctatgcaagtccaacgcactgaggacggggtaaccattatccagatattttgggtgggccgcaaaggcgagctacttagacgcaccccggtgagctcggccatgcaggtaggatttgagctgtgtttcccgccctgatcctctctcctctggcggccggagcctccgtaggctccaagcctggcccagattcggcccggcgcagccggccttccgcgcgtcccgcacctggcgggggctccggggctccggcgcggcaccggggggcgctcgggatctggctgaggctccaagcgccgcgtggccggctcctcctgctggggcaggtggcggctgcgcgccccgcccgagcccaggggccccctcagccgcaacaaccagcaaggaccccccgactcagccccaagccacctgcatctgcactcagacggggcgcacccgcagtgcagcctcctggtggggcgctgggagcccgcctgcccctgcctgcccggagaccccagctcacgagcacaggccgcccgggcaccccagaaacccgggatggggcccctgaattctctagaacgggcattcagcatggccttggcgctctgcggctccctgccccccacccagcctcgcccccgcgcaccccccagcccctgcgaccgccgccccccccccggggccccagggcccccagcccgcaccccccgccccgctcttggctcgggttgcgggggcgggccgggggcggggcgagggctccgcgggcgcccattggcgcgggcgcgaggccagcgaggcccgcgcgggccctgggccgcgggctggcgcgactataagagccgggcgtgggcgcccgcagttcgcctgctctccggcggagctgcgtgaggcccggccggccccggccccccccttccggccgcccccgcctcctggcccacgcctgcccgcgctctgcccaccagcgcctccatcgggcaaggcggccccgcgtcgacgccgcccgctgcctcgctgctgactcccgtcccgggcgccgtccgcggggtcgcgctccgccgggcctgcggattccccgccgcctcctcttcatctacctcaactccccccatccccgcttcgcccgaggaggcggttccccccgcaggcagtccggctcgcaggccgccggcgttgtcacccccccccgcgctccccctccagccctccccccggcgcgcagcctcgggccgctcccctttccgcgctgcgtcccggagcggccccggtgccgccaccgcctgtccccctcccgaggcccgggctcgcgacggcagagggctccgtcggcccaaaccgagctgggcgcccgcggtccgggtgcagcctccactccgccccccagtcaccgcctcccccggcccctcgacgtggcgcccttccctccgcttctctgtgctccccgcgcccctcttggcgtctggccccggcccccgctctttctcccgcaaccttcccttcgctccctcccgtcccccccagctcctagcctccgactccctccccccctcacgcccgccctctcgccttcgccgaaccaaagtggattaattacacgctttctgtttctctccgtgctgttctctcccgctgtgcgcctgcccgcctctcgctgtcctctctccccctcgccctctcttcggcccccccctttcacgttcactctgtctctcccactatctctgcccccctctatccttgatacaacagctgacctcatttcccgataccttttcccccccgaaaagtacaacatctggcccgccccagcccgaagacagcccgtcctccctggacaatcagacgaattctccccccccccccaaaaaaaagccatccccccgctctgccccgtcgcacattcggcccccgcgactcggccagagcggcgctggcagaggagtgtccggcaggagggccaacgcccgctgttcggtttgcgacacgcagcagggaggtgggcggcagcgtcgccggcttccaggtaagcggcgtgtgcgggccgggccggggccggggctggggcggcgcgggcttgcgccggacgcccggcccttcctccgcccgctcccggcccggggcctgcggggctcggcggggcggctgagcccgggggggaggaggaggaggaggaggaggacggacggctgcgggtcccgttccctgcgcggagccccgcgctcaccctggcggcggagctgggggtggggtgggggcgtcgggaagggc

SEQ ID NO: 1618 - DNA, 6000 bp, Homo sapiens
ccatttgcaagaagcactagtaattttacacgaggggtgaccatctccacggtcattattgcaggagctcagcggcatccacagctgcaggggcccaggctggacacccgacctggcctccgtcctatgacaccatgggggcagggccagcccagcgtcacatcgccacttctcaggcctccagcgccagccaagatggcagacagccccacccctacagagcatgtgcatccaggaggaccagtcccttcctccccacaacccccagctgagcagggggggtccaggaggaccatcgccctcaaagcagcaggccagtcctgctgggccagccccgcccctccccctggcttttccacctttccagtctgcagctgagccaggcctgggtcaaggactccaatggttaacacaaccacgccacccatgctctagaaaccttgttttcccagtcacccagttctccaactccagtctgccttgggtacccccaaacacacacacacacgcccagagcctcctttccaggcctcaaatcgaaccagtaaggccaggggcctccagaacatctccctatttgcgctaccaaactctccccgtgggagctggagagaccagctcaggccacctgggaagtccgacaccaggttccccagactacaatctggaaggggaggccagtcttaggacacaccccctccacaggctgcagggccacagggccgggttaacccactcgggggtgggaggccgggagccaccacagcaagttggccctgcccctgcagaaggtggaaccctccaggcgggcagccccagccttcgctccgcagacccaggggagtttttgatgcaataaattatgtgagcgactgagcaggcagtgggacagaagcacaactttgcatgccctctctaaagactagtgggcagctgcgccgaggatctgaaagcctccttggtcatctccttgactggaccctggccagtcctctcaccgccccctctgccacccccttccaaattctaagagcacactccgccagctggccactctagccctcgccgcgcttccgcaacaagccccaccactctgaacttggaggtccgggtcaggggaccggcagaaagcaggacaggaagcatgcagcggtgcggagcaggtgagggcccaggaaaagtcctgagctgggcaaggagggggccgaagggaaggaacagaaagggaaggagcaggtgagggagcagagaccaggtgggggcaggggcagaggaaaagaggggaggggggtgctgtccgagaggcagcgggctggcggctgcagggcccgaggcccaggcgtgggccgtgccccctgctgccctgcctcaggctggagtgggatggcagcgggggtcctcactccacagccctggttacctacagctcagcagaaggctcgctggggcaggaggaggaggaggaagaggaggaggaggaagctggaagtctctttcacaggagaagctaatgtccagtttgcaggctggtcagtgcctcagcttttatgtgtgagccgactcctcccagcccgggctccaccctaccccccacccctctccctgctgaccactcccccgcgcctttgctcccgccctctccctcctcccagccagtctcttctctcctgcacccccaaccgggagccctggaccatcccgtagcgaagtgccatgggctcccatcctgcacccccggctcatctctgcacagggcagtgaagggggggggggtctccttcccacctccttgtatggaaacttccacgctgcccactgggcaggggccgcggcctctctccgggtcgaaggctctgcccttcttagcctcagaccagcagcccctctccccctctcccgggactcctgtttggaaatgttgcggacagagccagagggggtgtgggggagatgtcgcgaatgtggcgtctgccatgactcctgccaactcggcccctctccatcctggccccgcccacccccgtcttcctctcgcggtctcgctggcaccgcgtcaacataccagggtgggcttctgcggctccgcgcccctcctcgttacccagcaccccggaggccagggcccgcaaggcacgaatcacacatgtgaggcggcaccccctgcacccacagaccgaccgggaagtcgcccctgcagacacctcacacctccctcggcccttcccgacgcccccaccccacccccagctccgccgccagggtgagcgcggggctccgcgcagggaacgggacccgcagccgtccgtcctcctcctcctcctcctcctcccccccgggctcagccgccccgccgagccccgcaggccccgggccgggagcgggcggaggaagggccgggcgtccggcgcaagcccgcgccgccccagccccggccccggcccggcccgcacacgccgcttacctggaagccggcgacgctgccgcccacctccctgctgcgtgtcgcaaaccgaacagcgggcgttggccctcctgccggacactcctctgccagcgccgctctggccgagtcgcgggggccgaatgtgcgacggggcagagcggggggatggcttttttttggggggggggggagaattcgtctgattgtccagggaggacgggctgtcttcgggctggggcgggccagatgttgtacttttcgggggggaaaaggtatcgggaaatgaggtcagctgttgtatcaaggatagaggggggcagagatagtgggagagacagagtgaacgtgaaaggggggggccgaagagagggcgagggggagagaggacagcgagaggcgggcaggcgcacagcgggagagaacagcacggagagaaacagaaagcgtgtaattaatccactttggttcggcgaaggcgagagggcgggcgtgagggggggagggagtcggaggctaggagctgggggggacgggagggagcgaagggaaggttgcgggagaaagagcgggggccggggccagacgccaagaggggcgcggggagcacagagaagcggagggaagggcgccacgtcgaggggccgggggaggcggtgactggggggcggagtggaggctgcacccggaccgcgggcgcccagctcggtttgggccgacggagccctctgccgtcgcgagcccgggcctcgggagggggacaggcggtggcggcaccggggccgctccgggacgcagcgcggaaaggggagcggcccgaggctgcgcgccggggggagggctggagggggagcgcgggggggggtgacaacgccggcggcctgcgagccggactgcctgcggggggaaccgcctcctcgggcgaagcggggatggggggagttgaggtagatgaagaggaggcggcggggaatccgcaggcccggcggagcgcgaccccgcggacggcgcccgggacgggagtcagcagcgaggcagcgggcggcgtcgacgcggggccgccttgcccgatggaggcgctggtgggcagagcgcgggcaggcgtgggccaggaggcgggggcggccggaaggggggggccggggccggccgggcctcacgcagctccgccggagagcaggcgaactgcgggcgcccacgcccggctcttatagtcgcgccagcccgcggcccagggcccgcgcgggcctcgctggcctcgcgcccgcgccaatgggcgcccgcggagccctcgccccgcccccggcccgcccccgcaacccgagccaagagcggggcggggggtgcgggctgggggccctggggccccggggggggggcggcggtcgcaggggctggggggtgcgcgggggcgaggctgggtggggggcagggagccgcagagcgccaaggccatgctgaatgcccgttctagagaattcaggggccccatcccgggtttctggggtgcccgggcggcctgtgctcgtgagctggggtctccgggcaggcaggggcaggcgggctcccagcgccccaccaggaggctgcactgcgggtgcgccccgtctgagtgcagatgcaggtggcttggggctgagtcggggggtccttgctggttgttgcggctgagggggcccctgggctcgggcggggcgcgcagccgccacctgccccagcaggaggagccggccacgcggcgcttggagcctcagccagatcccgagcgccccccggtgccgcgccggagccccggagcccccgccaggtgcgggacgcgcggaaggccggctgcgccgggccgaatctgggccaggcttggagcctacggaggctccggccgccagaggagagaggatcagggcgggaaacacagctcaaatcctacctgcatggccgagctcaccggggtgcgtctaagtagctcgcctttgcggcccacccaaaatatctggataatggttaccccgtcctcagtgcgttggacttgcatagacgcgagttcggtctcgggggccaccacgataatttgggggtctggggaaaccatctcctggagagtttgaacgatgtaagaaagcactgtgatttttaccaagtcaaaaaccacgcacaaaatcccgcaccccgccagccccccgccgcctaagcctagccaaggggaaggggccgccggcggaatctcgcgcccccctggcccccctcgcccccctcgctccgccatcaatcacttcgcccgcgctccgcgcgcgcctcccggcggagtcctaggcccgcgggctagaggcactttaccgcccggcgggagcgcctctcctccgcgtccctcgccccagccccctgcccgccccactttgggaccctccagccgctttccccacaaatgagatctttgcaatgagcaaacgaaagtggcgcggatttcggggcgcccagcaggagcgagcgcagccgccagccgcaagtccgcagccgtgtcccgcgccccacgccggcctccccggcggcagccggagacgagcgccagcaccggcgggacagcagcagatgcgggccgagagccggtcaggggcgcagaggcggaggggatcggcgcggcggggagctcaccgcgaagctggaggctgcgtccgcgggcgcaccaggagctcaggcagcgagcgatcgaacgctctgtggcaggcggtggacgctgctgaaggtgagcgagaccccggggccagtcctcagtgtccgggagcaacgcccagtccgttggaagacccggggacaatgcccaaatttgggggagactgggggcaatgcccggtcgctttcctggacacggggaagccctccctgtccacgtcctgagggcgcgcggccgacccaagtgtgtttgggcaacgctagagagaaatttcccaaatccgagttgctctggggacttcgtaggagacagagaggcccgaaaccagtgcccgctgtgcgcggggttggggaagctgcagtgggtggccggcgagccgggaacaatgcccaaattttggggaacgcaaggcagagttctttctgccttgcgggcttagcgaatgggtgtcctggaggaggggaccccggggactccgttaatgtgggaaccgtgattaatgactaaactcgagactccagaaaaatagattacaggtttgggggatgagagaagttgctccatgcaattgggaacatagagaaagaggtctcaaataggggccagctagcttgggggaccaatttgtgaggaggggtagttaaagaaaattctccatatgaaattgggaattttgccgtagagccatattacgtaaaattggcagatgaaagcaaggaacacattttggggatccaaacacattcttggtgtgttagggggaagctgagattaattttcacatcttaagaatataagttagtggcctggacgctggcagcagccggggaaaaaataaccttcataattactgtggcttcagggaaaggttttaacacccttcagagatgga

SEQ ID NO: 1619 - DNA, 6000 bp, Homo sapiens
agcaggcagccccacgagggagggggaacatgtgtgcacccccactcccccacctgctcctccctccctacagggccactacaccctgctgtgggcaccccaaggtgaccctcagccttcttcctaccttaaaaagtccaggcatgcattttcaagcatgagcggtggccccctgggggaaggcacctcggcagggcagaacaaagggaagggacccccaaacaggtcactggtgtaattgtccccagcacccccaaagaggaggagaacccacaactcggaactggggctcacccccgatgcccaacctgtccccagcctgggaagcaggcgtggaggagaaggtggggggagcctagagctggccctgggggccctggttttgtccatgacgggagcctcggcaacctagtccgctctcccggggaccaggtttgcagacaggcacctttcaaatgctcctcacccccaaatttacaagtcaccctgcagaggaaaacatcaacacagccaggggttctctgctggaggctcccccttctataggcacagccggagaggccagagagctggggacacggggaggctgcagaaggctggtgggaaggggggcagtgatgggtggggagagatgggccagatgttcttggaatgggacatgggggtgattgatgcagacagaaatttgaaggggacattcccacgtgtcttgttctgtgggtggaaaatgggctgtttttcatggtgggggcgggttctccctgtcttgccaagctaatgtgaaagagatgcctcatcctgcccagctccccacacctgtccaaggccattaacttctgcctccccagtgtcaggctttgagatgccccccttctagccggggtcctcctatggggtgacaatggggacaagcaatgcccactgtagttgccccaggatcccccaccattctgctggtccccagcggtgccccctctctggcagtacccccacccaccccacaggtccccttagggccactgccccatcgcccgacattgcccaacgccaaggggtgaccttgttcctgccgacagggccgttgggcgcctgcatgcgggtttaatatttgcctataaggaactgggctttccccagccggagtggacagactttccctgaaaattcgcttggagagaacgaaaagagacccctggcaccccagcggcgtgcagccctgcacccccctcctcccgggccccgtgtttctcattttcctccccacttcctctgctcttcagtgttacccaaacaaaactggtttcacccttgtttggtgctggcgaaggcccgaacggcgcgcgcaaagctccggggcaggccggaggtggccaccgggggtgctccgggcccccaagccaagccggggactagcctgcccccggtggcggctcggccgcggcttcgcctaggctcgcagcgcggaggcgagtggggcgcagtggcgagggggagcctgcggacctcccacgcggggaccgagcaggtatctgggagtcccgggagcgcccgggaagcagcgtcctggtcgctccctcgcggcccttgggtttcttccttacacccggacgcccgctaagctcgggctgccgccacaaacgcgctctccgtgtggagaaggcaaagaaaaaaaaaaataaaagcaaaaggaagaaaaaccccaaagaacgaaaagcagaatttcagccggccgtgcgcgccagggcgctccgcgctacctgcccgcgccgcccgcgctcgggttcccggggagggcgccagtgctccgcgcgcgccccagccaaggtgaatccccggcagcgccttccttccgctgcccgggaagcttgagctcaacaattagcccttgatcctcgggggattccaatccacggaacaacttccctgctttccccgaactcggacattttactttttctgggatcctctaaatttaagcattgcttcccaagtcttctaaatatactcaccatttcgacgggtcacaataattttcttggacgttaatttccggggacgtcaaaacacatcagtcccggcgggcttttccagacttacactatgtggcctggggccccagatgtgctttctcccaggctctggacagttttatacaccccctccaggtcccacagatttacaggccactaacccggcttccctaattttaaagacgaagcccttggtccgtggtggtcgcgctgaccaatttgcctggctccccaggatgtggacagtgccttttccacatttaggcattgtttccaaaacaagtggaactttcccgcataattttgaatattaactccagggtctcctaagcttactgtttccggcacacgtccgccccattccgcgcccccccaccccacccccgcgccccttcccgttcacctcagcatgggacatttgctgttgggtcccgcaaatctattcacactaacctgggttccctaaactttacacgttgaatcccaagtccctcatgacactcagcagggctggaaggttggaaccctcagagtatgaaaattgcttcccataccttcccccaaattcggtcattacacccagagcatgttgaatccttttctgaatcataaacgacctgccctctgattgcctgagtttcataaaatggagggatttccccagtgattccccaaagctattgagaatgttgtgggtgtgtgagtcacaaagctttggggcattaacgtctatggctctatatgctgcctggccacgaatcaggtcccttaagatgtagacagtgccacccaggtccctggagcacactgagcagttaccaggaggtgctcaagtgtgacccaggattctccaggtccccccaaatcacacagggtctcccgggtccctctgggctacaccaagcacaaaaggaccccttgggcagagcctacttttatttctgttatgccaggtgttgctaacggccccagttcccaaacattccgagcactttctctgcatcacaacatattgactattaaacaattctctgggtcccaggagcttcataacaagaatcttgcttttctaaaattcaggcattggtctgaaaccccaacggccaggatcacactggacccttttcctggtcccccatacttggatgttctggacgctgccctccaggccctctaggaacattcagcattgccctcggatcacaggacagcactgatttcttgggctccaaacaacccactgagtcatctcaaagttaagcaatatttccttcaagcacactgcacactccctatcacaaaatctgaaaattcctaagtcctaagacctaggaattctgaatcccctttctttaaaatgtacatatggacccccaagtcctccaaggactctgagcaacttccctagatctttagattcaaaaacgattttcctggagcccccaaattgcggtattgtctcccagccttccaaagcaaattgagatttttttcccttcacaaaacaattgaggtttttttttttttaatactgatttatgagtctcctgactttatggtccctgccctgggtccccctacatttagaaaatgttccatggacccccaaagcacactaaaaaatgtccctgggtcccaagaaatcccaggcatggaaaaacctgcgacctataagtttcctagctactaactaggtttccagaaatttagatatcaaatctccattgggtaatttccatgtgtcccaaaaacttgaaatgtgtttcactggggctcccccaaatgcagacgacatccaggaaaatatatagtctttttcttatttaccaaaaataagctaatggaaatcatttaaaaattagcatagaaaaataatactgattttttatttttttattttttattttgctttccccaaatgtactgatcacactccaggctcccccaaaatctagacagtgctttcttccatctctgaagggtgttaaaacctttccctgaagccacagtaattatgaaggttattttttccccggctgctgccagcgtccaggccactaacttatattcttaagatgtgaaaattaatctcagcttccccctaacacaccaagaatgtgtttggatccccaaaatgtgttccttgctttcatctgccaattttacgtaatatggctctacggcaaaattcccaatttcatatggagaattttctttaactacccctcctcacaaattggtcccccaagctagctggcccctatttgagacctctttctctatgttcccaattgcatggagcaacttctctcatcccccaaacctgtaatctatttttctggagtctcgagtttagtcattaatcacggttcccacattaacggagtccccggggtcccctcctccaggacacccattcgctaagcccgcaaggcagaaagaactctgccttgcgttccccaaaatttgggcattgttcccggctcgccggccacccactgcagcttccccaaccccgcgcacagcgggcactggtttcgggcctctctgtctcctacgaagtccccagagcaactcggatttgggaaatttctctctagcgttgcccaaacacacttgggtcggccgcgcgccctcaggacgtggacagggagggcttccccgtgtccaggaaagcgaccgggcattgcccccagtctcccccaaatttgggcattgtccccgggtcttccaacggactgggcgttgctcccggacactgaggactggccccggggtctcgctcaccttcagcagcgtccaccgcctgccacagagcgttcgatcgctcgctgcctgagctcctggtgcgcccgcggacgcagcctccagcttcgcggtgagctccccgccgcgccgatcccctccgcctctgcgcccctgaccggctctcggcccgcatctgctgctgtcccgccggtgctggcgctcgtctccggctgccgccggggaggccggcgtggggcgcgggacacggctgcggacttgcggctggcggctgcgctcgctcctgctgggcgccccgaaatccgcgccactttcgtttgctcattgcaaagatctcatttgtggggaaagcggctggagggtcccaaagtggggcgggcagggggctggggcgagggacgcggaggagaggcgctcccgccgggcggtaaagtgcctctagcccgcgggcctaggactccgccgggaggcgcgcgcggagcgcgggcgaagtgattgatggcggagcgaggggggcgaggggggccaggggggcgcgagattccgccggcggccccttccccttggctaggcttaggcggcggggggctggcggggtgcgggattttgtgcgtggtttttgacttggtaaaaatcacagtgctttcttacatcgttcaaactctccaggagatggtttccccagacccccaaattatcgtggtggcccccgagaccgaactcgcgtctatgcaagtccaacgcactgaggacggggtaaccattatccagatattttgggtgggccgcaaaggcgagctacttagacgcaccccggtgagctcggccatgcaggtaggatttgagctgtgtttcccgccctgatcctctctcctctggcggccggagcctccgtaggctccaagcctggcccagattcggcccggcgcagccggccttccgcgcgtcccgcacctggcgggggctccggggctccggcgcggcaccggggggcgctcgggatctggctgaggctccaagcgccgcgtggccggctcctcctgctggggcaggtggcggctgcgcgccccgcccgagcccaggggccccctcagccgcaacaaccagcaaggaccccccgactcagccccaagccacctgcatctgcactcagacggggcgcacccgcagtgcagcctcctggtggggcgctgggagcccgcct

SEQ ID NO: 1620 - DNA, 6000 bp, Homo sapiens
tcgaggggcctggacattgccctccagagagagcacccaacaccctccaggcttgaccggccagggtgtccccttcctaccttggagagagcagccccagggcatcctgcagggggtgctgggacaccagctggccttcaaggtctctgcctccctccagccaccccactacacgctgctgggatcctggatctcagctccccggccgacaacactggcaaactcctactcatccacgaaggccctcctgggcatggtggtccttcccagcctggcagtctgttcctcacacaccttgttagtgcccagcccctgaggttgcagctgggggtgtctctgaagggctgtgagcccccaggaagccctggggaagtgcctgccttgcctccccccggccctgccagcgcctggctctgccctcctacctgggctccccccatccagcctccctccctacacactcctctcaaggaggcacccatgtcctctccagctgccgggcctcagagcactgtggcgtcctggggcagccaccgcatgtcctgctgtggcatggctcagggtggaaagggcggaagggaggggtcctgcagatagctggtgcccactaccaaacccgctcggggcaggagagccaaaggctgggtgtgtgcagagcggccccgagaggttccgaggctgaggccagggtgggacatagggatgcgaggggccggggcacaggatactccaacctgcctgcccccatggtctcatcctcctgcttctgggacctcctgatcctgcccctggtgctaagaggcaggtaggggctgcaggcagcagggctcggagcccatgccccctcaccatgggtcaggctggacctccaggtgcctgttctggggagctgggagggccggaggggtgtaccccaggggctcagcccagatgacactatgggggtgatggtgtcatgggacctggccaggagaggggagatgggctcccagaagaggagtgggggctgagagggtgcctggggggccaggacggagctgggccagtgcacagcttcccacacctgcccacccccagagtcctgccgccacccccagatcacacggaagatgaggtccgagtggcctgctgaggacttgctgcttgtccccaggtccccaggtcatgccctccttctgccaccctggggagctgagggcctcagctggggctgctgtcctaaggcagggtgggaactaggcagccagcagggaggggacccctccctcactcccactctcccacccccaccaccttggcccatccatggcggcatcttgggccatccgggactggggacaggggtcctggggacaggggtgtggggacaggggtcctggggacaggggtctggggacaggggtcctggggacaggggtgtggggacaggggtgtggggacaggggtgtggggacaggggtcctggggacaggggtctggggacaggggtctgaggacaggggtgtggggacaggggtgtggggacaggggtgtggggacaggggtgtggggacaggggtctggggacaggggtccgggggacaggggtgtggggacaggggtgtggggacaggggtgtggggacaggggtctggggacaggggtgtggggacaggggtcctggggacaggggtgtggggataggggtgtggggacaggggtgtggggacaggggtgtggggacaggggtctggggacagcagcgcaaagagccccgccctgcagcctccagctctcctggtctaatgtggaaagtggcccaggtgagggctttgctctcctggagacatttgcccccagctgtgagcagggacaggtctggccaccgggcccctggttaagactctaatgacccgctggtcctgaggaagaggtgctgacgaccaaggagatcttcccacagacccagcaccagggaaatggtccggaaattgcagcctcagcccccagccatctgccgacccccccaccccaggccctaatgggccaggcggcaggggttgagaggtaggggagatgggctctgagactataaagccagcgggggcccagcagccctcagccctccaggacaggctgcatcagaagaggccatcaagcaggtctgttccaagggcctttgcgtcaggtgggctcaggattccagggtggctggaccccaggccccagctctgcagcagggaggacgtggctgggctcgtgaagcatgtgggggtgagcccaggggccccaaggcagggcacctggccttcagcctgcctcagccctgcctgtctcccagatcactgtccttctgccatggccctgtggatgcgcctcctgcccctgctggcgctgctggccctctggggacctgacccagccgcagcctttgtgaaccaacacctgtgcggctcacacctggtggaagctctctacctagtgtgcggggaacgaggcttcttctacacacccaagacccgccgggaggcagaggacctgcagggtgagccaactgcccattgctgcccctggccgcccccagccaccccctgctcctggcgctcccacccagcatgggcagaagggggcaggaggctgccacccagcagggggtcaggtgcacttttttaaaaagaagttctcttggtcacgtcctaaaagtgaccagctccctgtggcccagtcagaatctcagcctgaggacggtgttggcttcggcagccccgagatacatcagagggtgggcacgctcctccctccactcgcccctcaaacaaatgccccgcagcccatttctccaccctcatttgatgaccgcagattcaagtgttttgttaagtaaagtcctgggtgacctggggtcacagggtgccccacgctgcctgcctctgggcgaacaccccatcacgcccggaggagggcgtggctgcctgcctgagtgggccagacccctgtcgccaggcctcacggcagctccatagtcaggagatggggaagatgctggggacaggccctggggagaagtactgggatcacctgttcaggctcccactgtgacgctgccccggggcgggggaaggaggtgggacatgtgggcgttggggcctgtaggtccacacccagtgtgggtgaccctccctctaacctgggtccagcccggctggagatgggtgggagtgcgacctagggctggcgggcaggcgggcactgtgtctccctgactgtgtcctcctgtgtccctctgcctcgccgctgttccggaacctgctctgcgcggcacgtcctggcagtggggcaggtggagctgggcgggggccctggtgcaggcagcctgcagcccttggccctggaggggtccctgcagaagcgtggcattgtggaacaatgctgtaccagcatctgctccctctaccagctggagaactactgcaactagacgcagcccgcaggcagccccacacccgccgcctcctgcaccgagagagatggaataaagcccttgaaccagccctgctgtgccgtctgtgtgtcttgggggccctgggccaagccccacttcccggcactgttgtgagcccctcccagctctctccacgctctctgggtgcccacaggtgccaacgccggccaggcccagcatgcagtggctctccccaaagcggccatgcctgtcggctgcctgctgcccccaccctgtggctcagggtccagtatgggagctgcgggggtctctgaggggccaggggtggtggggccactgagaagtgacttcttgttcagtagctctggactcttggagtccccagagaccttgttcaggaaagggaatgagaacattccagcaattttccccccacctagccctcccaggttctatttttagagttatttctgatggagtccctgtggagggaggaggctgggctgagggagggggtcctgcagggcggggggctgggaaggtggggagaggctgccgagagccacccgctatccccagctctgggcagccccgggacagtcacacaccctggcctcgcggcccaagctggcagccgtctgcagccacagcttatgccagcccaggtccagccagacacctgagggacccactggtgccttggaggaagcaggagaggtcagatggcaccatgagctggggcaggtgcagggaccgtggcagcacctggcagggcctcagaacccatgccttgggcaccccggccatgaggccctgaggattgcagcccaggagaagcagggaaccgccagggccacaggggcagagaccagggccagggtccccctgcagccccttagcccaccccctcccagtaagcagggctgcttggctggcttcctttgctacagacctgctgctcacccagaagggcccacgggccctggtgacaaggtcgttgtggctccaggtccttgggggtcctgacacagagcctcttctgcagcacccctgaggacagggtggctccgctgggcacccagcctagtgggcagacgagaacctaggggctgcctgggcctactgtggcctgggaggtcagcgggtgaccctagctaccctgtggctgggccagtctgcctgccacccaggccaaaccaatctgcacctttcctgagagctccacccagggctgggctggggatggctgggcctggggctggcatgggctgtggctgcagaccactgccagcttgggcctcgaggccaggagctcaccctccagctggggacctggccactggggcagccctgttcctgaagctctgagctcaccccttccccatgaccacatcagcccccctccacccagagatgtcacagcccccagctagccccgcctccagagtgggggccaaggctgggcaggcgggtggacggccggacactggccccggaagaggagggaggcggtggctgggatcggcagcagccgtccatgggaacacccagccggccccactcgcacgggtagagacaggggcgccctgctggagctgaggtatgtgagctcgcgcggggctgggccaaagcggggcccggtgggccggctgggaggctgcccaccagtcagccatcggccaagctgttgccctggctgaccctgatggccaacaaggccgtagggagtgatgggcagaggccccttctgggaggggagggtcagtgctctgtgggggaccgtgtgttggagtggagggcagcaggaggagccctttggtgtccagggactcctggagctgccccagccttccaggacttgcagggcagctggcactggctggtgctgggggctgaggagtgtcttttgaggggccaaattttctgtgacttctgtcctgggggacctctgacctgaggcctcaggagagggcaaggccgcccacccaaaagagatgcagccatggttcgcggtgccctcggctgccctgggccagagctggggctagctttcaccttgttgagacccaggactctgtcccccaagcctgtcttcgccagcgccttgaccccacccctcatatactgtgtcctggaaaacgtggacacgggagaccgcagccagggcgaggtatcgcccctccatccccccaggcccaatgagaagcagttggccaaggtgatccaggtggcagaggcagcatcagacccagtctcctgtcaggcaccaccttgggtgccggtccccagatgccctggcggggagtgtgcatgctcccggagcccccaggtcaccccatgtgagccaggcccacagagcttggctctgcaatgcctgctgggctgctgcccatgctccaccccttctgggaagctaaaagacagcccttcagtgtccagagacctgcctggccttggagcctcggtttcacatgcccaccgggctggcaggggcactcagctgcctccagccccggcggtcaccctggcattgggtccatctaactgctccccagtca

SEQ ID NO: 1621 - DNA, 6000 bp, Homo sapiens
ccttgggttaatctgtcactccccatgcccctggggcctctgggctggatgactccccaccccatcttatggatgggaaggtggaggctcagtgggggcagggagctctggggcctttgggggcacagccagtcaagctcctgtccagggctggtctgaggacctgctgctgggtgatgtggtttgaggccaaaggggtggcctttccagagtcaggcatccctgggcagggttgtaccctgcacagatgcccagccctggctctagggcttggggtgggagatgtcaggggagattcccagggcccttgacttctttcttttcctgctttcttgtgccctcacagaagtcctatggaggggctcaggctgggtgaaaggcagggccaacctcaagtctcagtgacctcaggcaggtggcttaacctctgggagcctgagtcccctcccttgcaaaatgggcacgaacacacctccctctcaggggtcttggaaggattaaatgaggcaacgagcccagccctgggttagggcagggccctgagcaggcacaagatgaaggcagcaagtgttgtcattgtttataatatccctctggtcctctccacagggcaccacctggggagcagctggggaggcagccgggaagggcacagacacctcttgcagggtccctggggtgctgtgggagggtggtactgctgagggcaggctccgggtacctggagactctctagtgggccctggaacagcacagattcagatggtgtccagccctcacctcctacccaccttgaccctgtgcctgcaatccccagccctttgtgattgatgggtgatatggggcccatggctcaatggaacattctttgaggccttcgtttgtttgaagacagatagctcagggcctcagaacccagggaacaggcccgaggcaggtttcaccatgggtcagaggggaaagaagagctcccggcctgtccttggtcactccctgataggggccattggcccactggccgggtgtcctgtgtcccagaatttgggttccctggggctctgggtagggattgggcctaacctaggacgggcattcctagccctgtgaagccacctgcggcacacattcctgatggggccatgaacatgccgacaaggcagctgtacagctgccacacccgggaaggggaggcctcgggcagccggggaggcactggagtggaggtcacccgccagaaagcacatgtggccaaggacatggcttcctgggcctaccctcgttctgctactcatggaccagtgtgtttgcctctggaagcctctgtctcctcggctgtaaagcgggcctacgacattgaccgaccacccatgaggttgtggtgaggactggcccatgggtggcccctgggaaacagctggcttaacgattccagcacgaagatccaccaggattgggacctaggcttctctggcttctgggtctttcctagaaggaacgcacagcagtgagggctgcaggttaatcctgccttaactgcttgggcagcaagtttttctttttcttcttcttctttcttcttcttcttcttcttttttttttttagagggcgtcttgctctgtcgtccaggctagaggtagtggcacgatcacggctcactatagcctcaacctcctgggctcaagcaatcctcccacctcagcctcccgagtagctgggaccacagacacgtgccaccacacccagctaatttaaaaaatattcgtagagatggggtttctctatgttgcccaggcttgtctggaactcctgggctcaagcgagccacctgccttggtctcccaaagtactgagggtatataggtgtgagccatggctgcagtaaggtttgaatcttctcaagccttggtttccttgtctgtaaaaggccaactgaaatctacctatgccttccctatgtattagggtatgtaacgccccactgtgatggacaagcctacatttctagtgggttaagatgcaataaaagtttattctttgtgcccaacacaggcaatgcggtgtgcagagggtgcttggtggttctctcctgatggccccgcagggtctgcagcctccatctggccagcagagggcgcagaaggactgcctgggcagctcggacgtgaccgcctggaagtggtgtacagcgttcctgacaacgttcccggccaaaacgggtcccgccgcccacttgtgtgcaagataactggaaaatgtctttctgtgtgctccgaggagaatgcaaaggctggtggatgtagtgcctttcctctactgctctctcagctgggggcaagaatgacaggacgtgaacatgcacacaagggcccggaactcacgacccccgacagcggtctcccccgcccccccaaccccgcgcttgcaggatttagggcactagcacagcacagtccaccccttgggactagcaccccctccgcagttctgctctctgcagcaacatagagtacaaatattgttccttttgtttcttttttccctttggatacatttttaattacaaaaatagagcttgattgttgcacctagacagatgtttgcttgcttctgggcccattgggcctcctctcagagcctggaactcccagcccccagctcctggggtgccttcctccaggtgtgtccctggcttgggctggggggacacagccccgctcctgggacgtgcaggtttaaaatgctattgggtaccatctttgatcgaattcagagtgacagacttagagcaggtcacctctcagcttctaacgaggccaagacggaggaatccccacagcactgggtttgactctgtaattaagctggtaaagtggaaaaataaaagtaggaaacctaagtggaaaccaaaccagaaagccaggcagcccgggagttctgagccctgcttccttccagctgtgcggcctcagcggctgacgcggtctctgctgctcttctataacacaggatgatggcagctacaccctctgagtggtgtcaccaaggccaatgagtcctgatggttggagtgtgggtatccgggggcctctaggtcactacccactctagccctttgctcctagtctctggggaggtggcagcataggggcatggagcagactagactttgcctctttctgcccccaggccagttgatatgagccctgcttgaggggttcgcagggcctggggagccttcttcagcttctctttgttttcctaagatgaaaattgtgacatctgggcttgttgcgggaaatttgtaaattgtgcacagagaagaatatgaaattgcacataaatcatggcttttggttccaccatcaagagccaagaatggccctggcccctctcctgggttaacgccctgtcccatccagttcacccccctcacttcagatctcgcttccctgagacccagaagacccgccctgctcccccagctgcagctgcacactgccacagcattccatgggggtgggggtgtcttgggactcaaaggcaggctggttggggttcaggggaccgcaccttccctccctcccagaggtctctctgctggctcacaggctcacctgagataggggcttagatctcatgggctgctggaccctccaacaggtgtctgacagtccccatcccgatctgggaggctcctggtttgaggagggggctccctgcctcatggtaggtgggccaaaagggaggcagcaggaaataatggtctcttttggtctggcctggctggggtgaagcaccgtgtgtgtgcgtgcgtgtgtgtgtgtgtgtgtgtgtgcgtgcgcgcacgaccgaggtctgtaccaggaagggctgcaggcgggggaggggcatggtccttcacagccccttcccctatgacctcgggcagatctttcacttttacccagtacaacagcttccagccagcctggacaggcagatcccggggctggagtggtctggcccaaggctgagaagggctgggacccccgacagtgacatgatgggctcagcccctgttccatctactgggcagggtgggcctccgcagatagcggcttcagactccagctccagggggctggtgggagtctctcaaggtgtcccacacatggtccctcggggaaagagtggagctgacccctgtcccccctcccgactcgagggccttagggccagcaggtgtgtgagggctccaggcgcgcggagccctcgaagggacaccagcccagcagcagcaggccgcgcgggggcagccgaagaccccatccggcgcaggccagggccgagctggcagcggcgggtccaagcctcgtcagctggcgcaggaggcccacgggcgagcgcgggacggagctgggcgccggggtccggaccgggccggggtcgagttgggcctggccggacaccggacccgccaggagccggcccctgccgcgctgggctgaggcccccgcctgcagacaaaggagccggcggggggcgggagccgggggggtgggggagtgttgcaggggggatggggcgagggggcgggcgtcgcggtgtcacgttaccgcccgcagcgccctttaactcccgcccccgccccgctcaccgcccccttcccctgctacagcgcgctcgccccgcggccgccaatcagccgcgcgccccggccgcgcgccccgccccgcccccggtgggtgtgcgcgcggccaatgggcggtgcgcgggggccgggccgcggcggggcggggcagcggggcggccgccaatcgccgtggtgttgttgaaactgaaaatactacattatgctaatcgcggccgggcccgcgcgcacgggggtggggcccgcgcgtataaagggggcgcaggcgggctgggcgttccacaggccaagtgcgctgtgctcgaggggtgccggccaggcctgagcgagcgagctagccagcaggcatcgagggggcgcggctgccgtccggacgagacaggcgaacccgacgcagaagagtccaccaccggacagccaggtagccgccgcgtccctcgcacacgcagagtcgggcggcgcggggtctcccttgcgcccggcctccgccctctcctcctctcctttccccttcttctcgctgtcctctcctctctcgctgcccgcgtttgcgcagccccgggccatgtccgacgcgtccctccgcagcacatccacgatggagcgtcttgtcgcccgtgggaccttcccagtactagtgcgcaccagcgcctgccgcagcctcttcgggccggtggaccacgaggagctgagccgcgagctgcaggcccgcctggccgagctgaacgccgaggaccagaaccgctgggattacgacttccagcaggacatgccgctgcggggccctggacgcctgcagtggaccgaagtggacagcgactcggtgcccgcgttctaccgcgagacggtgcaggtggggcgctgccgcctgctgctggcgccgcggcccgtcgcggtcgcggtggctgtcagcccgcccctcgagccggccgctgagtccctcgacggcctcgaggaggcgccggagcagctgcctagtgtcccggtcccggccccggcgtccaccccgcccccagtcccggtcctggctccagccccggccccggctccggctccggtcgcggctccggtcgcggctccggtcgcggtcgcggtcctggccccggccccggccccggctccggctccggctccggccccggctccagtcgcggccccggccccagccccggccccggccccggccccggcccccgccccggccccggccccggacgcggcgcctcaagagagcgccgagcagggcgcgaaccaggggcagcgcggccaggagcctctcgctgaccagctgcactcggggatttcgggacgtcccgcggccggcaccgcggccgccagcgccaacggcgcggcgatcaagaagctgtcc

SEQ ID NO: 1622 - DNA, 6000 bp, Homo sapiens
agaacaagaccttgctccaaaagaaaaaacaaaacaaaacagattggcaaccattgatttactaaataactttttttttttttgagacatggggtcttgctgtgttgctcaggctggagtgcagtggctactcacagggacgataaccttgactagtgtacacactacaacccttcactcctgggcccagcctccctagtagctgggactgcaggtgcaccactgagctgggcttaatgattcttttgaaaaagccacttagtgaataagtcattgttgaaccccgctccagataggtcacactcctggtttggtgtcctgcagcactgacatcccttcttcctgtttggcacagtttagactctatatgccctcctgaaatgggctatggtaacttattcaacccagttcaggccagaggatttcagaaagaagagttgttttgggagagaggataaaggtctgaactagacctgagtagggaggactgggctgatcccctaccacagatacaggcatactcagtgcttcctgccttctgggatgaaaggctttgctcctgtcacctcctgtgtgtacagcacttcagtttacaaagtgtattcattcccatggtcaggttccttgatgctgcccttgaggctgggaggggtactattattacttctactgtacagataaagaaacagaggctccaggaagggcagtaacttacctgatcaaggtcacacagttagctggtaaggggtaacttgaagactgtatgatgcaccaaggaaaacacaggactttgggtcacaaaactgggtttgtgttctggctcccacactaactagctgtgtgatgttgagttacttttactgttctgaatttgtttcctcatctgtagaataggcatagtactaacaggttgttataaaggtcaaatgacataataacatgtgacctataaaggcttataccatatgagggcttttttatcaagggtcaaggtcggcagataaactcaagacatcagagtcaggtatccagtactcttggccctataccacactgcctttgctctgcttgtttctggacactaccatactcatcatccttttccagtgtcggtcctcgttcccttcccagcccggaagctacgctgtccttcccctctcctttgagagctgatttactgattgctagttgataaccacctctttagagagctgtacttccagtctcttgggccttgtgacagccagccggagttccctccttgccttcctgcctgggccagcccagtgctgggcttttcagtcatactgtcaacacccactctcctgctctgtgtggaactgaagattacaggcccaggagttctgctttgaatgtcaaggcttcccacgtaatccgctgggcacaaataatgccccctgcctccaaggagctttaagtcttagttcatccacctagtgctcttgtaacaaccattttaatctctaattcctggataggaaaactgaggcccagcaagcgtaaatgcctcatgcttggttatagtgagtcagcagagctggggttagaacttaggtctctcaacttccagtctgaggtctctatttgactctccactggcctagagggtccttatgcccttccctgacccactgtctgagggtctctatctgaatgtcctgacgttgcatgcacacgtgcacgcgcacaaacacacacacacactctctctcattcatgcaaataggatggaaatattttttaatgtgaaccagagacacaacttcatagagtgaaaccattcctctcccagctgattccaaggcaaactgtagcctgggagggaggtgggaccaagccctgggtcctttgcagcccccacatgacgaaagtttcttttccacttcccagtggggattttcttccccacttgtcattgatttttgaagcttctgaaccagtggtgagagcccaggctgggggggtaaggggttcccagaccagggtgcagccttgcagtatagcaagtgaaatggagaaaatgggctagtgttgatggtgcttgggtggagccagggataaggaatactcagggatttggttgtgtttaaaacagggctgccccctctcagggagcaggccctggttgtgggagacagtcagggaaaggaagtcacatattgaccaccaagagtcccccatggccaagaggaagtagctgatgagagaaggatccttgccatagcagtgtaaataatcacagggtttctggaagctgtgttccagaactcagaaaagcagttcatctccccgaggccctgtgacctgcagaggtaaccagatgttggctggagctgggactcctcatacttaccccactcataaatacagcagtccatttattgggcacttgctatgtgccatacctcatgctggacatcttctatacattattaactcttactttttatttttttttttttgagacagggtcttgctctgtcgcacaggctggagtgcagtggtgtgatcatagcccactgcagccttgaccaccctgggatcaagtgatgctcccacctcagcctcccgagtagctgggactacaggtgtgtaccaccacaccctggtaattttttcattttttgtagagtcagggttttgccatgttgcccaggctagtctcaaactcctgggctcaagcgatctacctgcctcattctcccaaagtgctaagattacaggcatgagtcaccgtgcctggcctcatttcatattctgagcaattgtaatgcaataggcaagattatccccattttacagatgagaaaattgaggctcagggaacaaatatattgccaagatcacatataactagttggtggagctgtgattagaatacctgcgagtcttactctagcatctatgttcttaatgatggtattttctatccaagagtctggaagtctctaaaatctttcagaggcacatgccaggatctcaggaaatggacagaagattgaggggaaagtcaagtttttgtcttactcttgacttcatccttcctagttgggcctgaaagatttgctccaggccgggcatggtggctcatgcctgtaatcccagcactttttggaaggccaaggcgggcagatcacaaggtcaggagttcaagactagcctgactaacatggtgaaaccccgtctctactaaaaatacaaaaattagctggacgtggtggcatgcgcctgtaatcccagccactcgggagggtgaggcaggagaatcgcttgaacccgggaggtggaggttgcagtgagtcaagattgcgccactacactccagcctgggcgacagagcaagactccgtctcaaaaaagaaaaaaatttgctccaccccaccaagggccttgagagaagatactaatgtctgggagcctcagcctctacctcattcatcataacatacccagaccccagtccaaatcccaggtccaactgaatctccagtattcccctgcattgaattggcaatctgagtgtacatggccagatagggttttcagtacttacaagaatgatggggtggccaggtgtggtggttcacgcctgtaatcccagcactttggaaggctgaggcaggtagatcacctgaggtcaggagcttgagaccagcatggctaacacggcgaaactccatctctactaaaaatataaaaattagccggatgcagtggcacctgcctgtagtcccagccactcgggaggctgaggcaggagacacttgaacccaggaggcggaggttgcagtgagctgagatcacgccactgcactccagcctggacgacagagtgagactccatctcaaaaaaaaaaaaaaaaaaaaatttccccattgccagaataccctggattgggatagggcagctctctaaagaattgagccccttactcagcaggtttcttaactgtgcctttgggtttgtactcagtagccaagataccaggtttggagagggcagggtgggccctgagttgagagaggttctacttatggctgcatcacagagtgacctgggacagctgtcctgtgccaaaacactttccagtctcctggtggaaagggtccatatttagtagaggatctagtagatccctaaatttgtgcactctccttttgtgtctgtatagcctggaaaaaaaaaatagctaatactggccaggcgcagtggctcacgcctgtaatcccagcactttaggaggccaaggcgggcggatcacgaggtcaggagatcgagaccatcctggccaacacggtgaaaccccatctctactaaaaatacaaaaaattagccgggcgtggtggtgggtgcctgtagtcccagctactcgagaggctgaggcagaatggcgtgaacccaggaggcggagcttgcagtaagccgagatgacgccactgcactccagcctgggtgacagagtgagactctgtctcaaaaaaaaaaaaaaaaaaatagctaatacttgtggacgaggcactgttttaaatgctttacatgtattatataatgctcacaatgacccagtgaggtagatattattttatcctcattttactggtaagaaaacttaggcatacagaggttaagcaattttttcagggttacacagctaggaaatagcaaaatcaggatttgaccttagtttgtctggcgccagagtttatgtgctttctaccacattatactgcctctttgcttggcctcagggcctttcattgtgtgtctttctgatgaccgtcttgatgggactttgggatagtgtcaggttaagggaacaggagccggtttccctttgtgtgcccccatcttttcttcccaataggcagaggcctccctaaccaagaatgtcccctttcatctgtccacaggtcactgcagccagaggggtccagaagagagaggaggcactgcctccactacagcaactgcacccacgatgcagagcatcaagtgcgtggtggtgggtgatggggctgtgggcaagacgtgcctgctcatctgctacacaactaacgctttccccaaagagtacatccccaccgtgttcgacaattacagcgcgcagagcgcagttgacgggcgcacagtgaacctgaacctgtgggacactgcgggccaggaggagtatgaccgcctccgtacactctcctaccctcagaccaacgttttcgtcatctgtttctccattgccagtccgccgtcctatgagaacgtgcggcacaagtggcatccagaggtgtgccaccactgccctgatgtgcccatcctgctggtgggcaccaagaaggacctgagagcccagcctgacaccctacggcgcctcaaggagcagggccaggcgcccatcacaccgcagcagggccaggcactggccaagcagatccacgctgtgcgctacctcgaatgctcagccctgcaacaggatggtgtcaaggaagtgttcgccgaggctgtccgggctgtgctcaaccccacgccgatcaagcgtgggcggtcctgcatcctcttgtgaccctggcacttggcttggaggctgcccctgccctccccccaccagttgtgccttggtgccttgtccgcctcagctgtgccttaaggactaattctggcacccctttccagggggttccctgaatgcctttttctctgagtgcctttttctccttaaggaggcctgcagagaaaggggctttgggctctgcccccctctgcttgggaacactgggtattctcatgagctcatccaagccaaggttggacccctccccaagaggccaacccagtgccccctcccattttccgctactgaccagttcatccagctttccacacagttgttgctgcctattgtggtgccgcctcaggttaggggctctcagccatctctaacctctgccctcgctgctcttggaattgcgcccccaagatgctctctc

SEQ ID NO: 1623 - DNA, 6000 bp, Homo sapiens
gggctccacatgcattatgtcgtttaatactcacaatctcatgcagcacttgccagtcccattttattgttttttatttgttagtttttagagacaggatctcactctgtcacccagactgtagtgcagtggcatgatcatagctctctgcaacctcaaacacctagactcaagtgatcctcccacctcagcctagcaagtaactgggactacaggcatgtgccactatgcccagctaatttttgtgtgtgtatgcagatggggtcttgctatgattgcctaggctggttacaaattcctgggctcaagtgattgtcccaccttggcctctcaaagtgctaggaatagaggcatgagccaccacgcccagccattcccattttaaaatgaaactaagactgagaagttggctctgttatatgctcttacagtattctgtacttttttttctggagaaatgttcttgctatgttgcccaggctggtctgaaactcttgggctcaagcaatcttcctgccttatccccctgaggaactagaactggagacaaacaccaccatgcccagcagcactctacttttgtatgattacctgtttaaggtctatctcccttaccagttatatcagggcagttttctctacttcatgattggcatgtaacactatgtctggcaccaagaagattttcaataaatatacattgaatatttatgaatatgggagatctcatatgactaatcaaaggccatactgtgttacaaccatcctaatctgtctccaaaacctgtctgtgatctctattctaccccaccaagtgctttcatattatctcacttctaaatgtccaggttcaatgtccttgtctctcagctgcttgtaagcatacatgcacaccacctaccaagaactcacctattcagggaaagctagtgagagagtagaaaaaagaaacagcccatttgggattgtgccctcttcctaccctcttcaagtcagcatttctcctccttcaagaagcctttacggacagctccacctgtccacctgcttccctttcctctggcccttcccatacctgtgccacaaaagtgtttccaagttacctggagtctgattgttctacacatattagtactttattaaagcaatttaacattatggatgtttagtgaaggcaaatgtgtgctcaggcctgcctctgtcaggcccagtgggtggacacagaaatgaatcagacgcaacctcaaaggacttatagtcagtgggggagacagatattaggcacagatgcaatttactagagcacaaagcatgatgacctaaatggtattaaagaactatgagcaacatgctatatgcataaaccttaattattattctgaagagtgtatcatagaagatgagagctcaaaggtatcatctagttcaacctctgttttccagtggaagagtttgagacagagaagggtggggcctagcctaaaatctcaatctgtctgtctgagccaagacagacttcaagtttgtttgtggtttttttttttttgttttttgttttttgagatggagtctcgctccgtcgccaagctgaagtgcagtggcgcgatttcggctcactgcaacctccgcctcctaggttcaagtgattctcctgcctcagcctcccgagtagctggggttacagccatgcaccatcacacccagctaatttttgtatttttagtagagacggggtttcaccatgttggccaggatagtctcgatcttctgaccccatgatccgcctgcctcagcctcccaaagtgctaagattacaggcgtgagccattgtgccaggccagacttgaaggttttctaaagcccagccttggactttttcctcctcttctgatagcttcatatgcaaagtcctatacttcatcagaccatgagatctttgaggctggatcaggttctccctcctaaaccagggctaggcaagcccaagacacttacaggctcaggaaatgcaatctgatcccaggctgccaatccagtctttcaatctgcagcacctaatgtgctccctactcttatcactatgtccttaaattgattttcaaatattttttgcaggaaacttaaaaacaaaattaaactctctatgcagaatactagtaaataaatcagataaaaagcaaaccttctctggttgaaggggagagagtccatagctccactgtttttcctgttcttaagtcctgggaagggaattctaggaacacatatcagaaacatttcttctggagctggatgtggtggtgtgtgcctgtagtcctagctacttgaaaggctgaggtgggaggatgactcgagcccaggagttccaggacagcctaggcaacatagtgagagtcccatctaaaaaaaaacaacaaacaaaccagaaaaaacttttgtgctgggacataatctttaatggcgtcatagaagctgctttagcgtatggtgttcctctgaaccctgtcatttctggggctcacaatcctttctttattcatgaaataccaagcaccccaatgtcaagtggtcccaatggtgtatggatgggaatgagaatttccccttgtgcctcctgctctcatgtcctccacaaagaggagtttgtctgaagggctacagggaccagaccgaagaggagacaagagacccaaacactgcctggcaggtcaggggaggcttctagagaaggatctttgagaaagacttcatccacacagtcattcaccagcctgaatctgataaagcctctgtttttgaggatgatacagtagccaccagctacacatgctattgaccacttgaaatgtttccagccaaattgagacaaattgtaagtataaaatacacaccgcatttcaaagacttggtacaagaaaagaatgcaaaatatccagttaatttttataaccagtaatttttatgttgattaccatgctaaaagataatattttgaggccgggcgcagtggctcatgcctgtaatcccagcactttgggaggttgaggcgggcagatcacgaggtgaggagttcaagaccagcctggccaacatggtgaaatcctatctccattaaaaatacaaatataagccaggcatggtggcacgtgcctgtaatcccagctacttgggagactgaggcaggagaatcatttgaacccaggaggcggaggttgcagtgagcagagaccgcgccactgcagtccagcctggtgacagagcgagactccatctccaaaaaaaaaaaaaaaaaaaaaaaaaagataatactttggctatggctaagtcaaatatagttaaaattcatttcgtttctttttactttttttgaaatgtcattaatagacagttttaaattacttacgtggttcctatttatttttttaaaaatataagtaggctgggtgtggtggctgacgcctgtaatctcagcactttgggaggccaaggcaggtggatcaactgagatcagtagttcgagaccagcgtggccaacagggtgaaaccccgtccctactagaaatacgaaaattagccgggtgtggtgacatgcacctgtaaccccagctactcgagagactgaggcaggataactgcatgaacctgggaggcagagattgcagtgagccgagatcgtgccactgcaccccagcctgggtgacatcgtgagactgtcaaaaaatatgtgtgtgtttgtgtttatagagacaaggtttcaccatctctgtaattacaggcagacgccaccgcgccagactcttagggtatgatatttttaaaagatatttgtttagtgtttgagatacgcattgacaacaggtcttttacacccattctcatgttatcttcaaaactacggggtgaaatataattattctattttaccaaagacagatttgaggctcagaaaggttaagctatttattcctggaatcaatccgtttatttgaaaagcttctggaagacagggatcctgtcttaaacgctgtgtttcttcacagcacctagcacttagctctctccacgtggtaggcgctcagaaactttgtgctgaacgaaggatatggattctcaagtcaaagctccgagcgcaaagccagggagcgaagcaccagagggcgcccatgagcccgcccacccgcgggtcgccggggcccaagctggacctcaggcctgggtgcggctcttcagccccaagcagctgcgcgccccagcagaacagggggcgagggggcgagggaagccccaagtcctccgtccgccccgccccctccccagagccaggcctcgcagggctgcacggtgctgaatgacgactcgacatcctgtttttggggcccgcggctccgcctgcgcctctgctgatcttgtctttcccttgggtgctgacgccagctcctcttccccccgagtctccccaccctccccaggggtctggggccttcccactgctgaatcaccaccacctcgcactcccccggggctcagggcaggggcggggactgccccagcctcggccaccactctatccctggggttgactgaagggaccaggcccaggggcgcctttctcagcatcttcccgcggaggctggtgggggcgggatggggggaagaggacgaacgcctagcgcccagggtagggcctccaggggtagggtggccaggaggaggcggagagacttgaccttgggaggcctgacttactgaccgcaggggcagcggactgggaggggaacgtggcaagcccgggactgggccgggggcgaggctgggggcgggccggggctggagagggggagatcggccctcggacttcctggtcgggccccgccccggcccgccccgcctcgccggcccgccccccccacttcctccggcctcccgctctcacttccttctcgagcccggagccgctgccgccgcccccagctcccccgcctcggggagggcaccaggtgaggcccggccggggctggcgggtaggggtccgggggaggagagcccggccggcccaggactcggcgcgggcgccggctcatgagtttgctggcggaggccgcgggcgggagcttctcggttcagtccaagtagggcgggcgcggccggccgggcggggcgggaacggggccactgcgagccggcggaggctcggcgagggtggcttcccggcggctgtaccgcctctagggagccgagagggacccctgaggtcggagggtcccgggctccaagataagtgtctctgaagtggaagagctcagagctgggagatcggacgcaggtggggtgtcctcagaagttggtggggggggtgttgagaagtgcgtgaggggagagggcttctgggctggaaaaggcgctccctctgctctggcagttgtgacacttggggtgagaggggcggtgtctggggcctccgaaagctctctccctgtcagatggatgctaatacagacccacactcggtctgcagccccaaggccctctgcactcaggaggacccgggttgggtgggggagccccgccgaccccagtcgttgtctgtatgtctgttttcctgagtcccgaccttacctggagccaagcagtaggtatttagtgagcagacgctgttcctagctgaccagagcctggccttgctcttttgggagtaacttggtcttgccctgtaactggaagtggaaggactctcattcagaggtactgatagtccctgacaagtttttgttgtgtcttttggggacaattgagaaccatctcctagtgttcctcttcattcttagtccctgaattatacacatgctcctgtcgtctccctccacaccttctttagtttctacccacaaatccgccatcactctcttctcatcccttccagtctcttttcctccaaacatacggtcatacctaggccttgacctgtcttcacctaccctgccccatgttcgtcttggtcct

SEQ ID NO: 1624 - DNA, 6000 bp, Homo sapiens
tcacctaccactttatctcctgagcctcagtttcttcatctttaaaatgagtaaagtagtcccctcttatccatggagaatgtattccaagaccccagtggatgcgtgaaactgcatatagtatcaaactctatatatattgttttcctatacacatacctatgataaagcttaatttataaattgtacacagtaagagatgaacaaaaataactaataataaaatagatcaattgtggtctctctctctcctctctctgtcaaaatatcttattgtaccatactcaccccccaggttttttttttttttttttttgagatggctcgctctgtcaccaaggctggaatgcagtggtgcaatcttggctctctgcaacctctgccttctgggttcaagcgattctcctgcctcagcctcccgagtagctgggattacaggcacgtgccaccacaccctgctgatttttatatttttagtagagaccaggtttcaccatgttggccaggctggtcttgaacacctgacctcaggtgatctgccctcctcggcatcccaaagtgctgggattacaggtgtgagccactgcacccgaaccccatagtcacctatttttggacagaagttgacctcaggtcaacatggggaccaccgtgtagcccctgttttatctagcagagcttctgtgaggaagagatgagataatacatgtgaaaactcttgcaaacagtggaatagaggcataagaattagttaatccaatttgatttagccaacatcttcagaacatctaagcaaggccctaagattaatgcaagggagatatactgcataggtataaaaagagagatggggagaaagctctctgtttcctcctgaagcttacaatatgttgagggggtcctttctttttttttttttttaaacagatttttgctctatcacctgggctggagtgcagtggcaatcacagctcactgcagcctcgacctcctgggctcaagccatcctcctggctcagccccctgagtagctgggactacggggacacaccaccatgccaagttaatgtttgtatttttttgtagagacagagtctcactatgttgcctaggctggtctcaaactcctgggctctagtgatcctcccatctcagcctcccaaagtgctaggattttaggtgtgagccctagtacatacctgggttcttgcaagggtcacacttttagaaggacgaagcataggggcttatagagatgagggtcacagattctgatcaggtttcagaatttttttattttgtagaatattaaagctgcactgggtcaataatctggtagctgaccagtttatagttggggagactgaaattcagaggggaactgacttttctagtgtcacatcgtgatcttggaggcagagaagacaccagaagtttcttcctgttgcccaggctgtggctttggctcccaggtaccatttatttgttattttattttatttttgagatggagtctcactttgtcacccacgctggagtccggtggcgtgatcttggctcactgcaacctctgcctcccagattcaagtgattctcctgcctcagcctcctgagtaactggggttacaggcacacgccaccacgcccagctaatttttgtattcttagtagatacggggtttcatcatgttggccaggctgttttcaaatcactgacctcaagtgatctgccggccttggcctcccaaagtgttgggattacaggtgtgagccacggcgcctggtcatttatttgtatttttaattgtggttaaaaaatacataacatacattttgccagcttaatttttttttttttttttttgagacagagtcttgctctgttgcccaggctggagtgcagtggcgcgatctcggctcactgcaagctccaccttccaagttcatgccattctcctgcctcagcctcctgattagctgggactacaggtgcccgccaccatgcccggctaattttttgtatttttagtagagacaggatttcaccgtgttagccaggatggtctcgatctcctgacctcgtgatctgcctgccttggcctcttaaagtgctgggattacaggcgtgagccaccgcgcccggcctcatgttaatcatttttaagtgtacagtttagtcatgttaggtacattcgcattgttgtgcagccaatctccaaaacttttttcatcttgtaaaattgaaactattcccagctttcccctctccccagtctctggcaaccactactctactttctgtctctatgaatttgactgttttaggtacattcatataaatgaaatcacagtgtttatccttttgtgactggcttatttcacttagctggctgtcttcaaggttcatccatgttgtagcatggtcaggatttccttcttgcttaaggctgtgtactatttaattgtacgtatgtaccatattttgtttatccattcatctatccatgaacaacttcggttgctttcaccttgtggctgttgtgaataatgctgttatgaacatgggtgtacaattttcaagaccctgcttacattttctgggtgtacacccaccattgaaattggtgcatcatagtaactattgttagttcttagacaccattttagcgtcacaggaaattcgacagcttccaagaggtttaaggtcttggtgtaaattggtaacagaccctggcttcctgcctccaagatctgtttgttgtaccaaatagataagcacccataaccccgaagaaatcatatggtggtgaaaagaaatgctgtagtcgagtttgaaggaaattgtgttaaacatgctttactttgctcatttctttcatgttctcttaggcaaatgagtgcacaggcaggagagctggcttaggtagaaatgatcaactgtcagtctgagtgattaatctgggctgcagacatgttttctgtggcctatataaggttttatccttttaaacgaattgctaatatttttttaaaaaggatatgtcatatgaaagtccagatttccatcttctctctctctctttttttttttttttaattgagacagggtcttgctctgttgcccaggctggagtgcaatggtgtgatcatggctcactgcagccttgagctcctggatttaagcgatcatcccccctcagcctgctgagtagctgggaccacagaagccagataccactcatggctaattaaaaaaattttttttgtagagatgggggtcccactgtgtttcccaggctggtcttgaactcatgggctcaagtaatcctcccactttggcctcccagagtgctgggattagagatatgagtcactgcacccagccccatcttctcttaatgacactccagcaatactaggcccatctttctgcctgctctccacagtccccaccactccgtattactcctacctacttttcttaattgaattacctacctgcccattttgccatttgaatttaagacccctggctcagagaataggtctaggagaacctaggtagggtttcaactgttctggtcaattttccaatattccggtattagtttttagtatctgagtgttcaagtgaattaactcatgtaatccagcttttacagagaacttactatgtgcagggtctatggctgggtcctagtgtcacagagatgaataaggcacagtctctgacctgaaaagtggcaatcactatctgttgggggaggggcagacagatgtaatggtccaattttggccacagactgattttgaaggggtgggcagagtaaaagtttctaaggagacacattgagctgtatctggaagagtaagagaccagctacatgaggaactgggagcaggcgagagtgtttcatgcagaagcaacagcagatacaaaggctgtgaggtggctgagtttgacgtggttaggaacttaacgaaggctagtgtgacaggagcttaacagagccgggagagtggtagtaggttacattagccatgtatttttatatcaacggcctaacccttaagccaggcagctgttgggcaaattcgtgttcccagtcttcaggggccttgctcagaacaggtagctggtttagcactgtcagtcagaggagggactgggcctgatcctttcccctgcgtctggtgccaaggacagggtagggcacagaggtttcagtcaagatctgctgacagcacgcttgagaagagaacaggaagtgcaggctttgttgaaggaggctcaggcgtggctctgtcttctttggcgcactcattctcaagtcgctgacacctcctccaccagagaggtagctgggagaatgagatgcagggaggaagcatttacaggccccaccgaaaaaccttaaagggctgagagcttgagggcaggtaggaaaaagggctgtgagagctaagggagggcatcccacttagcttggaggggaagggaggcggggtcgggaaagcagatggcaccctttagcccagactcaaggaatgtgtaggggaattttagctagagtggtttggacatttcattttgctttctggcatcatcatttcctcagaaaacactcgcaggccccagtggccctcgtgggcctcccccggggcgggtcttagcttcactcggcaaccctctgcaaaagagcaggccctcccaggagcgccgagtcctgtctgcagtttgctgattttcccaccaggggccgctgcgcatgggcgacgaagcgcgcgggttcccaagccgcagagaggcggaagccgattggttgtcaggcgaggcgcgagggcggagcctgggaactggccgggagttgggggctgggagctcgcccccgggccgagccgggtcaggctgttgtcgcctcaggcagctcctgggaggctaacgtcgtgtcctgggcctctgtttagacagctctagaactgaggcgagtggagcagcaccaaggcccggagatcggggcagggcagctgctgtcgccgccgccgcaggcctgagttacctgagtaactgcgggtcagggacccgcccgacggcccgcggttggcgctggagactctcggtggggaaagggaagctgggacttgatcctttgcgcgggatcctggcaaagactagcgcgggccgggggtccgggagagcccgctaggggcggggattccggggagccgtcttcaccggttattccgggatccagctgggcgctggggctggcccgggcttcgctggggaccgggcggcgcggggcgggcgcggagacgcacgcccccgcccgccccgggcccgccccgcgccgcccgcccgcctggaagccgctgtcctgggcctggccggtgtgcgtccgcctgctggacctgggcaccgccagccgcctgggcacgggactgggcgggggcgctgacctcggcctaggaggcccaggatcccggagacgcccgcgccctcaggaccctgcgggtcgcacgccctccccagcttctgctgctcgccgctcttcggcagggcgaggtcaggtgcccccttctcgcctctcttctcttctcttctcttcctcctccacttctgtgcccgcggagactccggccgcccccttccgcaggggtgtagtaatctgcggagctgacagcagccccgcagccaccctgcccgaagtctccggaagcggcacgagctcaggccgccgcagccccggcggacccactgttggacctgaggagccagccctcctcccgcacccaaacttggagcacttgacctttggctgttggagggggcaggctcgcgggtggctggacagctgcggagccgcgagggcatcttgcctggagaccgtcggctgcactcccgggctcctggctttgcctctgggatcccgaggtgtccacatcagacgcatgttgactgagacctagagtcatggatgtatgcgtccgtcttgccct

SEQ ID NO: 1625 - DNA, 6000 bp, Homo sapiens
tcatctataaaatggggacaatataacacaggatggtaataagaatttaataaaacaaaatgtttaaatagtgcctgacatatagtaagctctaaaaaagttagttgctattattatcattgatgttattgtattaatctgtcctacaattaggttcaggctttaactagatctctgttcccctctcattctccatgatagcatcctgtttatttcttccatgacattttccacaagataatatatttatttatgtgtttattatctgtctcatcaacaagactgtaacttccatgagggaaggaacatgtctgttttgttcatccttaaatccccacaggaacatatgacctagcccagagaaggcactcaaatattaatacttgtttaataaataccacatgagctggcattgttcaatgtttgctgaatcaattaacctagctaagggtgattgtcaaagctgaggcctgggagcagattatatcctggctaccccaggcttagtgtgtccctctccccaggccccagtattagcttcagccaagccccacctacctgctcttggccccagcccagttccgggagccaccctcagctaaaattagcatagctaccaagatggccaggccatttatagccttggaggcagcagcaactagctgggggagggaggcagggttctggcctgccactccatcagaggttgattgagaagccagcctgcactctgcacactgcctagatgcctatcctccaaggccctgtcctagctacactgaactaaaccacagttcctgattagaggccctcaatacctccaacactggcagccataactccagactccacctgaggtccctcatgcacattctacagaaaccattgttgttttctagagtctaaggacggttccaagcatccgtatcaggccagcttcagaaacgcaagccccagagtagcacaggcaggcacagatctttactgagaaagtgacctagcatggctgggtgtacaggtattaaagagccaaagggtgacaggaatggcctctccacggcccagtgagagatcctccttgtagagcacctgccttcactgcaggatcaggctttcatagtgtttattgtatgcatgctaaagccataagcattttaactaaatcaatcttaggatcaaatattttaactaactaaaaagagacagatgggtatatacatccaaaagagaaaaaatcaaattctctgggcccctgcaaaagactctccagagcagaaaaaaagtacagcccttttcttggctctcagctacagagtcaccaaggcctgcctaattgtcagaaggaaagcaacattctccagccctgcctagcactcctttaacagggcaggacctgagaagatggaagaaatccaagacttaagcatcagaagacctgcctataagaaagaccaagcacaggaccaggtttcttcacccataaaaatggggacaataccacttgccctgcattgtaacagggctattgtgagactctgttggaaaaacagctatgtaattgtaaaatacaaactgcagagaacacacaaattgactgggtatgttgaatctgatttttaaaagtagtagttttaagagcaagtaaagctcctcctgtgttctggggatacagagaggctggaaaggatgcaagagttcctagttgcatagaaagtttctctccaaactcttttgcagatcccagtctatatgaaccacctctttgcaaaaacaagtccctgactgagtcaaagacaaaaccccaggtagacccaaggggaaaacctaccacaacaatagtgctagaacctccaggtttccacaaaccttaggcattcacagcacctagggtctctctgagactttcctccctggaattcactattattgtgacaacagaaaccagtttctaaactgagcatgagtaggcctaagtggtataatcagcatagccaggcctctgaaatatatgttgtgtgaagaattgtctccaaaagctcaagtcatggggtggtcctgaggaaggctagaatgccttttacttcaggcgaaaaacaaaaaacaaaaaaaaaaaaaccttcctaatagccagccaatgtctacattcaaaatttcatccctttagcttatgtctaaaatatagaacacccactctccaaaaaatattcatcttatgtcaggcactcatattttggagtgaaaaaagacatattatcagttataaataggaatgtcacagggacaggaagagatgataattaggtctacttcacagttcaatctacatttgcccactagtctttcccttcatagcccaataagaaccaagctttcagccaggtctcaaaggtcaaggagactctctatggagagacaggattaataggcaaaaaggatctatctagaaagcaacagccaggtatcctacttacacatgggcaaccctggcctcatttggaaaccagacctcttggaacatctggaacttaaaagggtattgcccaataaagggtctaccaccaaagccagcttctggatccatccatgaaactccccagccaccatgacctatatttccttttctgacttgtatcagcaggtgcccactgagccattccctcatttgaacttgcttatgctcagaaacaactcatctataaactctccccacactgcaggtcacagctttgggcagatcacagccaaagggtgagagaaatgggaaaagagaactgatctcgtaagccttatgtaaaatgactggattttaatagagttccttgatgggtacagtggctcacacctgtaatcccagcactttgggagggatccctgcacaacacagagagacagtgtctgttcaaaaaattaaaaatagaaagaaaaaaaaagttagccaggcccagtggctcttgtgtttagtcccagctaccgggaggctgaggcaggaggatcacttgaacccaggagtttgaggctgtagtgagctgtgatcacactactgcattccagcttggacgacagatcaagaccctgtctcaaaaaaacaaaacaaaacataaaagtgttcctttctactgcaaaagtataccagggctcctgctgcctgataagccttcacaactgcataggaaaaaccatgacagatcaaaagtagcatggtttccctagcaagcagactcagggaaaaaaaaaaaaaaacaaaaaaaaaaacctgtagcatggaattcccaccctcatcagtcagaagaaacagaataagtcaacaagtggtcccaggaattatatcatgtctatgtcaagaaaaggccatttaacaccctagttgtaaataggattccatctaagaaaccgcctggatatttcaaatgcgcacagcaaagagacaagactacctaagggaagggtgggactagggttcccacggttgttggaataggcacacctgaacaccaggctttcaggcaacagaggtggcccagccttaactttccctttccaacataagtggccccaacctcccccatgctgctcagtactaaaaccgaataggagcaatgaacttatcatctcaccaggccattcttccagacaagtaggcctaagatggggtctttccttgctgatctaaaaggtcaagttgccccaaaggcttcttcttactgccaacaaaaaaaatcctgagtgcgggggatgaggaaagttgttcaggaaagatacaggcatttgccatgactactgaccagaaagaacttcttgaactacttggaacaggcagtgccatgtgtgaatcctccatgaacctcacatgtacaaacctagatttcaacttgcccacttcgggccactcagtcctgagccaaagcctccagcccagtccagcccgcagcaaggccttacctgctgcagtggactcctcagagttggcccccgagctggttcctgtcgccttctcactgtgactatggctgaggctctggccctggtgcaggaggagtccccagaggagccacagggcaagacggacgcatacatccatgactctaggtctcagtcaacatgcgtctgatgtggacacctcgggatcccagaggcaaagccaggagcccgggagtgcagccgacggtctccaggcaagatgccctcgcggctccgcagctgtccagccacccgcgagcctgccccctccaacagccaaaggtcaagtgctccaagtttgggtgcgggaggagggctggctcctcaggtccaacagtgggtccgccggggctgcggcggcctgagctcgtgccgcttccggagacttcgggcagggtggctgcggggctgctgtcagctccgcagattactacacccctgcggaagggggcggccggagtctccgcgggcacagaagtggaggaggaagagaagagaagagaagagaggcgagaagggggcacctgacctcgccctgccgaagagcggcgagcagcagaagctggggagggcgtgcgacccgcagggtcctgagggcgcgggcgtctccgggatcctgggcctcctaggccgaggtcagcgcccccgcccagtcccgtgcccaggcggctggcggtgcccaggtccagcaggcggacgcacaccggccaggcccaggacagcggcttccaggcgggcgggcggcgcggggcgggcccggggcgggcgggggcgtgcgtctccgcgcccgccccgcgccgcccggtccccagcgaagcccgggccagccccagcgcccagctggatcccggaataaccggtgaagacggctccccggaatccccgcccctagcgggctctcccggacccccggcccgcgctagtctttgccaggatcccgcgcaaaggatcaagtcccagcttccctttccccaccgagagtctccagcgccaaccgcgggccgtcgggcgggtccctgacccgcagttactcaggtaactcaggcctgcggcggcggcgacagcagctgccctgccccgatctccgggccttggtgctgctccactcgcctcagttctagagctgtctaaacagaggcccaggacacgacgttagcctcccaggagctgcctgaggcgacaacagcctgacccggctcggcccgggggcgagctcccagcccccaactcccggccagttcccaggctccgccctcgcgcctcgcctgacaaccaatcggcttccgcctctctgcggcttgggaacccgcgcgcttcgtcgcccatgcgcagcggcccctggtgggaaaatcagcaaactgcagacaggactcggcgctcctgggagggcctgctcttttgcagagggttgccgagtgaagctaagacccgccccgggggaggcccacgagggccactggggcctgcgagtgttttctgaggaaatgatgatgccagaaagcaaaatgaaatgtccaaaccactctagctaaaattcccctacacattccttgagtctgggctaaagggtgccatctgctttcccgaccccgcctcccttcccctccaagctaagtgggatgccctcccttagctctcacagccctttttcctacctgccctcaagctctcagccctttaaggtttttcggtggggcctgtaaatgcttcctccctgcatctcattctcccagctacctctctggtggaggaggtgtcagcgacttgagaatgagtgcgccaaagaagacagagccacgcctgagcctccttcaacaaagcctgcacttcctgttctcttctcaagcgtgctgtcagcagatcttgactgaaacctctgtgccctaccctgtccttggcaccagacgcaggggaaaggatcaggcccagtccctcctctgactgacagtgctaaaccagctacctgttctgagcaaggcccctgaagactgggaacacgaatttgcccaacagctgcctggcttaagggttaggccgttgata

SEQ ID NO: 1626 - DNA, 6000 bp, Homo sapiens
ggattacaggcacgtgccaccacaccctgctgatttttatatttttagtagagaccaggtttcaccatgttggccaggctggtcttgaacacctgacctcaggtgatctgccctcctcggcatcccaaagtgctgggattacaggtgtgagccactgcacccgaaccccatagtcacctatttttggacagaagttgacctcaggtcaacatggggaccaccgtgtagcccctgttttatctagcagagcttctgtgaggaagagatgagataatacatgtgaaaactcttgcaaacagtggaatagaggcataagaattagttaatccaatttgatttagccaacatcttcagaacatctaagcaaggccctaagattaatgcaagggagatatactgcataggtataaaaagagagatggggagaaagctctctgtttcctcctgaagcttacaatatgttgagggggtcctttctttttttttttttttaaacagatttttgctctatcacctgggctggagtgcagtggcaatcacagctcactgcagcctcgacctcctgggctcaagccatcctcctggctcagccccctgagtagctgggactacggggacacaccaccatgccaagttaatgtttgtatttttttgtagagacagagtctcactatgttgcctaggctggtctcaaactcctgggctctagtgatcctcccatctcagcctcccaaagtgctaggattttaggtgtgagccctagtacatacctgggttcttgcaagggtcacacttttagaaggacgaagcataggggcttatagagatgagggtcacagattctgatcaggtttcagaatttttttattttgtagaatattaaagctgcactgggtcaataatctggtagctgaccagtttatagttggggagactgaaattcagaggggaactgacttttctagtgtcacatcgtgatcttggaggcagagaagacaccagaagtttcttcctgttgcccaggctgtggctttggctcccaggtaccatttatttgttattttattttatttttgagatggagtctcactttgtcacccacgctggagtccggtggcgtgatcttggctcactgcaacctctgcctcccagattcaagtgattctcctgcctcagcctcctgagtaactggggttacaggcacacgccaccacgcccagctaatttttgtattcttagtagatacggggtttcatcatgttggccaggctgttttcaaatcactgacctcaagtgatctgccggccttggcctcccaaagtgttgggattacaggtgtgagccacggcgcctggtcatttatttgtatttttaattgtggttaaaaaatacataacatacattttgccagcttaatttttttttttttttttttgagacagagtcttgctctgttgcccaggctggagtgcagtggcgcgatctcggctcactgcaagctccaccttccaagttcatgccattctcctgcctcagcctcctgattagctgggactacaggtgcccgccaccatgcccggctaattttttgtatttttagtagagacaggatttcaccgtgttagccaggatggtctcgatctcctgacctcgtgatctgcctgccttggcctcttaaagtgctgggattacaggcgtgagccaccgcgcccggcctcatgttaatcatttttaagtgtacagtttagtcatgttaggtacattcgcattgttgtgcagccaatctccaaaacttttttcatcttgtaaaattgaaactattcccagctttcccctctccccagtctctggcaaccactactctactttctgtctctatgaatttgactgttttaggtacattcatataaatgaaatcacagtgtttatccttttgtgactggcttatttcacttagctggctgtcttcaaggttcatccatgttgtagcatggtcaggatttccttcttgcttaaggctgtgtactatttaattgtacgtatgtaccatattttgtttatccattcatctatccatgaacaacttcggttgctttcaccttgtggctgttgtgaataatgctgttatgaacatgggtgtacaattttcaagaccctgcttacattttctgggtgtacacccaccattgaaattggtgcatcatagtaactattgttagttcttagacaccattttagcgtcacaggaaattcgacagcttccaagaggtttaaggtcttggtgtaaattggtaacagaccctggcttcctgcctccaagatctgtttgttgtaccaaatagataagcacccataaccccgaagaaatcatatggtggtgaaaagaaatgctgtagtcgagtttgaaggaaattgtgttaaacatgctttactttgctcatttctttcatgttctcttaggcaaatgagtgcacaggcaggagagctggcttaggtagaaatgatcaactgtcagtctgagtgattaatctgggctgcagacatgttttctgtggcctatataaggttttatccttttaaacgaattgctaatatttttttaaaaaggatatgtcatatgaaagtccagatttccatcttctctctctctctttttttttttttttaattgagacagggtcttgctctgttgcccaggctggagtgcaatggtgtgatcatggctcactgcagccttgagctcctggatttaagcgatcatcccccctcagcctgctgagtagctgggaccacagaagccagataccactcatggctaattaaaaaaattttttttgtagagatgggggtcccactgtgtttcccaggctggtcttgaactcatgggctcaagtaatcctcccactttggcctcccagagtgctgggattagagatatgagtcactgcacccagccccatcttctcttaatgacactccagcaatactaggcccatctttctgcctgctctccacagtccccaccactccgtattactcctacctacttttcttaattgaattacctacctgcccattttgccatttgaatttaagacccctggctcagagaataggtctaggagaacctaggtagggtttcaactgttctggtcaattttccaatattccggtattagtttttagtatctgagtgttcaagtgaattaactcatgtaatccagcttttacagagaacttactatgtgcagggtctatggctgggtcctagtgtcacagagatgaataaggcacagtctctgacctgaaaagtggcaatcactatctgttgggggaggggcagacagatgtaatggtccaattttggccacagactgattttgaaggggtgggcagagtaaaagtttctaaggagacacattgagctgtatctggaagagtaagagaccagctacatgaggaactgggagcaggcgagagtgtttcatgcagaagcaacagcagatacaaaggctgtgaggtggctgagtttgacgtggttaggaacttaacgaaggctagtgtgacaggagcttaacagagccgggagagtggtagtaggttacattagccatgtatttttatatcaacggcctaacccttaagccaggcagctgttgggcaaattcgtgttcccagtcttcaggggccttgctcagaacaggtagctggtttagcactgtcagtcagaggagggactgggcctgatcctttcccctgcgtctggtgccaaggacagggtagggcacagaggtttcagtcaagatctgctgacagcacgcttgagaagagaacaggaagtgcaggctttgttgaaggaggctcaggcgtggctctgtcttctttggcgcactcattctcaagtcgctgacacctcctccaccagagaggtagctgggagaatgagatgcagggaggaagcatttacaggccccaccgaaaaaccttaaagggctgagagcttgagggcaggtaggaaaaagggctgtgagagctaagggagggcatcccacttagcttggaggggaagggaggcggggtcgggaaagcagatggcaccctttagcccagactcaaggaatgtgtaggggaattttagctagagtggtttggacatttcattttgctttctggcatcatcatttcctcagaaaacactcgcaggccccagtggccctcgtgggcctcccccggggcgggtcttagcttcactcggcaaccctctgcaaaagagcaggccctcccaggagcgccgagtcctgtctgcagtttgctgattttcccaccaggggccgctgcgcatgggcgacgaagcgcgcgggttcccaagccgcagagaggcggaagccgattggttgtcaggcgaggcgcgagggcggagcctgggaactggccgggagttgggggctgggagctcgcccccgggccgagccgggtcaggctgttgtcgcctcaggcagctcctgggaggctaacgtcgtgtcctgggcctctgtttagacagctctagaactgaggcgagtggagcagcaccaaggcccggagatcggggcagggcagctgctgtcgccgccgccgcaggcctgagttacctgagtaactgcgggtcagggacccgcccgacggcccgcggttggcgctggagactctcggtggggaaagggaagctgggacttgatcctttgcgcgggatcctggcaaagactagcgcgggccgggggtccgggagagcccgctaggggcggggattccggggagccgtcttcaccggttattccgggatccagctgggcgctggggctggcccgggcttcgctggggaccgggcggcgcggggcgggcgcggagacgcacgcccccgcccgccccgggcccgccccgcgccgcccgcccgcctggaagccgctgtcctgggcctggccggtgtgcgtccgcctgctggacctgggcaccgccagccgcctgggcacgggactgggcgggggcgctgacctcggcctaggaggcccaggatcccggagacgcccgcgccctcaggaccctgcgggtcgcacgccctccccagcttctgctgctcgccgctcttcggcagggcgaggtcaggtgcccccttctcgcctctcttctcttctcttctcttcctcctccacttctgtgcccgcggagactccggccgcccccttccgcaggggtgtagtaatctgcggagctgacagcagccccgcagccaccctgcccgaagtctccggaagcggcacgagctcaggccgccgcagccccggcggacccactgttggacctgaggagccagccctcctcccgcacccaaacttggagcacttgacctttggctgttggagggggcaggctcgcgggtggctggacagctgcggagccgcgagggcatcttgcctggagaccgtcggctgcactcccgggctcctggctttgcctctgggatcccgaggtgtccacatcagacgcatgttgactgagacctagagtcatggatgtatgcgtccgtcttgccctgtggctcctctggggactcctcctgcaccagggccagagcctcagccatagtcacagtgagaaggcgacaggaaccagctcgggggccaactctgaggagtccactgcagcaggtaaggccttgctgcgggctggactgggctggaggctttggctcaggactgagtggcccgaagtgggcaagttgaaatctaggtttgtacatgtgaggttcatggaggattcacacatggcactgcctgttccaagtagttcaagaagttctttctggtcagtagtcatggcaaatgcctgtatctttcctgaacaactttcctcatcccccgcactcaggattttttttgttggcagtaagaagaagcctttggggcaacttgaccttttagatcagcaaggaaagaccccatcttaggcctacttgtctggaag

SEQ ID NO: 1627 - DNA, 6000 bp, Homo sapiens
cttctctctgaccttgttttctgaccctacttgttttttgtgtgttttgtggcaccagtagggtctgtatgtgagtccctatgcagatcttccttatactttctttctgagtttctctgctctccacttacctcggtgatcagacttgactataaaaatgagtctatttcttgttgatttcctataagcagctggtatctcatgtcagatggtttcctggagttatctgataatgggagaaaatccccttccttggagattttggtgtttctgctcccaaggcttgcttgtggtaactgtctttctagtcttagattaagaggttctaggttggagcctatgaggaccaaagaagggtatatcttgaagaacctgattaatcaaacctaaaaaatcatgaggatagcagatttgatctctaaaatatatcccaattctgacaaattctcatcacttccacagctaccaccttgtttcaaaccaccattagctcatgttattgcaatacccacctgagtgatttctctgtatctgccctttcccttttatagtctactttttaacacagtatccagagaaatcgttttaaaaatataaatgtcttcatgttatacctctgttcaaatccctgtaacagctcccatctcagagtgaaaaatcaaagtcttgataatagcctaaaaagtcagctgggtgcatggctcacgcctataatcccagcactttgggaggccgagacaggtggatcacctgaggtctggagttcaagaccagcctgactaacatggagaaaccccatctctattaaaaaatacaaaattggctgggcgcggtggctcacgcctgtaatcccagcactttgggaggccgaggcgggtggatcatgaggtcaggagatcgagaccatcctggctaacaaggtgaaaccccgtctctactaaaaatacaaaaaaaaattagccgggcgcggtggcgggcgcctgtagtcccagctactcgggaggctgaggcaggataatggcgtgaacccgggaagcggagcttgcagtgagccgagattgcgccactgcagtccgcagtccggcctgggcgacagagcgagactccgtctcaaaaaaaaaaaaaaaaaaaaaaaaaaaacaaacaaaattagccaggagtggtggtgcatgcctgtaatcccagctactcgggaggctgaggcaggagaattgcttgaaactgggaggtggaggttgcggtgagccaggtttgtgcccctgcactccagcctgggcaataagaatgaaactctgtctcaaaaaaaaaaaaaaaaaaaggcataaaagggggatctgtgttctggaaccctgtggcttctttgagttcatctcctgctggttaccaccttactcatttctctccaacgatactggccttcttgttattccttgaacataccaagtatattctcttgcctcagggactttgcttctgcccttctccattcttgggatactcttctcccagttattctgcatgcctttctcccacacctcttttaaatatttgctttgaagtcaccttcttatcttttgccttgttgcactcctgaaggcaaaatggatcacaagcagctctgctggagccacccacaaaaatctggccagagttctcgctcttgttgcatctgctcaaaccagcatggtctgatctggaaatatagcctcaatatgtgcctccagtgttgccatcagtacgtgaaggatataggtttcattaaattggactaagtgatcttccttgaatggattatccaaggcatccacacaatgaaaaatcatattagctgtttgtacataaaataaaaatgaagaaaatgaagtcagcttcttaatgacaccttgattcctctcattaaaatgacaaattgtgaataccactactcttggcatctcctattcctcttccctgctgtttttttctttatttaaattatattttatttaaaaacatttttaaaattttattttatttgtaactgatacataacagttgtacatattggccaggcatggtggctgacgcctgtaatccgagcactttgggaggctgaggcaggaggattgcttgagctcaggagtttgagaccagcttgggaaacatagtgagacaccgtgtgtacaaaaaatttaaaaaaatagctcggtaccgtggtgcacacccatagtccaagttacttgggaagctgaggcaggaggatcacccagcctgggtgacagagcgagacactgtctcaaaaacaacaacaacaaaaaaccccaccaaccaaccaaccatccaaaaaaattgtacatatttataggatacagtgtgatgttttgatacatgtatacaatgtataatgatcaaattagggggtaaaattagtatatctgtcatctcaaacatatatcatttctttgtggtgaacattcaaaatcctttcttctagctattttgaaatatacactatattattgttaactaaaatcaccctactgtgcaatggaacactagaacttataaacttaccctcccaactgtaaatttgtacccactgaccaatctctccccatctccctgtctacccttcccagattctggtaaccactatcctacgttctacttctatgagatcagctttttaagattccatatatgagtgagaacatgtggtatttattttttgtgcctggcttatttcacttagcataatgtcctcgaggcacatccatgttgccacaaatgacagaatttcattctttttttctttatggctgaatggtatgctgttgtgtaaatatacgacattttctttaaacattcatttgctgatgggccctgaggttgattctatatcttggctattgtgaatagtgctgcaataaacatggaagtgaagatgtctcttcaacatgctgatttcatttcctttggatgtgtaccgaatagtgggatttctggatcatatggtagttctatttttcatgttttgaggaacctccatactgttttatatggtgactgtactaatttacactgccaccaacagtgtgtaagggtttccctttctctatatccttggcagcatttgttatttgttatttttttggtaatagccatactaactggggtgagatgatatctcattgtggttttgatttccatttccctgatgattagtgatattgagcatatttttcacatatcttttggacttttttttttcttttttctctgagacaaggtctcgctctgtcacccaggctggagtacagtggcatgatcacaactcactacaaccttgatctcccaggctcaagtgatcctctgacctcaggctctagcttcagcctatagctgggaccacaggcataaaccaccacacctggctaattttttttttttaattttttgcacaggcggagtctccctatgctgcccaggctggtctcaaaatcctgatctcaagtgatcctcccactttcgcttcccaaagtgccgtgattacaggcatgaaccactgtgctcagtcttgtttgtcttcttttgagaaatgtctagttagatctttcacccattttttaatctgattttttttctattgagttgttcgagttccttatatattctagatgttaaccgcttgtcagatgtataatttgcagatgttttctcccattctgtaggttgtctcttcacttttcattgtttccattttattttgatttaatcccatttatctatttttgtattttgttgcctatggtggtggtggtggtggtggttgttgttgttgttttttggcagtgcagtgacgtgatattagctcactgcagcctccacttcctgggttcaagtgattctcctgcttcagcctcccgagtaactgggattacaggcatgtgccaccatgcccagctaatttttgtatttttagtagagatggggtttcgccatgctggccaggctggtctccaactcccagcttcaggcgatccacctgccttggcctcccaaagtgctgggattacaggcatgagccaccgtgcccggcccccagtacagtttattgaagagattgtcctttcctcagtgtttgttcatgcatttgtccaaaatcaattggctatacatatgtggattttattcctgtgttctgtattcttttccatgtctgtttttatgccagcaccatgctgtttcagttactattgttttggagaatattttaaagtcagatggtgtgattgctctagctttgttctttttgctcaagatggctttggctattcaggtttctttttggttccatatgaattttaggatttttttttctatttctgtcaagaatgtcactgaaatttagatagggattacattgaatccgtagattgctttgggtagtatgaatattttaacaatattaattcttccaacccatgtacatagggtatctttccatttatttgtgtcttcttcaatttagttcatcagtattttacagttttcattgtagagatcttttacctccttggttaaatttattcttaggtattttattattttttgtagctattgtaaatgggattttttttaatttctttttcagatttgtttactagctctaacagttttttggtggtgtctgtaggtttttctagatttaatatcatgttattggctgggcatggtggctcacacttgtaattccagcactttgggaagcagaggtgggtggatcccttgagatcaggagtttgagaccagcctgggtaacgtggtaaaatcccgtctctaccaaaaatacaaaaaattagccaggtggggtggcgtgcacacctatagtcccagctacttgggaggcagagatggaaggatctcttgaggcccaggaggtggaggttgcagtcagctgagatcatgccactgcactgcagcctgggtgacagaataagaacctgtctcaaaaaaaaaaaaaaaaaaaaagagagaagatcatgttgtctgcatgcaggggcagtttgacttccttctttccaattttgatgcctttcttctttccttccttcccttccttcccttcctttcctttctttcctcttgcctaattgctctggctaggactttcattactgtgttgaataatagcggtgaacgaaggcatccttgtctcgttccagattttagaagaaaagctttcaacttttccctgttcaatatattagatgtgggtttgtcatatatggcctttattgtgttgaggtatattccttctatacctaatttgattgcagagctgggggctggaatcaactgaagtctcagtcactcacatacctgactcctgaacttgaagactcaaacagctggggctactcacacatttctatctctacatagactttccacatgatatctccagcagggtggcttcagcgtagccaggcttcttacattttgactcagggcccctcagggcccaaaagagagagagctaggtgaaatttatattgctttttctaacctagacttgggtgtcgtgcaacatcactgttgccacattctatttgttagaagatgagtcactaatgtcagcctatattaaaggggagggaaatccacctttaacgggaggattatcaaacaatttgtggacatgttttaaaaccattacagtcggccgggtatggtggctcacacctgtaatcctagcactttcggagaccgagatgggtggattgcctgagctcaagagtttgagaccagcctgggcaatggtgaaaccctatctttactgaaatacaaagagttagctgggtcgggtggcacacacctgtaatcccagctactcaggaggctgagacaagagaattgcttgaacttcggaggtggaggttgcagtgagctgaaattgcgccactgcactccagcctgggtgacgagcgagactctgtctcaagacaaacaaacaaacaa

SEQ ID NO: 1628 - DNA, 6000 bp, Homo sapiens
gaaaagctgaggaacaaagagtggagataatgggctatagttacaaccaaaaccctggagttttgtagatggaggtctaagaaagattaggaaagacccctatccttaccaggtggcggacacaatacccataccccaaactgtgcaatctttgtggagaacatgcagttcagatgagcctagggctgcacaccatcccctttcgaaaaactcattctggacattttcaaacatacacaaaaatagagagaaaagaataatgagcctgatttacccacgagccagttttaccaattatcaatacataactaatcttgctacctgcatgctctcttccgttcctaggcccagcgtaggttattctgaagcaaatacttttatctataaatgtttacagctgggtgcagtggctcacacctgtaatcccagcattttagaaggctaaaatgggtagattgcttgagcccaagagttcaagaccagtctgagcaacatggcaaaacctctcctctataaaaaagacaaaaaaattagccgggagtggaggcatcagccactgtggtctcagctactcaggtgactgacctgagaggatcatccgaacccaagaaagtcgagactacagtgagccatgattgagccactgcattccagcctggatggcagagagagaccctttctcaacaacaacaacaacagtttacttttgcatttctgaaagataaaactcttaaaaaaaaaacccaccacaatatcattattgtacctacaaaaatttaataataattctttaatatcattaaatatcctgccaaaaaaaggctggattgagcctgggcacagtggctcacgcctgtaatcccagcattttgaaaggctaaggtgggtggattgcttgaggccaggagttcagaaacagcctggttaacatggtgaaaccctgtctctacaaaaaacacaaacattggctgggcatggtggcttatgcctgtaatcccagcactttgggaggccgaggcaggtggatcacgtgaggtcaggagttcgagatcagcctggccaacatggtgaaaccttgtctctactaaaaatacaaaattagctgggcgtggttacaaacgcctgtaatcccagctactcgggaggttgaggcaggagaatcacttgaacccgggagacagaggttgtggtgagctgagatagagccattgtactccagcctgggcaataagagcgagactccttctcaaaaaaaaaaaaaagaaggaaaaaaaaaatgtagagacagtgtctcaccatgttgcccaggctggtcttgaactcctgttctcaaacaatcctcctaccttggcttcccaaagcactaggcttacaggtgtgagcaaccatgtctggcctgatctatctgttaaagttatgtttgatcaagttccccttctatttttttcgttgttgttgtttgcagttttgcttttgttttttaactggagaatcatgttgcttgtcctgagttttctatggtttggatttttcagactctctcctgtggtcatatttaccatgctcctcttcccctggatttcctgtaaattggtagttagttctagagccttgatcagattcagatttgagcatttttgtgttttgcttttgcaagaatatttcataggtggtattaaatacttctactaggccgggcgcggtggctcacgcctgtaatcccagcactttgggaggccgaggcgggtggatcatgaggtcaggagatcgagaccatactggctaacaaggtgaaaccccgtctctactaaaaatacaaaaaattagccgggcgcggtggcgggcgcctgtagtcccagctactcgggaggctgaggcaggagaatggcgtgaacccgggaagcggagcttgcagtgagccgagattgcgccactgcagtccgcagtccggcccgggcgacagagcgagactccgtctcaaaaaaaaaaaaaaaaatacttctactaaaggcaaagtctgattgcctctcttttttgtgatgttagtggcctttggtggtcattgtctcaactccttttaaaaggaacagcccctcctgcactccagctgattatttttgggattggggtgaggaaaaatatagtctcaatgcagccagttaaagggaaactgaaaactagatattggtgtaaaatagcccaatttctaaacgttaacaacaaattctattttttaaaaagcactgtgcaggccacacacaatctatctgaggcttgcatcagtctgcaggttgtaggttggaagtttgcaagactagggggtgtgagtcagtgaccaaatagaggcctagttgctcacttgcccctgggatggtcactgtgggggctgcaactctgaactacctatgaagcttctaggagtagggggatagtactgctgaagagctggggcgggtttgctgggcagtgacctcagcaaggatgttggagtggcaagaggattctcaaggatcatgcactggtggagacattgtgaattgaggatagaggtgggggccagcccaggaaaggggccaagtcactcttttacaactgtgttgctatgaccatgagggctgcagagaaggtttgtgctcctgcagaaatgaggctagaattgagcaaaaattatattctccttcctattgtaggatattcatagagctatggattgaatgcataaatgcatgaattcatgaattaaatgaatgatgaatgaataaactttactacctgtattgaattcatactctgctccaggccttatcgtaaatgctggaaatgtatactatggggcaaagatgttcttacctcctggccttcacagcctggtgaggagacaaagaaagaaacaagtggttatgatcagtgcgatgagctctctggggctggggaagtacaggaggggcccctgaccctgcctgtgagagtggtgggggagagggcaatgggtcagttttaagaagggacctgtatactgatgtctgaaggagaggtaggtgatagccaggtgaaaatcgagagtaagggaggtgggctgggagaggacaagggggcatgtcccaagcaaagagagagaaggggagtggctggaggtaaggctgagaggcagacaggggttcatgacagcacataaaacctggggaggaatttggactttatcctgagggcagtgacaaaacaattaagaggattccgttggaaaattacttgattagtttagcatctcagaagaatcatttgggctgtactgtgcagctgagattggaggagaccagataggaagagaaagaccagttatgatgtttttgcaatgatgcaggttaaaaaaaaaaaagctagtagcctgggctatgttagttatgtggggtggagagaaggggaaagctttaagtcaatcactgattcctgagcaagtgagtacacctggcttcaccactaaggcatttgtggatgaacgaatgaaggaaggaaggaatgatacgtgaacatttaatgtattttatatgtaagtgtcgcatgaatcgatgcaggagtgaaggtgtgcgttctggaataaatgcatgtgtgtgaaagcaaaggccggggtgggctgcgcttggagggagatgtgccaagctccagaagggcctcccagatggccaaggggggagaaactgcccttccaggacagatcggaaggatgaagctctttgaagcaggaaggtacaggctgacagggatggcagatggattggtgtgtgtgactcagtcaggagatggtgaactggtccccagattccagaagtgtccagccagccctcatgaagcaggctgtggctgtggagggcatggaggccctagggtgctgttcctggaaggttttagcaggagagtcctgaggcaatggagggtctctagggaacagcaggtattccctgagcctcagctaagtttcaggtgcctattgaaaaccttattccatagagtgtgagttagggggaagtgggggtgaggagaggcggtgatggctgcctagaaggtggatgggcaagagcccctcctctttgggtgtctgtgggcccacgtcatttggaagctgaggatggtgaagcaccctgcctgaataactctcgtcaggtgtgcagccaccttggcgtaaccacgcccactcccagccctgctgtgtctggttgcccagcagcagggtcttgggactgcctgtcccttagtactgcctcttggaccagtcaggattcctggtttccctggtaacgggaagcacgtcagcagtctgggcgctcccagccggtcctggtgctgcggttgccgaggagacgctgcagcctagctgggccctggcaggtgaggggtggggggtggtgctgggaagccccaagcccagcctcaagcttgctggggctcaggacctcaaagcccacccttgggttcaaactgctgtgcaggtcctggacaggggcgggatccctgaaggccttgaaaccacaccctatttatgctgacagctataggctctgcagggccccaggcagctggggtattccttaggggctgagtctcctggtatccctaagactgggcttggcttaggcactgaggtaaccactggagggtgggatggagattcaggattgggggaggggagccagggcgaggaagaagaggtgtgagcagaaggggctggggtctcatgaacctccctttctcctcccttccccaccccccaaggagattccctagcatggtggtcctggcccctccctagcaagctccaagcgggggaggatcttgcctggcagacgctctgccctggtgagaagggggcgggatgagcttttctctgcagcccagcaccaggctgtgagcccagctggctgggctggaggggctgtgaggagggagggtggaggcaggaggggccgggaatgagcgccatgttctcccaggactttttcctggccattatcctgcaggacagcagcgcaggtgaggggcagcatgaggttgggcctcatgtggggtggggctgacagggagagaagagttagaggacgcatgagcgggttacagggttggagtggtgtggctctgccggcagacaagggtgtatgacacagatgcgaggtatgtgtgtatgtgcatgacatgtttgcttgcatctgtgtgcagcaagggtcaggaagtgagcgtctgtggtgtctgcacacatttggcagggtttgacgtgtgccgtgtgtctgagtgtgggtccgcctgtgtgtgtggtacccacacgtgtgttggggccattgtggtgtggtatctgcacacctgtgtggcaggggctcgtatgtttagctgcatgcacacacacctctgtggtgtctgcataagtgtatggctaaagtttgtgtgtgtgtgcccctgcacatacatgtgcacctgtgtgtgatacctgccatctgtgctggcattttctgtgttgcataccctggtgtttgtggctgcacaggtgtgtggtagggcttgtatgtgttgtgtgtctgtgtatacatgtacgtgtgcaggagctagaaagtgttcaccttcgtgttaactgagataatagatatgtatgaaaggaggttaattggggtcacccaacattcattgctcccttccttcttccctccctgccttcctcctttccacagtgtggccacattagccaccaacagggcccaggaggagacctgagccatgtcccctactggtggccccacatgtggtgactccagactataggctctaggcagaagcaggaactgtgttgtggtatagctcttccaccaccccttctcaaccatggggtctcagaggggaccgggcataggcaccagctgtctgctctttgggtaggctgaccctcaccaagcctcccacctggcagattccttctggaaccccaacgccttcgagacggattccgacctgccggctgga

SEQ ID NO: 1629 - DNA, 6000 bp, Homo sapiens
gcactgactaggtaactggccctctgctcagcattttcaggctttatccttacaataaagctgtgaggtaaatattatgatgattcccatattacagataacaaaaaagagatccagagaggtttagtagctttctcgagaccacagacaggctgagattacaatagagctgaaatctaaaccaggtctcagtccaggcctgagctcttggccccgtgttatgctgccgccaatgcatagagcacaatgcactcaggtgcacttgggacagtcggccccgttttttttttttttgagacagagtctcactctgtcgccagtctgccccgttttaacaggtcacgcctgttgggagcagccagcagctccccacagaggtctgtttggaaagactgggaatgttgtgtgcttataatccacatgctccagcaccattgcaaggatacagttttgtcaggagtaggatattgactaaaagttagaaaagaaaaccctttgggtagggggaggagaatagatactaggactccagggcttaatcattaaatatgtccatttaaattaagctgagtctccacattttctaatgtcgtgtagcgaatacaggaaaagctgaggaacaaagagtggagataatgggctatagttacaaccaaaaccctggagttttgtagatggaggtctaagaaagattaggaaagacccctatccttaccaggtggcggacacaatacccataccccaaactgtgcaatctttgtggagaacatgcagttcagatgagcctagggctgcacaccatcccctttcgaaaaactcattctggacattttcaaacatacacaaaaatagagagaaaagaataatgagcctgatttacccacgagccagttttaccaattatcaatacataactaatcttgctacctgcatgctctcttccgttcctaggcccagcgtaggttattctgaagcaaatacttttatctataaatgtttacagctgggtgcagtggctcacacctgtaatcccagcattttagaaggctaaaatgggtagattgcttgagcccaagagttcaagaccagtctgagcaacatggcaaaacctctcctctataaaaaagacaaaaaaattagccgggagtggaggcatcagccactgtggtctcagctactcaggtgactgacctgagaggatcatccgaacccaagaaagtcgagactacagtgagccatgattgagccactgcattccagcctggatggcagagagagaccctttctcaacaacaacaacaacagtttacttttgcatttctgaaagataaaactcttaaaaaaaaaacccaccacaatatcattattgtacctacaaaaatttaataataattctttaatatcattaaatatcctgccaaaaaaaggctggattgagcctgggcacagtggctcacgcctgtaatcccagcattttgaaaggctaaggtgggtggattgcttgaggccaggagttcagaaacagcctggttaacatggtgaaaccctgtctctacaaaaaacacaaacattggctgggcatggtggcttatgcctgtaatcccagcactttgggaggccgaggcaggtggatcacgtgaggtcaggagttcgagatcagcctggccaacatggtgaaaccttgtctctactaaaaatacaaaattagctgggcgtggttacaaacgcctgtaatcccagctactcgggaggttgaggcaggagaatcacttgaacccgggagacagaggttgtggtgagctgagatagagccattgtactccagcctgggcaataagagcgagactccttctcaaaaaaaaaaaaaagaaggaaaaaaaaaatgtagagacagtgtctcaccatgttgcccaggctggtcttgaactcctgttctcaaacaatcctcctaccttggcttcccaaagcactaggcttacaggtgtgagcaaccatgtctggcctgatctatctgttaaagttatgtttgatcaagttccccttctatttttttcgttgttgttgtttgcagttttgcttttgttttttaactggagaatcatgttgcttgtcctgagttttctatggtttggatttttcagactctctcctgtggtcatatttaccatgctcctcttcccctggatttcctgtaaattggtagttagttctagagccttgatcagattcagatttgagcatttttgtgttttgcttttgcaagaatatttcataggtggtattaaatacttctactaggccgggcgcggtggctcacgcctgtaatcccagcactttgggaggccgaggcgggtggatcatgaggtcaggagatcgagaccatactggctaacaaggtgaaaccccgtctctactaaaaatacaaaaaattagccgggcgcggtggcgggcgcctgtagtcccagctactcgggaggctgaggcaggagaatggcgtgaacccgggaagcggagcttgcagtgagccgagattgcgccactgcagtccgcagtccggcccgggcgacagagcgagactccgtctcaaaaaaaaaaaaaaaaatacttctactaaaggcaaagtctgattgcctctcttttttgtgatgttagtggcctttggtggtcattgtctcaactccttttaaaaggaacagcccctcctgcactccagctgattatttttgggattggggtgaggaaaaatatagtctcaatgcagccagttaaagggaaactgaaaactagatattggtgtaaaatagcccaatttctaaacgttaacaacaaattctattttttaaaaagcactgtgcaggccacacacaatctatctgaggcttgcatcagtctgcaggttgtaggttggaagtttgcaagactagggggtgtgagtcagtgaccaaatagaggcctagttgctcacttgcccctgggatggtcactgtgggggctgcaactctgaactacctatgaagcttctaggagtagggggatagtactgctgaagagctggggcgggtttgctgggcagtgacctcagcaaggatgttggagtggcaagaggattctcaaggatcatgcactggtggagacattgtgaattgaggatagaggtgggggccagcccaggaaaggggccaagtcactcttttacaactgtgttgctatgaccatgagggctgcagagaaggtttgtgctcctgcagaaatgaggctagaattgagcaaaaattatattctccttcctattgtaggatattcatagagctatggattgaatgcataaatgcatgaattcatgaattaaatgaatgatgaatgaataaactttactacctgtattgaattcatactctgctccaggccttatcgtaaatgctggaaatgtatactatggggcaaagatgttcttacctcctggccttcacagcctggtgaggagacaaagaaagaaacaagtggttatgatcagtgcgatgagctctctggggctggggaagtacaggaggggcccctgaccctgcctgtgagagtggtgggggagagggcaatgggtcagttttaagaagggacctgtatactgatgtctgaaggagaggtaggtgatagccaggtgaaaatcgagagtaagggaggtgggctgggagaggacaagggggcatgtcccaagcaaagagagagaaggggagtggctggaggtaaggctgagaggcagacaggggttcatgacagcacataaaacctggggaggaatttggactttatcctgagggcagtgacaaaacaattaagaggattccgttggaaaattacttgattagtttagcatctcagaagaatcatttgggctgtactgtgcagctgagattggaggagaccagataggaagagaaagaccagttatgatgtttttgcaatgatgcaggttaaaaaaaaaaaagctagtagcctgggctatgttagttatgtggggtggagagaaggggaaagctttaagtcaatcactgattcctgagcaagtgagtacacctggcttcaccactaaggcatttgtggatgaacgaatgaaggaaggaaggaatgatacgtgaacatttaatgtattttatatgtaagtgtcgcatgaatcgatgcaggagtgaaggtgtgcgttctggaataaatgcatgtgtgtgaaagcaaaggccggggtgggctgcgcttggagggagatgtgccaagctccagaagggcctcccagatggccaaggggggagaaactgcccttccaggacagatcggaaggatgaagctctttgaagcaggaaggtacaggctgacagggatggcagatggattggtgtgtgtgactcagtcaggagatggtgaactggtccccagattccagaagtgtccagccagccctcatgaagcaggctgtggctgtggagggcatggaggccctagggtgctgttcctggaaggttttagcaggagagtcctgaggcaatggagggtctctagggaacagcaggtattccctgagcctcagctaagtttcaggtgcctattgaaaaccttattccatagagtgtgagttagggggaagtgggggtgaggagaggcggtgatggctgcctagaaggtggatgggcaagagcccctcctctttgggtgtctgtgggcccacgtcatttggaagctgaggatggtgaagcaccctgcctgaataactctcgtcaggtgtgcagccaccttggcgtaaccacgcccactcccagccctgctgtgtctggttgcccagcagcagggtcttgggactgcctgtcccttagtactgcctcttggaccagtcaggattcctggtttccctggtaacgggaagcacgtcagcagtctgggcgctcccagccggtcctggtgctgcggttgccgaggagacgctgcagcctagctgggccctggcaggtgaggggtggggggtggtgctgggaagccccaagcccagcctcaagcttgctggggctcaggacctcaaagcccacccttgggttcaaactgctgtgcaggtcctggacaggggcgggatccctgaaggccttgaaaccacaccctatttatgctgacagctataggctctgcagggccccaggcagctggggtattccttaggggctgagtctcctggtatccctaagactgggcttggcttaggcactgaggtaaccactggagggtgggatggagattcaggattgggggaggggagccagggcgaggaagaagaggtgtgagcagaaggggctggggtctcatgaacctccctttctcctcccttccccaccccccaaggagattccctagcatggtggtcctggcccctccctagcaagctccaagcgggggaggatcttgcctggcagacgctctgccctggtgagaagggggcgggatgagcttttctctgcagcccagcaccaggctgtgagcccagctggctgggctggaggggctgtgaggagggagggtggaggcaggaggggccgggaatgagcgccatgttctcccaggactttttcctggccattatcctgcaggacagcagcgcaggtgaggggcagcatgaggttgggcctcatgtggggtggggctgacagggagagaagagttagaggacgcatgagcgggttacagggttggagtggtgtggctctgccggcagacaagggtgtatgacacagatgcgaggtatgtgtgtatgtgcatgacatgtttgcttgcatctgtgtgcagcaagggtcaggaagtgagcgtctgtggtgtctgcacacatttggcagggtttgacgtgtgccgtgtgtctgagtgtgggtccgcctgtgtgtgtggtacccacacgtgtgttggggccattgtggtgtggtatctgcacacctgtgtggcaggggctcgtatgtttagctgcatgcacacacacct

SEQ ID NO: 1630 - DNA, 6000 bp, Homo sapiens
tcattttccatttgctcaattcattgcattgtggcttctgccttcattttctgctaatacagatcaaatcatggggatccataacctccatgttgccaaattcaaaggatacgttttttttttttttttttttgccttgaccttattggaaatcttttctgcatttgatgttgttgaccacttcttcccccttgaaagtctttcctctcttggatttcttccatgacattactctctcctgatccttctcttacccttctgctaattctcagctttcttcttgactgtctttttctgtgctggctcctaaacactggcattccagagttcagttctcagtccttttctcttctcactctatactcttctaggtagttgttggaatagtcctgttgaaccaggcttggttgctcacccctgtaatcccagcactttgtgagaccaaagtgggaagattgcttgagtgcaggagttcctgacctgctggggcaacatagtgagacccccatctcttcataataaacaaacaaaagaatagttctgttgaagaagggtattggattgagaaagtttttgctaggtcttgaatttgacttaggaattccacttcatgtagcatgtgggaagactttattccttatagattttccaaatgaaaaccgccatcaagaagaaaagaggtgtgtcagatcaatcataagaaaatttacaataccaaagcagtacttatatatagtggaggataaagctgccttcattccagaagtgtctttacttttaatagagatgaaagctctatactttcatataggtgacttgggtgccaactgcctagtaattctaattagctagactaccaaaccaaatagcataaagccactactcttggtaaatgactctagatggatttgcttataattcaattttttcctgataggtccaaggtaataattttcaaagtctgctgcctcagaggaacccacattggtcagaaccaaatgcagcatttgaggtggctcataggctattcattggttgctcccacaccatagaaagcatcagaagagggaagagattacagtagggaaaggatgggtgaaaggcacaggttgattccccattggtcaggagactttgcagacctcagaggagatcaggaattcaggaagatcgcctgcgggtcaaatacataaggaaaaagatgcccatgtgaactgcacatgggcatccctagctaattagagtcctcccttcaacctcatcatgcaatctatgtccttcttacctgaagagatttccctgaatactgcagccttcctgctcaatgagattgggaagacaaatattttggtgggctatctgtaaatgggtgatacttctggattttttttttcattttctcaaaaataaatctagatgtcattttttaaatctacaattccatagctaatcaaccaactgatcactgatttctgggaattctacctcttgaatatttattaaacctatgcaattttctccatccctagtcccaccaccagagtccaagccatcatcatctttaacctggtctcttgcttcctaactggtctatattcttccaattttgctttccacctatctattcttcctcaggagctgaaagcgatcttctaaaatgcgagtgtgaacatgcccctctcctgcttcaaacccttccatgattttccattgcccttaaaataaaggtcaaacccttagctcagcatataaggccctccttgatctggcactttcccaccttcctatttcatcttatgccattctccactatcacaactgttaggctgttcttgtgttgctgtaagtaaatacttgagactgggtaatttataaagaaaagaggtttagggccaggtgtggtggcttatgcctgttatcccagcactttgggaggccaaggcgggcggatcacgaggtcaggagattgagaccatcctggctaacacggtgaaaccccatctctactaaaaacacaaaaaattagctgggcatggcagtgggtgcctgtagtcccagctacttgggaggctgaggcaggagaatggtgtgaacccgggaggcggagattgcagtgagccgagattgcgccactgcactccagcctgggggacagagcgagactctgtctcaaaaaaaaaaaaaaaaaaagaaaagaaaagaggtttaatcggctcacagttctgcaggctatacaggaaacatagcaccagcatctgcttggcttccagggggtcctcaggaagcttttactcatggcagaaagcaaagtgggagcaggcatcccacatggctgatcagaagcaagagagtgtggggggagaggtgccatacactatttatttatttatttatttatttgagatggagtttcactctgctgcccaggctggagtgcagtggcgtgatctcggttcactgcagcctccgcctcctgggttcaagtaattctcctgcctcagccttccaagtagctgggactacaggtgcccgccaccatgcccagctaatttttttgtgtttttaatagagatgggatttcaccatgtggaccaggctgttctcgaactcctggtctcaagttgatctgcccaccttggcctcccaaagtgctgggattacaggcctgagccaccacgcctggccatgccacacacttttaaataaccggatctcacaagaactcactcatcatggggaagacagcaccaagccatgagagatccacccctacgacctgaacacctcccaccagaccccacctccagcattggggattacaattcaacatgagatttgatcagggacaaatatccaaactatatcaacacccatactgaccttcctgtatttctcctgctacttggaatacttttctcttctcctggctgacctctagctccttcatccctttccctcactgaattgtcacttcctatgaaagcctcctaaacttcccaggccaaattaagcccactcacatagctcccggtacatctccttcaagacactcatcacattcctaattacatatttaatgtctctttcccctgttaaatttcaagctgtatgagagacggaactgtatcttgtttcttgacctgttgctagcaccaaggacagtacctcatacatagtaattatttgatgaaagaaaatgaatgaatgaatgaatgaggacacttttgttcttctgggtaattcttcttcatctttcaagaacccaggtcagatgtcatttcctccaggtgagatgcagtcaaatctgattcgtctttagatccctagggcctggcttgggacctgatacatggttcatatatcataggcatttgtcaaatcattataaactattggttgtgaattcataattgttgaaactgaatgataggtatatgagggttcattatattgttctgtctgctttagtatatattggaaatttgccataataaaaagttaaaacatttatatttaccacaagtaaaataaaagtatattcaaagatgactttgaagcttctggcttgggaagccagtagttggtgtcattcattggaatggatggaatggagttgtgtccagtgtgggatgtgtgttgtgttgtgtgtgttgaagagggttctttttcaccccagtgaaactccttaaaagactaataaagggggatgaaacaataaattgaggctggacactgtgtctgacgcctgtaatctcagcactttgggaggccgaggtgggaggatcgcttgaacacaggagttccagaccagcctggggaacacagtgagaccccctctctactaaaatacaaaaagccaggcgcggtggcacatgtctgtggcccaggtactccgggggctgaggcgggaggaatctgagccctggaggctgaggcttcagagagccatgatcttgcccctgggtgacagagtgagaccctgccttgaaagaaagaacgaactcagatttggatatctttagttttaggcacctgagagggattagcatgtagaggctttctggatggtaatataacctctcattatccttgatggcctctgggtcactgatctgaccattgggatgtatcccactatccagggagggtctgtagtaagtattgcaccccaccatcttccttacatctttacacttttcattcacaatatccccttccttgtgaatttctaccggggagcaatgtattcttgacattttccaggccttgatgtcagctttatgctcagcagcagaggtatttcagtgtcaagaaacatcggagttccagtctaaattcatcactaactgtgactgcgggcaagtcgctttacctctcttaatcttagcctcagcctctgaaaaatgaggataataattctggtgattttacagagctgatgtgaagattaatgcgcgttaacggtttaatagagagcccggcacggtgtaagtggtcaataaatacgagctattattatgagcaacgctgtgtcctcagagcctccccaccaggacgtcagggagcggtgcagcaggagcggcgcagagtgcctcccgggaatccttccccgcgcggccgcggcgccgcacagccgccgccattcgggctccagccccgtccgcgcgtctcccggcgtgggtgcgggaccagggcgctgcggggcgcgcagggtgagtctgtggaatagtagtggaggacggcgccgcgctaggcgggggtcccagggagtcggctgcaggggtgtctgctgggagggctggaccgcggggctcaccgaggtccgagggccgcccgcagggtgaggcccccaagaagctgcggcaagtgccgcgcccgccgagctcgctcccgcgcccgccccaagatggcgcccctccccctccccttgcgcgcgcctccgccgctcggggcgcggccccgcggcccgcgcgctcctgggcgggggatgttgtgatggagaagccgcggcggagcccgaaccccgcagcctgagccacctccgtcatctgggcccggggcctcaccgcgcaggtaggaggtgtccctgccccggcccagccccggtggctgcgtcccgatcaccagcggccggcggaccctgtagcccctaccctgcggcagcccgggtcccccggccggccccatcccccatccccgggtcgcccttccaccgcgcgcccgcagaccgtcctctcatacccaccatcgcagggtccactcgggccctcacaccgtcccttccgctgccctttacctcctgcccctcggggtgactaggggcgggtatggaggacgcgaagcgaggggcagtgggtgttgggggaggggaggcccaggtccgggaaggggacgtggggtggggtgggctggcaggccgcgccgattccagcaggggtcccaggccctggatctgtcaagccgcattctgttgccctcagcgaccgaggggtgtgccctggggcggctgtgtccccagctcagccaggaggcctagcactgccaagaacactgattagaagcagttttcccactgccaattcctaacctgttttgtatcggcctgtgtatctcttgcattctgagcccctctagctatagtcccagctctctccgcccttcagagtcaacgcttgctgtcttcatttccttacttcccattcattcttaaaagcactccactctgtgtccctgacacccactgaaactgtctaggccaaggtcaccggagacctccttgtggagaactccagtggacactgttatctcctttacctttgagtagtattcggtggggtatgtcaactcactctccttgaagcattttcctgctttctgccctacagcattgtctgctcttctcaatctcatttgcttcctctcctcctctctttagatgctggtgaggctcttggctctgtcccgagctgtcttctctcagtatctgttctttctccccag

SEQ ID NO: 1631 - DNA, 6000 bp, Homo sapiens
ggagattgagaccatcctggctaacacggtgaaaccctgtctctactaaaaatacaaaaaattagccagggatggtggcgggcccctgtagtcccagctactcgggaggctgaggcaggagaatggcgtgaacctgggaggcggagcttgcagtgagctgagctcgtgccactgcactccagcctgggcgacagagcgagactccgtctcaaaacaaaaacaaaaacaaaaacactgaacaattagagaagaattgagtttgacggtactgtactctcagggtatgctgatgaacatgcggtgaaatggtcaaataatcacatccatcagaggttattaaggcacgtgatgaagtagagaaatctaatttatagctgggaagtcaaacaggagcaatctaggagctaccacgttctagcctgagatttgtattcctgaggccaataggcagctggtaacagagctgggttgaaataaattgagacttgctgtgagaacaagcataaggagaaaggtaaagataacaaggaaggtgaagaaagttgaactctttaagcgtattatttgtcttttaagtgaaaaactgacatttgactaatgtgtcttttttttaaagttagaaatctatcagagtagggtccttagagaaactgattatttctccagaataaagagcatattaatagaaaagattcagctttcgctaacggctgactagtcttaacgaaacattcctaaaggctttgcatcactgagaaaagttagttcctagttctgaaggatttcattcaaagtgcaaggctcatgttaataggaatatgcatgcatattcatgtgctatatgtattaaaaatacttgagaaggtgatttagaaatctcagttttaaatcttcatgggaagaatcttgcttgttttgttgccaaggaaggtgaatgggttgaaaatagttttaaagccctttacgtgcgaagtcatgaatctaaagaggataaacaggttaggtttgttatcccagaagctagaggcaagatttttactcagttctttcaacattaccacaagcatgtggattctgcaaaagttgcctagcaacattagttagaaacaacattgggtggagaaaggaactggaaatttgaattagatacggcctggggcaggcgggtgtaacccatctctccagtacagtgtgtgctttactcagaggagcgtgaaattttaaaaatcagaacagtcacttaaaatttcagttaggatgttgctacagttaaaccataatattgtgccatgttctcagcttgaagaggcagggcctgggtttctcacttttgttttgttttgttattttggcacttttgttttaaagatcactggattttcattaaattattctagaaacatttattaagcactttctcaggggccaaggcacagtgctggttgctggagctctgaagacaaacacagtttggaccctgccctgggcagtgtgaaaaccagacaagtaaacaaagtaagagtgttacatagtccgtgctgggtgcggtggaaagtctggagtagggaatggagagtcaggaaaggcttcacagaggaaatggctctagcactgagtcttggtttcaacttaaaaaaaaaattccttcagccaggtgcagtggctcacacctgtaatcccaaccctgtgagaggctgaggtaggcagatcacttgagctcaggagttcaagaccagcctgggcaacatggtgagacccggtctctacaaaaaatacaaaaattcaccaggtgtagtggcacttgcctgtagtcctggctactcaagaggctgaggtgggagaattgcttgagcccagaaggggaggttgcagtgagccgtgaacgcaccactgcactccagcctgggcaatagagcaaacccttgtctcaaggaaaaaaaaaaaaaaaattatttcccccaatcattctacacatttattgtgaacttacctcttcgattctgtgtgaggacttcaaagtcctgggtctgtggaccaagaactcttcccttcccatccacaacccaagcccttctgcctgccttagcctacttcaaagacctcccatttagggacgcagacaggtggcaaagtaggagttgacaaaacaaaacaaaacattgttaagagtgtttaccttcaggaaggggaactgggctgggatttgaagggataggtgggagaattttgtaccatttaagtttttgttactggagtggggaaaaaccatggggaaaaataggaagtgtgatggctgctacctctacaatcttgcattaaatagagtactagagtggtgatctctgttcaatttttttttttttttcctgagatagttctcggtctgctgcctaggctggagtgcagtggcacaatcacagctcactgcagccttcatctctcaggctcaagggatcctcccacttcagcctcctgagtagctgggaccacaggcatgtgacaccatgcccagctaatttttaaatttttagtagaggtgaggtctcactatgttgtccaggctggtcttgaactcctggcctcaagtgatcctcctgtcttgacctcccaaagtgttgggattgcaggtgtgaacaactaccacacccgattcaaaatcttaaataggcaaacttatctgcaaatgtgccaatttaggaagcgaataaaccaacaattatttaaataagggctcttttatcactcacaagggagtgaacgcctaatccacgttagaatactgcaataaacaagggtcccctaccctcggggaccttatttttctagaaggagatagtaataaactaacaacgtactttgagatagaaataagcctgctaaggaaataaagccaggtgttgtgaaagagcaaagagtgagggaggggacgtgagaacagagatacggaattcttacataggaggagtttaggagcatcagtctagttgtggagaggcaactaaagggctttaaagtcccatttacttagaaagcacactattttcacatgcagtttatgttacagatcgataaaagtagggttctctatttttatttatgcttcataataaattgagaaaatgtcaattatatcaaataattatatttgtcatcaggagtggcaggagggggcccacagcctgggcaatatggtggctcatgcctgtaattccagcactttgggagacggagacgggcagattgcttgagcccaggagttctagaccagcctgggcaacatggtgaaacagagtctctactaaaaatgcaaatattagctgggcgtggtagcacacatcattagtcccagctatttgggagggtgaggtgggaggatctcttgagcctggggagatcgaggctacagagccgtgattgcaccactgtactccactttgagacagggtggacagagtgagaccctgtctcgaaaaataaaaatttaaaaaaaaggagtggcaggaggggaagtgttggagcaagggttctgaaaatcactccttggctttggccactgtggatcattgactaactctccttatacaagtctagaattcttgtcctccaagagcttaaaattaagtttgcatgaccatataaaaaacacatttatacaccagttagcaaatgttaggagaaaagacagctgttgatccttcactgtgtcttcagttgtgtgatctcaggaaattcccgatttgatgtgttaagtactaccgtgtgtttcaagaaaaattcagcttgagtttatttagcctttgaaaagcattagaacaacatatatgacaaagtgttaatatgcataaagtgctaacaataagaaaaataggcaatagagataaatgtaaattatcattaaacccatgacaactgttcaacaatatgaatcaaaacaacaaaaccacatcaacgaacatccactgatgtcctgaattcacagagtgtgctctaatccactgctagtgagaatgtattgtgtttctggagggggagtttgccagtttatatcctttgactgaggaattctaactccagggaggtatccaaaagagtattttaaaaaggccaggcgcggtggctcacgcctgtaatcctagcactttgggaggccgaggcgggcagatcacctgaggtcaggagtttgagaccagcctgccaacatggtgaaactccgtattttgcattttgtaaaaatacaaaaattggccaggcctggtatgtgcttgtaataccagctacccgggagacaggagaatcgctggaacccgagaacccgggaggtgggggctgcagtgagccgagatcgcgccactgcactccagcctggggcgacagagcgagactccgtgtcgaaaaaaaccaaaccaaacaaaaaacatggagaaggaagcatatacaccacggggttgtttacaacagaaaactggaagaggccgggagcggtggttcacgtctgtaattccagcactttgagaggccgaggcgggcggatcacttgagatcaggagttggagaccagcctggccaacattgggaagttcgtctctactaaaaatacaaaaattagccaggtgtggtggcagccgcctgtaatcccagctactcgggtggctgaggcatgagaatcgcttgaactctaaaggcggaggttgcaggttgtagtgagccgagatcgtgccactgcactccagcctgggtgacagagcaagaccccgtctcagaaaaaaaaaaaaaaataaataaacaaagaaagaaaaaagaaaactggaagaaacgtgtaagtgcattaagggacagattaaatcagtttaacgaagcactagggaaattttttaaaattgcgtttgagtttgccgcgagccgggccaatcggttttgccaacgcatgcccacgtgctggcgaacaaatgtaaacacggagatcgtgtgccgggcacttggtttcgtggtgggcaactgtgctgctgtttcttttggccgcggacaaggtcggcagaggtggacccctgcttgggagagctcttctcgctgtgctgacacccgcccctaacagtcacccaccccggggaaataatggggctcggaggcctcctcccagccagtgtccagcctaagcacatcggctcccgcagttcagaaaggtcccgaggcccgagtcaccatttccggctcagacctcgaccctgaacgtggctgcccactgccacgcccactacgccccagtggctcgccccaggggacgaggggcaagaagcggcctccgagggcagcggccgaaggccattcggtccctggctcttcccagctcgcagagacccggaggcgctgcccggccgcctgcccctcttcagatcccccagcaccggaggagcagcgaggggggtgcgtccaggccggctttcgggtcggcttaggcgaatccagctctcttttgcccctcccagaaggcccagccccgtccgggcggtgttcgggcggcgccgggccgggccccccgccgccccaggctcgctcataggcccggaacaccacagcccgcccagacttggctggcgccgagccgggggtggagccagcgggttcccgccaaaatcgcgtagctggtccttcccccgcgggctacgtcgcgccctcctttttttttcaaacccggagctgcactgggattggtggactgggcactcacgtggttaacggtcgcgggaagccgcggagcccgaacctgagactggacctgaggagacctcagcctcggtgctcgggccgccccgcctctgccggaaagtccgcgccgccgctgccgccaccgtccgcagcccgagcgccccggagccgcaggccgccgccgcgcagagacgccgcggctgcgactaggcgcgcccagccgcacgtggcggacccgcccccaggcccgcagtgtcctggaccccgcaggcctccgctctcctgtcctcggccccg

SEQ ID NO: 1632 - DNA, 6000 bp, Homo sapiens
gaatgggttgaaaatagttttaaagccctttacgtgcgaagtcatgaatctaaagaggataaacaggttaggtttgttatcccagaagctagaggcaagatttttactcagttctttcaacattaccacaagcatgtggattctgcaaaagttgcctagcaacattagttagaaacaacattgggtggagaaaggaactggaaatttgaattagatacggcctggggcaggcgggtgtaacccatctctccagtacagtgtgtgctttactcagaggagcgtgaaattttaaaaatcagaacagtcacttaaaatttcagttaggatgttgctacagttaaaccataatattgtgccatgttctcagcttgaagaggcagggcctgggtttctcacttttgttttgttttgttattttggcacttttgttttaaagatcactggattttcattaaattattctagaaacatttattaagcactttctcaggggccaaggcacagtgctggttgctggagctctgaagacaaacacagtttggaccctgccctgggcagtgtgaaaaccagacaagtaaacaaagtaagagtgttacatagtccgtgctgggtgcggtggaaagtctggagtagggaatggagagtcaggaaaggcttcacagaggaaatggctctagcactgagtcttggtttcaacttaaaaaaaaaattccttcagccaggtgcagtggctcacacctgtaatcccaaccctgtgagaggctgaggtaggcagatcacttgagctcaggagttcaagaccagcctgggcaacatggtgagacccggtctctacaaaaaatacaaaaattcaccaggtgtagtggcacttgcctgtagtcctggctactcaagaggctgaggtgggagaattgcttgagcccagaaggggaggttgcagtgagccgtgaacgcaccactgcactccagcctgggcaatagagcaaacccttgtctcaaggaaaaaaaaaaaaaaaattatttcccccaatcattctacacatttattgtgaacttacctcttcgattctgtgtgaggacttcaaagtcctgggtctgtggaccaagaactcttcccttcccatccacaacccaagcccttctgcctgccttagcctacttcaaagacctcccatttagggacgcagacaggtggcaaagtaggagttgacaaaacaaaacaaaacattgttaagagtgtttaccttcaggaaggggaactgggctgggatttgaagggataggtgggagaattttgtaccatttaagtttttgttactggagtggggaaaaaccatggggaaaaataggaagtgtgatggctgctacctctacaatcttgcattaaatagagtactagagtggtgatctctgttcaatttttttttttttttcctgagatagttctcggtctgctgcctaggctggagtgcagtggcacaatcacagctcactgcagccttcatctctcaggctcaagggatcctcccacttcagcctcctgagtagctgggaccacaggcatgtgacaccatgcccagctaatttttaaatttttagtagaggtgaggtctcactatgttgtccaggctggtcttgaactcctggcctcaagtgatcctcctgtcttgacctcccaaagtgttgggattgcaggtgtgaacaactaccacacccgattcaaaatcttaaataggcaaacttatctgcaaatgtgccaatttaggaagcgaataaaccaacaattatttaaataagggctcttttatcactcacaagggagtgaacgcctaatccacgttagaatactgcaataaacaagggtcccctaccctcggggaccttatttttctagaaggagatagtaataaactaacaacgtactttgagatagaaataagcctgctaaggaaataaagccaggtgttgtgaaagagcaaagagtgagggaggggacgtgagaacagagatacggaattcttacataggaggagtttaggagcatcagtctagttgtggagaggcaactaaagggctttaaagtcccatttacttagaaagcacactattttcacatgcagtttatgttacagatcgataaaagtagggttctctatttttatttatgcttcataataaattgagaaaatgtcaattatatcaaataattatatttgtcatcaggagtggcaggagggggcccacagcctgggcaatatggtggctcatgcctgtaattccagcactttgggagacggagacgggcagattgcttgagcccaggagttctagaccagcctgggcaacatggtgaaacagagtctctactaaaaatgcaaatattagctgggcgtggtagcacacatcattagtcccagctatttgggagggtgaggtgggaggatctcttgagcctggggagatcgaggctacagagccgtgattgcaccactgtactccactttgagacagggtggacagagtgagaccctgtctcgaaaaataaaaatttaaaaaaaaggagtggcaggaggggaagtgttggagcaagggttctgaaaatcactccttggctttggccactgtggatcattgactaactctccttatacaagtctagaattcttgtcctccaagagcttaaaattaagtttgcatgaccatataaaaaacacatttatacaccagttagcaaatgttaggagaaaagacagctgttgatccttcactgtgtcttcagttgtgtgatctcaggaaattcccgatttgatgtgttaagtactaccgtgtgtttcaagaaaaattcagcttgagtttatttagcctttgaaaagcattagaacaacatatatgacaaagtgttaatatgcataaagtgctaacaataagaaaaataggcaatagagataaatgtaaattatcattaaacccatgacaactgttcaacaatatgaatcaaaacaacaaaaccacatcaacgaacatccactgatgtcctgaattcacagagtgtgctctaatccactgctagtgagaatgtattgtgtttctggagggggagtttgccagtttatatcctttgactgaggaattctaactccagggaggtatccaaaagagtattttaaaaaggccaggcgcggtggctcacgcctgtaatcctagcactttgggaggccgaggcgggcagatcacctgaggtcaggagtttgagaccagcctgccaacatggtgaaactccgtattttgcattttgtaaaaatacaaaaattggccaggcctggtatgtgcttgtaataccagctacccgggagacaggagaatcgctggaacccgagaacccgggaggtgggggctgcagtgagccgagatcgcgccactgcactccagcctggggcgacagagcgagactccgtgtcgaaaaaaaccaaaccaaacaaaaaacatggagaaggaagcatatacaccacggggttgtttacaacagaaaactggaagaggccgggagcggtggttcacgtctgtaattccagcactttgagaggccgaggcgggcggatcacttgagatcaggagttggagaccagcctggccaacattgggaagttcgtctctactaaaaatacaaaaattagccaggtgtggtggcagccgcctgtaatcccagctactcgggtggctgaggcatgagaatcgcttgaactctaaaggcggaggttgcaggttgtagtgagccgagatcgtgccactgcactccagcctgggtgacagagcaagaccccgtctcagaaaaaaaaaaaaaaataaataaacaaagaaagaaaaaagaaaactggaagaaacgtgtaagtgcattaagggacagattaaatcagtttaacgaagcactagggaaattttttaaaattgcgtttgagtttgccgcgagccgggccaatcggttttgccaacgcatgcccacgtgctggcgaacaaatgtaaacacggagatcgtgtgccgggcacttggtttcgtggtgggcaactgtgctgctgtttcttttggccgcggacaaggtcggcagaggtggacccctgcttgggagagctcttctcgctgtgctgacacccgcccctaacagtcacccaccccggggaaataatggggctcggaggcctcctcccagccagtgtccagcctaagcacatcggctcccgcagttcagaaaggtcccgaggcccgagtcaccatttccggctcagacctcgaccctgaacgtggctgcccactgccacgcccactacgccccagtggctcgccccaggggacgaggggcaagaagcggcctccgagggcagcggccgaaggccattcggtccctggctcttcccagctcgcagagacccggaggcgctgcccggccgcctgcccctcttcagatcccccagcaccggaggagcagcgaggggggtgcgtccaggccggctttcgggtcggcttaggcgaatccagctctcttttgcccctcccagaaggcccagccccgtccgggcggtgttcgggcggcgccgggccgggccccccgccgccccaggctcgctcataggcccggaacaccacagcccgcccagacttggctggcgccgagccgggggtggagccagcgggttcccgccaaaatcgcgtagctggtccttcccccgcgggctacgtcgcgccctcctttttttttcaaacccggagctgcactgggattggtggactgggcactcacgtggttaacggtcgcgggaagccgcggagcccgaacctgagactggacctgaggagacctcagcctcggtgctcgggccgccccgcctctgccggaaagtccgcgccgccgctgccgccaccgtccgcagcccgagcgccccggagccgcaggccgccgccgcgcagagacgccgcggctgcgactaggcgcgcccagccgcacgtggcggacccgcccccaggcccgcagtgtcctggaccccgcaggcctccgctctcctgtcctcggccccgtccccagggccgcgatgagcttcctgagccgacagcagccgccgccaccccgccgcgccggggcggcctgcaccttgcggcagaagctgatcttctcgccctgcagcgactgtgaggaggaggaagaagaggaggaggaggagggcagcggccacagcaccggggaggactcggcctttcaagagcccgactcgccgctgccgcccgcgcggagccccacggagcccgggcccgagcgccgccgctcgcccgggccggcccccggcagccccggcgagctggaggaggacctgttgctgcccggcgcctgcccgggcgcggacgaggcgggcggtggggcggagggcgactcgtgggaggaggagggcttcggctcctcgtcgccggtcaagtcgccggcggccccctacttcctgggtagctctttctcgccggtgcgctgcggcggcccaggagatgcgtcgccgcggggttgcggggcgcgccgggcgggcgaaggccgccgctcgccgcggccggaccacccgggcaccccgccacacaagaccttccgcaagctgcgactcttcgacaccccgcacacgcccaaggtgagagcggcgggcgcgggcacccggcggccggggccgcggcgccggaggggccagcgccgctgcctgggttcggttacagaagcggccggccgctcccccctcgctttcctgcgccgccccccaaagttggcagcccttgtgtttggccctgccccgaggttgtccgttgagattatgtaactgaacaatgggcctcgtctggaacttcatcttacaaaggggccgatcggcccgtccgggtggccaaggatttgccgcccgttgagtccgggccgccccgagcgtgtcagccccgagtgcggcaccgataacgcggttcgcgaggatgctggagggtgc

SEQ ID NO: 1633 - DNA, 6000 bp, Homo sapiens
aaaaaatacaaaaattcaccaggtgtagtggcacttgcctgtagtcctggctactcaagaggctgaggtgggagaattgcttgagcccagaaggggaggttgcagtgagccgtgaacgcaccactgcactccagcctgggcaatagagcaaacccttgtctcaaggaaaaaaaaaaaaaaaattatttcccccaatcattctacacatttattgtgaacttacctcttcgattctgtgtgaggacttcaaagtcctgggtctgtggaccaagaactcttcccttcccatccacaacccaagcccttctgcctgccttagcctacttcaaagacctcccatttagggacgcagacaggtggcaaagtaggagttgacaaaacaaaacaaaacattgttaagagtgtttaccttcaggaaggggaactgggctgggatttgaagggataggtgggagaattttgtaccatttaagtttttgttactggagtggggaaaaaccatggggaaaaataggaagtgtgatggctgctacctctacaatcttgcattaaatagagtactagagtggtgatctctgttcaatttttttttttttttcctgagatagttctcggtctgctgcctaggctggagtgcagtggcacaatcacagctcactgcagccttcatctctcaggctcaagggatcctcccacttcagcctcctgagtagctgggaccacaggcatgtgacaccatgcccagctaatttttaaatttttagtagaggtgaggtctcactatgttgtccaggctggtcttgaactcctggcctcaagtgatcctcctgtcttgacctcccaaagtgttgggattgcaggtgtgaacaactaccacacccgattcaaaatcttaaataggcaaacttatctgcaaatgtgccaatttaggaagcgaataaaccaacaattatttaaataagggctcttttatcactcacaagggagtgaacgcctaatccacgttagaatactgcaataaacaagggtcccctaccctcggggaccttatttttctagaaggagatagtaataaactaacaacgtactttgagatagaaataagcctgctaaggaaataaagccaggtgttgtgaaagagcaaagagtgagggaggggacgtgagaacagagatacggaattcttacataggaggagtttaggagcatcagtctagttgtggagaggcaactaaagggctttaaagtcccatttacttagaaagcacactattttcacatgcagtttatgttacagatcgataaaagtagggttctctatttttatttatgcttcataataaattgagaaaatgtcaattatatcaaataattatatttgtcatcaggagtggcaggagggggcccacagcctgggcaatatggtggctcatgcctgtaattccagcactttgggagacggagacgggcagattgcttgagcccaggagttctagaccagcctgggcaacatggtgaaacagagtctctactaaaaatgcaaatattagctgggcgtggtagcacacatcattagtcccagctatttgggagggtgaggtgggaggatctcttgagcctggggagatcgaggctacagagccgtgattgcaccactgtactccactttgagacagggtggacagagtgagaccctgtctcgaaaaataaaaatttaaaaaaaaggagtggcaggaggggaagtgttggagcaagggttctgaaaatcactccttggctttggccactgtggatcattgactaactctccttatacaagtctagaattcttgtcctccaagagcttaaaattaagtttgcatgaccatataaaaaacacatttatacaccagttagcaaatgttaggagaaaagacagctgttgatccttcactgtgtcttcagttgtgtgatctcaggaaattcccgatttgatgtgttaagtactaccgtgtgtttcaagaaaaattcagcttgagtttatttagcctttgaaaagcattagaacaacatatatgacaaagtgttaatatgcataaagtgctaacaataagaaaaataggcaatagagataaatgtaaattatcattaaacccatgacaactgttcaacaatatgaatcaaaacaacaaaaccacatcaacgaacatccactgatgtcctgaattcacagagtgtgctctaatccactgctagtgagaatgtattgtgtttctggagggggagtttgccagtttatatcctttgactgaggaattctaactccagggaggtatccaaaagagtattttaaaaaggccaggcgcggtggctcacgcctgtaatcctagcactttgggaggccgaggcgggcagatcacctgaggtcaggagtttgagaccagcctgccaacatggtgaaactccgtattttgcattttgtaaaaatacaaaaattggccaggcctggtatgtgcttgtaataccagctacccgggagacaggagaatcgctggaacccgagaacccgggaggtgggggctgcagtgagccgagatcgcgccactgcactccagcctggggcgacagagcgagactccgtgtcgaaaaaaaccaaaccaaacaaaaaacatggagaaggaagcatatacaccacggggttgtttacaacagaaaactggaagaggccgggagcggtggttcacgtctgtaattccagcactttgagaggccgaggcgggcggatcacttgagatcaggagttggagaccagcctggccaacattgggaagttcgtctctactaaaaatacaaaaattagccaggtgtggtggcagccgcctgtaatcccagctactcgggtggctgaggcatgagaatcgcttgaactctaaaggcggaggttgcaggttgtagtgagccgagatcgtgccactgcactccagcctgggtgacagagcaagaccccgtctcagaaaaaaaaaaaaaaataaataaacaaagaaagaaaaaagaaaactggaagaaacgtgtaagtgcattaagggacagattaaatcagtttaacgaagcactagggaaattttttaaaattgcgtttgagtttgccgcgagccgggccaatcggttttgccaacgcatgcccacgtgctggcgaacaaatgtaaacacggagatcgtgtgccgggcacttggtttcgtggtgggcaactgtgctgctgtttcttttggccgcggacaaggtcggcagaggtggacccctgcttgggagagctcttctcgctgtgctgacacccgcccctaacagtcacccaccccggggaaataatggggctcggaggcctcctcccagccagtgtccagcctaagcacatcggctcccgcagttcagaaaggtcccgaggcccgagtcaccatttccggctcagacctcgaccctgaacgtggctgcccactgccacgcccactacgccccagtggctcgccccaggggacgaggggcaagaagcggcctccgagggcagcggccgaaggccattcggtccctggctcttcccagctcgcagagacccggaggcgctgcccggccgcctgcccctcttcagatcccccagcaccggaggagcagcgaggggggtgcgtccaggccggctttcgggtcggcttaggcgaatccagctctcttttgcccctcccagaaggcccagccccgtccgggcggtgttcgggcggcgccgggccgggccccccgccgccccaggctcgctcataggcccggaacaccacagcccgcccagacttggctggcgccgagccgggggtggagccagcgggttcccgccaaaatcgcgtagctggtccttcccccgcgggctacgtcgcgccctcctttttttttcaaacccggagctgcactgggattggtggactgggcactcacgtggttaacggtcgcgggaagccgcggagcccgaacctgagactggacctgaggagacctcagcctcggtgctcgggccgccccgcctctgccggaaagtccgcgccgccgctgccgccaccgtccgcagcccgagcgccccggagccgcaggccgccgccgcgcagagacgccgcggctgcgactaggcgcgcccagccgcacgtggcggacccgcccccaggcccgcagtgtcctggaccccgcaggcctccgctctcctgtcctcggccccgtccccagggccgcgatgagcttcctgagccgacagcagccgccgccaccccgccgcgccggggcggcctgcaccttgcggcagaagctgatcttctcgccctgcagcgactgtgaggaggaggaagaagaggaggaggaggagggcagcggccacagcaccggggaggactcggcctttcaagagcccgactcgccgctgccgcccgcgcggagccccacggagcccgggcccgagcgccgccgctcgcccgggccggcccccggcagccccggcgagctggaggaggacctgttgctgcccggcgcctgcccgggcgcggacgaggcgggcggtggggcggagggcgactcgtgggaggaggagggcttcggctcctcgtcgccggtcaagtcgccggcggccccctacttcctgggtagctctttctcgccggtgcgctgcggcggcccaggagatgcgtcgccgcggggttgcggggcgcgccgggcgggcgaaggccgccgctcgccgcggccggaccacccgggcaccccgccacacaagaccttccgcaagctgcgactcttcgacaccccgcacacgcccaaggtgagagcggcgggcgcgggcacccggcggccggggccgcggcgccggaggggccagcgccgctgcctgggttcggttacagaagcggccggccgctcccccctcgctttcctgcgccgccccccaaagttggcagcccttgtgtttggccctgccccgaggttgtccgttgagattatgtaactgaacaatgggcctcgtctggaacttcatcttacaaaggggccgatcggcccgtccgggtggccaaggatttgccgcccgttgagtccgggccgccccgagcgtgtcagccccgagtgcggcaccgataacgcggttcgcgaggatgctggagggtgccggcccggccacctgacactcccgagccataggatgccttttaaacgcggcgatcgggcctgtaatttgggcggcgcgggcagaaggagtttaaagaaaaataattgtcccgccctgatcgtgtcgtgtcgtgtggcgtggatgggggaaaggtctggggcatgcagggagactacgcttggacttgggagtaaaggctggccttccaagcatttacagtcctacagactcatcctaagtccaggcagtactgaggcctgtttctggacaaggtcttggcccagcatttgtttttatcgtgggtttgcggtgcccagagtttggccggcctccgtgtgattaggaacatcctaccgtagataaggtatcttaaagaaggaggtgttcagcacctgtgttttgaaaggccttcgagtactgcgcagatgaccacttttaaaactgcagattttaaagctgatacttccagagattaagacaagcctcgcatttgtaaggttaacagggaagatgcaccttttaaagtgagtttgttttgttttcaatgtactgtttgtcatcagcctaggcaatctgtgtgctttcgagctgtactgtttattggccgacttgctcaaggcaaaatccctctggaagtgaggggaggagtccagcggaggtggctatggaagccctatctagatgggggaggggagattttatggggctctcggactgctttctatttttggatgggttgaaagaatttgttaacttttagccactagaatgaacttagttttaggcagcatttatattctttttagggttagaggcagattttacttggctattt

SEQ ID NO: 1634 - DNA, 6000 bp, Homo sapiens
gcctgctaaggaaataaagccaggtgttgtgaaagagcaaagagtgagggaggggacgtgagaacagagatacggaattcttacataggaggagtttaggagcatcagtctagttgtggagaggcaactaaagggctttaaagtcccatttacttagaaagcacactattttcacatgcagtttatgttacagatcgataaaagtagggttctctatttttatttatgcttcataataaattgagaaaatgtcaattatatcaaataattatatttgtcatcaggagtggcaggagggggcccacagcctgggcaatatggtggctcatgcctgtaattccagcactttgggagacggagacgggcagattgcttgagcccaggagttctagaccagcctgggcaacatggtgaaacagagtctctactaaaaatgcaaatattagctgggcgtggtagcacacatcattagtcccagctatttgggagggtgaggtgggaggatctcttgagcctggggagatcgaggctacagagccgtgattgcaccactgtactccactttgagacagggtggacagagtgagaccctgtctcgaaaaataaaaatttaaaaaaaaggagtggcaggaggggaagtgttggagcaagggttctgaaaatcactccttggctttggccactgtggatcattgactaactctccttatacaagtctagaattcttgtcctccaagagcttaaaattaagtttgcatgaccatataaaaaacacatttatacaccagttagcaaatgttaggagaaaagacagctgttgatccttcactgtgtcttcagttgtgtgatctcaggaaattcccgatttgatgtgttaagtactaccgtgtgtttcaagaaaaattcagcttgagtttatttagcctttgaaaagcattagaacaacatatatgacaaagtgttaatatgcataaagtgctaacaataagaaaaataggcaatagagataaatgtaaattatcattaaacccatgacaactgttcaacaatatgaatcaaaacaacaaaaccacatcaacgaacatccactgatgtcctgaattcacagagtgtgctctaatccactgctagtgagaatgtattgtgtttctggagggggagtttgccagtttatatcctttgactgaggaattctaactccagggaggtatccaaaagagtattttaaaaaggccaggcgcggtggctcacgcctgtaatcctagcactttgggaggccgaggcgggcagatcacctgaggtcaggagtttgagaccagcctgccaacatggtgaaactccgtattttgcattttgtaaaaatacaaaaattggccaggcctggtatgtgcttgtaataccagctacccgggagacaggagaatcgctggaacccgagaacccgggaggtgggggctgcagtgagccgagatcgcgccactgcactccagcctggggcgacagagcgagactccgtgtcgaaaaaaaccaaaccaaacaaaaaacatggagaaggaagcatatacaccacggggttgtttacaacagaaaactggaagaggccgggagcggtggttcacgtctgtaattccagcactttgagaggccgaggcgggcggatcacttgagatcaggagttggagaccagcctggccaacattgggaagttcgtctctactaaaaatacaaaaattagccaggtgtggtggcagccgcctgtaatcccagctactcgggtggctgaggcatgagaatcgcttgaactctaaaggcggaggttgcaggttgtagtgagccgagatcgtgccactgcactccagcctgggtgacagagcaagaccccgtctcagaaaaaaaaaaaaaaataaataaacaaagaaagaaaaaagaaaactggaagaaacgtgtaagtgcattaagggacagattaaatcagtttaacgaagcactagggaaattttttaaaattgcgtttgagtttgccgcgagccgggccaatcggttttgccaacgcatgcccacgtgctggcgaacaaatgtaaacacggagatcgtgtgccgggcacttggtttcgtggtgggcaactgtgctgctgtttcttttggccgcggacaaggtcggcagaggtggacccctgcttgggagagctcttctcgctgtgctgacacccgcccctaacagtcacccaccccggggaaataatggggctcggaggcctcctcccagccagtgtccagcctaagcacatcggctcccgcagttcagaaaggtcccgaggcccgagtcaccatttccggctcagacctcgaccctgaacgtggctgcccactgccacgcccactacgccccagtggctcgccccaggggacgaggggcaagaagcggcctccgagggcagcggccgaaggccattcggtccctggctcttcccagctcgcagagacccggaggcgctgcccggccgcctgcccctcttcagatcccccagcaccggaggagcagcgaggggggtgcgtccaggccggctttcgggtcggcttaggcgaatccagctctcttttgcccctcccagaaggcccagccccgtccgggcggtgttcgggcggcgccgggccgggccccccgccgccccaggctcgctcataggcccggaacaccacagcccgcccagacttggctggcgccgagccgggggtggagccagcgggttcccgccaaaatcgcgtagctggtccttcccccgcgggctacgtcgcgccctcctttttttttcaaacccggagctgcactgggattggtggactgggcactcacgtggttaacggtcgcgggaagccgcggagcccgaacctgagactggacctgaggagacctcagcctcggtgctcgggccgccccgcctctgccggaaagtccgcgccgccgctgccgccaccgtccgcagcccgagcgccccggagccgcaggccgccgccgcgcagagacgccgcggctgcgactaggcgcgcccagccgcacgtggcggacccgcccccaggcccgcagtgtcctggaccccgcaggcctccgctctcctgtcctcggccccgtccccagggccgcgatgagcttcctgagccgacagcagccgccgccaccccgccgcgccggggcggcctgcaccttgcggcagaagctgatcttctcgccctgcagcgactgtgaggaggaggaagaagaggaggaggaggagggcagcggccacagcaccggggaggactcggcctttcaagagcccgactcgccgctgccgcccgcgcggagccccacggagcccgggcccgagcgccgccgctcgcccgggccggcccccggcagccccggcgagctggaggaggacctgttgctgcccggcgcctgcccgggcgcggacgaggcgggcggtggggcggagggcgactcgtgggaggaggagggcttcggctcctcgtcgccggtcaagtcgccggcggccccctacttcctgggtagctctttctcgccggtgcgctgcggcggcccaggagatgcgtcgccgcggggttgcggggcgcgccgggcgggcgaaggccgccgctcgccgcggccggaccacccgggcaccccgccacacaagaccttccgcaagctgcgactcttcgacaccccgcacacgcccaaggtgagagcggcgggcgcgggcacccggcggccggggccgcggcgccggaggggccagcgccgctgcctgggttcggttacagaagcggccggccgctcccccctcgctttcctgcgccgccccccaaagttggcagcccttgtgtttggccctgccccgaggttgtccgttgagattatgtaactgaacaatgggcctcgtctggaacttcatcttacaaaggggccgatcggcccgtccgggtggccaaggatttgccgcccgttgagtccgggccgccccgagcgtgtcagccccgagtgcggcaccgataacgcggttcgcgaggatgctggagggtgccggcccggccacctgacactcccgagccataggatgccttttaaacgcggcgatcgggcctgtaatttgggcggcgcgggcagaaggagtttaaagaaaaataattgtcccgccctgatcgtgtcgtgtcgtgtggcgtggatgggggaaaggtctggggcatgcagggagactacgcttggacttgggagtaaaggctggccttccaagcatttacagtcctacagactcatcctaagtccaggcagtactgaggcctgtttctggacaaggtcttggcccagcatttgtttttatcgtgggtttgcggtgcccagagtttggccggcctccgtgtgattaggaacatcctaccgtagataaggtatcttaaagaaggaggtgttcagcacctgtgttttgaaaggccttcgagtactgcgcagatgaccacttttaaaactgcagattttaaagctgatacttccagagattaagacaagcctcgcatttgtaaggttaacagggaagatgcaccttttaaagtgagtttgttttgttttcaatgtactgtttgtcatcagcctaggcaatctgtgtgctttcgagctgtactgtttattggccgacttgctcaaggcaaaatccctctggaagtgaggggaggagtccagcggaggtggctatggaagccctatctagatgggggaggggagattttatggggctctcggactgctttctatttttggatgggttgaaagaatttgttaacttttagccactagaatgaacttagttttaggcagcatttatattctttttagggttagaggcagattttacttggctatttttttcaagaaaagatagttaatatccagcttcagtcttcctaaattagccacaatttattttgcttgaactctaacaaaggcttgtgtgttgctttcacctacgcattcagccctatgaaaggctcgttgaaggttaggttgagaaggctgactataggacttggatcctaaaaattgtatttgtatttttctttccctagagtttgctctccaaagctcggggaattgattccagctctgttaaactccggggtagttctctcttcatggatacagaaaaatcaggaaaaagggaatttgatgtgcgacagactcctcaagtgaatattaatccttttactccggattctttgttgcttcattcctcaggacagtgtcgtcgtagaaagagaacgtattggaatgagtaagtcgtttatttaacagtttggttctccaaataacctaagattggtttggtatacttatcaaaatttagttcctatttaatggcatggatgtatctgtcagatatattgatagaaaaataacattttttttagttcctgtggtgaagacatggaagccagtgattatgagcttgaagatgaaacaagacctgctaaggtaaatagctttttatttttatttttttgaaatttacttttctgccacttaaagcatgctatgaatatgttaataagcattaacacataaggtagaatggtttttaaatttcacacatagccctatcaccatagcaagaaataactgttttcgtatatttgtattacatatatggaaacactttttattacagagaattacaattactgaaagcaatatgaagtcccggtatacaacagaatttcatgagctagagaaaatcggctctggagaatttggttctgtatttaagtgtgtgaagaggctggatggatgcatttatgccattaagcgatcaaaaaagccattggcgggctctgttgatgagtatgtattaaacattttgtcttttgctcttttgtcccctatggtgttactaacattaaggtttcagctggtcaaacactgaattccatctctaacttttgagaagctgtaatgatttaatcaggtccttt

SEQ ID NO: 1635 - DNA, 6000 bp, Homo sapiens
caatggccatgggggacacatcatgcctcccacacaatcgcagtttggagagatgggaggcaagtttatgaaaagccaggtaagtaatatttgagtgtgcatgttttctaaaccttatctgcaacatttatttcaaactgaaatgtttatccttaagattagtaaagtattagtaaaatcacatcactttatttgataggttagatttttattcttccctgtttcatcttttactttctctgggcaaattcagttaaactaactttatggcttggctcatccctttggtacttgattaccataatttgtggacccctttttatctagactttctttctccttttctgaaataggggctaagccagctctaccataaccagagtcagggactcttatcccagctgcaaggacagtcgaaggatatgccacctcggttttctaagaaaggacagcttaatgcagatgaggtacatttgcctatgttacttatataccatagtttgtccattcagaaatttattgcccgatgattataaaaagacgcgttattaagaggactttatgctggagttcttgacgtttttctctcttttctatacttctttttctttctttgaatgtccagcgtcctgtgagcgaagattatgagatatgagggcaagtctcctaaagtctgttagagcaagaaaactggttgtcaaaatattgtggtttctttctttgtaagggtgatttaactaaggataaaacagggcattttctaaactgtagttaaatttgcagttttttatttgaatattttagtcatgctaattctaagagaatgtaagatttataatagtatcttactactgtatgcatcagatctttaaattttttgccaaaaattaaacctgttaatgtggagtaccttctttagtttttcaaaaagcttaatgtttccctagattctgtcactgtataggattttagaatgttgtatttaatatgttcgccaactgcatgttgttaatttagatatattttgttttcaattccagattagcctgaggcctgctcagtcgttcctaatgaataaaaatcaagtgccaaagcttcagccccagataactatgattcctcctagtgcacaaccaccacgcactcaaacaccacctctgggacaggtacagaccatagtaggacagcattttctaaagatatctgaagacttttttctaaatttagtgtgttcttccccctaatttcatagtcctctttttaaaaaaagtctgtcattgcttgttttttagacacctcagcttggtctcaaaactaatccaccgcttatccaggaaaagcctgccaagaccagcaaaaagccaccaccgtcaaaggaagaactccttaaactaactgtaagtttcaaatatcccattttagtgtaattagcctgtatttgagatagagaatacattaaagatacttgtgttcttcacaggaaactgttgtgactgaatatctaaatagtggaaatgcaaatgaggctgtcaatggtgtaagagaaatgagggctcctaaacactttcttcctgagatgttaagcaaagtaatcatcctgtcactagatagaagcgatgaagataaagaaaaagcaagttctttgatcagtttactcaaacaggaagggatagccacaagtgacaacttcatgcaggtaggacactttactgattgtgtggtaagaactcttaccactcaaattcgaaaactgataaactgttgtatatttctttcaaggctttcctgaatgtattggaccagtgtcccaaactggaggttgacatccctttggtgaaatcctatttagcacagtttgcagctcgtgccatcatttcagagctggtgagcatttcagaactagctcaaccactagaaagtggcacccattttcctctcttcctactttgtcttcagcagttagctaaattacaagatcgagaatggttaacagaactttttcaacaaagcaaggtcaatatgcagaaaatgctcccaggtaagagaatgctgacttgtttgttttgtttttttaatattatatctagagatttcaggtaccttgagtggatttatgtaggtcagacagtctgattgtcctgctcagataatgataaacattaccacagatctcacctataaagagagatttataatttaactactttcatttgatccgtatgttgagtttttttcatttgctgggttggttctctattctgctacatggatcttacatacttggggacatcatttgtgaagctctgctctctggacaggacaacttggtaaaatgaactattagatgatgcaggtggctttgtctcttcagaaattgatcagaataaggaccgcatgttggagattttggaaggaaagggactgagtttcttattcccactcctcaaattggagaaggaactgttgaagcaaataaagttggatccatcccctcaaaccatatataaatggattaaagataacatctctcccaaacttcatgtagataaaggatttgtgaacatcttaatgactaggtaagacgaatggttttctgcatatggtaatgtttcatgtactggaaaagaagcgtaggagactaagagttgtctcttgagcaagaaaactcactgttgggttctaacaagacctctttctgtccagcttcttacagtacatttctagtgaagtaaacccccccagcgatgaaacagattcatcctctgctccttccaaagaacagttagagcaggaaaaacaactactactatctttcaagccagtaatgcagaaatttcttcatgatcacgttgatctacaagtcagtgccctgtatgctctccaggtgcactgctataacagcaacttcccaaaaggtgagaggacttgtatcagaagaacggcgtgaggaagttcttaaacagaacactaaataatgggcttattacttttttctttttttttttttttttaaggcatgttacttcgcttttttgtgcacttctatgacatggaaattattgaagaagaagctttcttggcttggaaagaagatataacccaagagtttccgggaaaaggcaaggctttgttccaggtaagtcttttgttaaaaatttggtctgcttacttcagtttgcttggtattaacttcaagttaagagcctttttcaactgaaatacaggcaaggtagtcctagttagtagtttgtcttcacctgtacatttcattctgcactatttgaagctattattaagtaaagctacacaatgaatcaattctagtggtgtataagatgttagaggtagctaacttttcaaggagtatagctacttatatacatgggagtgactgtacaagtttcgatttaagcttttttaaaaacatcagtaaagaggaaattgtagctgggcacgtggctcatgcctgtaatcctagcactttaagaggctgaggtgggaggatcacttgagctcaggagttcaagaccagcctgggcagcatagtgaaaccctgtctctaaaaaatacaaaaaattagccagacgtggtgacatgttctgtggtcctggtcccagctactcgggaggatgtcttgagcccaggaggcagaggttgcagtgagctgagatcacaccactgcactctagtctgggcaacagagtgagactgtgtctcaaaaaaagaaaaaaagtttaaatactatatatttttctaaaaagaggagatgtttctgatttctcacaatttgattttttcttattgaatgaacttgtagccctaggggaagaacatcagggcattctctcaaatcacctgaagagcagtttaaaaagcaggttccaggcctattcctagagattctggtttagtaggtctgtggtacaaaatccaggtgattctttctcatgctactagttttccagggggcccaggcttgagaaacattggtcctgcagcatcttcctacctttttattgctgatgataaacaagattcacgaggatcatccttgcaggattaaatctttagctctgtgttgtcccaaatctggataatataccactgttcgttaacttaatatacaaattgttggtagggatatccttgtttcatattctaaaactgtgtagtaccacctaaaactttttggatggatttctgtttatatcatgaactattttaatttacaaatcttaatttataggtgaatcagtggctaacctggttagaaactgctgaagaagaagaatcagaggaagaagctgactaaagaaccagccaaagccttaaattgtgcaaaacatactgttgctatgatgtaactgcatttgacctaaccactgcgaaaattcattccgctgtaatgttttcacaatatttaaagcagaagcacgtcagttaggatttccttctgcataaggtttttttgtagtgtaatgtcttaatcatagtctaccatcaaatattttaggagtatctttaatgtttagatagtatattagcagcatgcaataattacatcataagttctcaagcagaggcagtctattgcaaggaccttctttgctgccagttatcataggctgttttaagttagaaaactgaatagcaacactgaatactgtagaaatgcactttgctcagtaatacttgagttgttgcaatatttgattatccatttggttgttacagaaaaattcttaactgtaattgatggttgttgccgtaatagtatattgcctgtatttctacctctagtaatgggctttatgtgctagattttaatatccttgagcctgggcaagtgcacaagtctttttaaaagaaacatggtttacttgcacaaaactgatcagttttgagagatcgttaatgcccttgaagtggtttttgtgggtgtgaaacaaatggtgagaatttgaattggtccctcctattatagtattgaaattaagtctacttaatttatcaagtcatgttcatgccctgattttatatacttgtatctatcaataaacattgtgatacttgatgtagtgatgtgtggctgtaaatggcatccatagtctgggagaattgtcagctttgtttttgaggtataggagacccaccttagtttgacttaaggacttcccaatttttgtttttctgctgtacaagcctgggttccagaaggaatttttagactcttcaagatgagacacaagatttaaggtgtttatttcctttgagttactgaaactaaccaatataaacgatttttatgatcaaagatcacaagtcttatgaatttggaggaacatagctacacatagcaactaaaatttggtgacaatttatcttttgtcagactgaaatacatggtgatctctggataagcttagctgtcctgcaagcatcattcccagtagctgccccaaatgtccaggaagatccctgcttcctctggaaaaattccagtgtcccagtaaaattgacttcattcaactaaacctctgcatgttttccaaaaacacacacgaaggatttgtctccagccctggaacattctgacaatcctaggattacttctaacattggcatggatggggactcttgaagtgtgctactggagtcctggttgatgtcaacacctaagaacctgttcttggtgattggggagaccctcaaggcagactatcatactgccgaacccattagaaccttgaagtcagaagaggctgcctgcacatgctccagtgggtgggaggcagaaccaatcaatgtttttgtgtctgtcttatttgggccagggaagctaaatcttgcattatggcactcatcttcccctgaagttttaacaagtcataagcttttgggtactttgagtacagcaaaatttaaagctaaacagatttgtatgaacctacctaaattttaaaggggctgtaaattgtttctctgcccaaccctccccac

SEQ ID NO: 1636 - DNA, 6000 bp, Homo sapiens
caagttagaagaaaaatcagtataatttaaaagcagtttttcaattcaaattctgtgtattagctaacacttaaaatgtaattcctttttctccagcatactaaataagcttactcctgaaaagtttgacaagctatgccttgagctcctcaatgtgggtgtagagtctaaactcatccttaaaggggtcatactgctggtaagttttaaatattggcttaactcaaaagggagagggaactgtttaacaaactcaagttgtgtttttttacacttggattactacttaaaacccttaggtgtgagttagataggtatgtatttttgaatactgatggtgattaaaaagaaccactgactttagtagcattagattgaagaggtaaatgttaagttcatggtatggttgaagaggtaaatgggagtgcttagcaagctgttctttttcttttgtggaaaacaccgtatttaggtcttggaaatgcattgtatgacagtttatgtagacttgaaagttttgatatccatggcattttctgactcccaggagatggatgtgactagatgaaatctgtataactggacatttttggtagactgtaatagctaacatttaggtggttgtatttttcctaaaggaagggttcttggagaagttttcatatttagtttaagcaatgacattttctgtagattgtggacaaagccctagaagagccaaagtatagctcactgtatgctcagctatgtctgcgattggcagaagatgcaccaaactttgatggcccagcagcagagggtcaaccaggacagaagcaaagcaccgtaagtggtagtttttgtttgcttgttttaaagttgacttgaaaaatttccttaataaagcatgacaatgtcttcttttccagacattcagacgcctcctaatttccaaattacaagatgaatttgaaaaccgaactagaaatgttgatggtaagacttatagctgataataagtactactgtatattttcagcttaattctgaatgttggcttacttcattggtatctttttcagtctatgataagcgtgaaaatcccctcctccccgaggaggaggaacagagagccattgctaagatcaagatgttgggaaacatcaaattcattggagagcttggcaagcttgatcttattcacgaatctatccttcataagtgcatcaaaacagtaagtgtgacagggaagttaggcgaatgtagtcagtcgtttggaggaaatgagtcaattattcatctaagagggaggttgactagttaaatacagatgtgcaacaaaatttactaaacagaataatttgaaatacgtggtgtgtttgacaaagtagagttagaactgatcaaccagactggtagaaagccctatactagattctgtaggaactgtgaatgagtcagtgcaaacataaagggaaagaaagtactacgcctaaaccagagtaactaaaactttgtcaccatggccttttattcttgtagcttttggaaaagaagaagagagtccaactcaaagatatgggagaggatttggagtgcctctgtcagataatgaggacagtgggacctagattagaccatgaacgagccaaggtacgtgtgtagctgatgaaagtagtacaagtagtttgtctttaaatcaagctattgatttttgtgacatcataagggattgccatatttagccattaactgggttataattttagaagtcttaaagctgtaaattgaacacatttgctttagctcttccaatgaatgtattcttctcttatcagtccttaatggatcagtactttgcccgaatgtgctccttgatgttaagtaaggaattgccagcaaggattcgtttcctgctgcaggtaatactggtttctttaaatttgttggtaagctgagtttttggtttaggaatattaaaataaaattatttttcaattaaaggataccgtagagttgcgagaacaccattgggttcctcgcaaggcttttcttgacaatggaccaaagacgatcaatcaaattcgtcaagatgcagtaaaagtaagattgggttttgttttgtttgtcacatagactctgtgtgtgtagaatagaatgggtttcctcctcacccaccccaaacgcttgaggggtctgtctcatcttagtggtggagcttaatgtttttagtgtctcgtcttccacttttatttttttattttttgagacggagtttcgcactgtcacccaggctggagtgcagtggcgcattctcgattcactgcagcctctgcctcccaggttcaagtgattctcctgcttcagcctccccagtagctgggactataggcgtgcgccaccacaccccgctaattttttgtatttttagtagagacagggttccaccatgttggccaggcttgtcttgaactcctgacctcatgcaaaccaaggcttgggcctcccaaagtcgggggattacagatgtgagccatcatgcccagccttgtctgccatttttggaagaagttatttacagaaataacataaattatggtttaatattctaggtttccccccctagttgcaagaattttagttttaagtgaaatagtgtccagagacaaaaagtgcatattcacttcatttctaaaggatctaggggtgtttattcctgctcctatggctcaagggatgagaagtgacttctttctggagggaccgttcatgccacccaggatgaaaatggatagggacccacttggaggacttgctgatatgtttggacaaatgccaggtaattttgaaaaaacaatggttgcgttaagctgaaaaatcagttaactttagttttgagagttgtccgtatatgtattttaaggtagcggaattggtactggtccaggagttatccaggatagattttcacccaccatgggacgtcatcgttcaaatcaactcttcaatggccatgggggacacatcatgcctcccacacaatcgcagtttggagagatgggaggcaagtttatgaaaagccaggtaagtaatatttgagtgtgcatgttttctaaaccttatctgcaacatttatttcaaactgaaatgtttatccttaagattagtaaagtattagtaaaatcacatcactttatttgataggttagatttttattcttccctgtttcatcttttactttctctgggcaaattcagttaaactaactttatggcttggctcatccctttggtacttgattaccataatttgtggacccctttttatctagactttctttctccttttctgaaataggggctaagccagctctaccataaccagagtcagggactcttatcccagctgcaaggacagtcgaaggatatgccacctcggttttctaagaaaggacagcttaatgcagatgaggtacatttgcctatgttacttatataccatagtttgtccattcagaaatttattgcccgatgattataaaaagacgcgttattaagaggactttatgctggagttcttgacgtttttctctcttttctatacttctttttctttctttgaatgtccagcgtcctgtgagcgaagattatgagatatgagggcaagtctcctaaagtctgttagagcaagaaaactggttgtcaaaatattgtggtttctttctttgtaagggtgatttaactaaggataaaacagggcattttctaaactgtagttaaatttgcagttttttatttgaatattttagtcatgctaattctaagagaatgtaagatttataatagtatcttactactgtatgcatcagatctttaaattttttgccaaaaattaaacctgttaatgtggagtaccttctttagtttttcaaaaagcttaatgtttccctagattctgtcactgtataggattttagaatgttgtatttaatatgttcgccaactgcatgttgttaatttagatatattttgttttcaattccagattagcctgaggcctgctcagtcgttcctaatgaataaaaatcaagtgccaaagcttcagccccagataactatgattcctcctagtgcacaaccaccacgcactcaaacaccacctctgggacaggtacagaccatagtaggacagcattttctaaagatatctgaagacttttttctaaatttagtgtgttcttccccctaatttcatagtcctctttttaaaaaaagtctgtcattgcttgttttttagacacctcagcttggtctcaaaactaatccaccgcttatccaggaaaagcctgccaagaccagcaaaaagccaccaccgtcaaaggaagaactccttaaactaactgtaagtttcaaatatcccattttagtgtaattagcctgtatttgagatagagaatacattaaagatacttgtgttcttcacaggaaactgttgtgactgaatatctaaatagtggaaatgcaaatgaggctgtcaatggtgtaagagaaatgagggctcctaaacactttcttcctgagatgttaagcaaagtaatcatcctgtcactagatagaagcgatgaagataaagaaaaagcaagttctttgatcagtttactcaaacaggaagggatagccacaagtgacaacttcatgcaggtaggacactttactgattgtgtggtaagaactcttaccactcaaattcgaaaactgataaactgttgtatatttctttcaaggctttcctgaatgtattggaccagtgtcccaaactggaggttgacatccctttggtgaaatcctatttagcacagtttgcagctcgtgccatcatttcagagctggtgagcatttcagaactagctcaaccactagaaagtggcacccattttcctctcttcctactttgtcttcagcagttagctaaattacaagatcgagaatggttaacagaactttttcaacaaagcaaggtcaatatgcagaaaatgctcccaggtaagagaatgctgacttgtttgttttgtttttttaatattatatctagagatttcaggtaccttgagtggatttatgtaggtcagacagtctgattgtcctgctcagataatgataaacattaccacagatctcacctataaagagagatttataatttaactactttcatttgatccgtatgttgagtttttttcatttgctgggttggttctctattctgctacatggatcttacatacttggggacatcatttgtgaagctctgctctctggacaggacaacttggtaaaatgaactattagatgatgcaggtggctttgtctcttcagaaattgatcagaataaggaccgcatgttggagattttggaaggaaagggactgagtttcttattcccactcctcaaattggagaaggaactgttgaagcaaataaagttggatccatcccctcaaaccatatataaatggattaaagataacatctctcccaaacttcatgtagataaaggatttgtgaacatcttaatgactaggtaagacgaatggttttctgcatatggtaatgtttcatgtactggaaaagaagcgtaggagactaagagttgtctcttgagcaagaaaactcactgttgggttctaacaagacctctttctgtccagcttcttacagtacatttctagtgaagtaaacccccccagcgatgaaacagattcatcctctgctccttccaaagaacagttagagcaggaaaaacaactactactatctttcaagccagtaatgcagaaatttcttcatgatcacgttgatctacaagtcagtgccctgtatgctctccaggtgcactgctataacagcaacttcccaaaaggtgagaggacttgtatcagaagaacggcgtgaggaagttcttaaacagaacactaaataatgggcttattacttttttctttttttttttttttttaaggc

SEQ ID NO: 1637 - DNA, 6000 bp, Homo sapiens
agatcacgccactgcactccagcctgggtgcagagcaagactgtgtctcaaaaaaaaaaaatgtatcttgaactgaagaacagcacgtcatattttggggcttcccgttgctttcagccattggattgcaatccataatcctgtcatgctagcatttcccttgactaagggaagtgctatgttatttaagccagtgaggcagggaatataatggtcttagttcatggtctagccttgataatgagatctttgcgctctaaccttgagaaagtgagaaaggattcttgtcaaacagctggggaccccccagtccaattcaaatcattgtaattaaaataacaggtttatttcagcatccctttggttttagatgagtaagaaaacatgtcttgattttttaaagggagcaagttagaagaaaaatcagtataatttaaaagcagtttttcaattcaaattctgtgtattagctaacacttaaaatgtaattcctttttctccagcatactaaataagcttactcctgaaaagtttgacaagctatgccttgagctcctcaatgtgggtgtagagtctaaactcatccttaaaggggtcatactgctggtaagttttaaatattggcttaactcaaaagggagagggaactgtttaacaaactcaagttgtgtttttttacacttggattactacttaaaacccttaggtgtgagttagataggtatgtatttttgaatactgatggtgattaaaaagaaccactgactttagtagcattagattgaagaggtaaatgttaagttcatggtatggttgaagaggtaaatgggagtgcttagcaagctgttctttttcttttgtggaaaacaccgtatttaggtcttggaaatgcattgtatgacagtttatgtagacttgaaagttttgatatccatggcattttctgactcccaggagatggatgtgactagatgaaatctgtataactggacatttttggtagactgtaatagctaacatttaggtggttgtatttttcctaaaggaagggttcttggagaagttttcatatttagtttaagcaatgacattttctgtagattgtggacaaagccctagaagagccaaagtatagctcactgtatgctcagctatgtctgcgattggcagaagatgcaccaaactttgatggcccagcagcagagggtcaaccaggacagaagcaaagcaccgtaagtggtagtttttgtttgcttgttttaaagttgacttgaaaaatttccttaataaagcatgacaatgtcttcttttccagacattcagacgcctcctaatttccaaattacaagatgaatttgaaaaccgaactagaaatgttgatggtaagacttatagctgataataagtactactgtatattttcagcttaattctgaatgttggcttacttcattggtatctttttcagtctatgataagcgtgaaaatcccctcctccccgaggaggaggaacagagagccattgctaagatcaagatgttgggaaacatcaaattcattggagagcttggcaagcttgatcttattcacgaatctatccttcataagtgcatcaaaacagtaagtgtgacagggaagttaggcgaatgtagtcagtcgtttggaggaaatgagtcaattattcatctaagagggaggttgactagttaaatacagatgtgcaacaaaatttactaaacagaataatttgaaatacgtggtgtgtttgacaaagtagagttagaactgatcaaccagactggtagaaagccctatactagattctgtaggaactgtgaatgagtcagtgcaaacataaagggaaagaaagtactacgcctaaaccagagtaactaaaactttgtcaccatggccttttattcttgtagcttttggaaaagaagaagagagtccaactcaaagatatgggagaggatttggagtgcctctgtcagataatgaggacagtgggacctagattagaccatgaacgagccaaggtacgtgtgtagctgatgaaagtagtacaagtagtttgtctttaaatcaagctattgatttttgtgacatcataagggattgccatatttagccattaactgggttataattttagaagtcttaaagctgtaaattgaacacatttgctttagctcttccaatgaatgtattcttctcttatcagtccttaatggatcagtactttgcccgaatgtgctccttgatgttaagtaaggaattgccagcaaggattcgtttcctgctgcaggtaatactggtttctttaaatttgttggtaagctgagtttttggtttaggaatattaaaataaaattatttttcaattaaaggataccgtagagttgcgagaacaccattgggttcctcgcaaggcttttcttgacaatggaccaaagacgatcaatcaaattcgtcaagatgcagtaaaagtaagattgggttttgttttgtttgtcacatagactctgtgtgtgtagaatagaatgggtttcctcctcacccaccccaaacgcttgaggggtctgtctcatcttagtggtggagcttaatgtttttagtgtctcgtcttccacttttatttttttattttttgagacggagtttcgcactgtcacccaggctggagtgcagtggcgcattctcgattcactgcagcctctgcctcccaggttcaagtgattctcctgcttcagcctccccagtagctgggactataggcgtgcgccaccacaccccgctaattttttgtatttttagtagagacagggttccaccatgttggccaggcttgtcttgaactcctgacctcatgcaaaccaaggcttgggcctcccaaagtcgggggattacagatgtgagccatcatgcccagccttgtctgccatttttggaagaagttatttacagaaataacataaattatggtttaatattctaggtttccccccctagttgcaagaattttagttttaagtgaaatagtgtccagagacaaaaagtgcatattcacttcatttctaaaggatctaggggtgtttattcctgctcctatggctcaagggatgagaagtgacttctttctggagggaccgttcatgccacccaggatgaaaatggatagggacccacttggaggacttgctgatatgtttggacaaatgccaggtaattttgaaaaaacaatggttgcgttaagctgaaaaatcagttaactttagttttgagagttgtccgtatatgtattttaaggtagcggaattggtactggtccaggagttatccaggatagattttcacccaccatgggacgtcatcgttcaaatcaactcttcaatggccatgggggacacatcatgcctcccacacaatcgcagtttggagagatgggaggcaagtttatgaaaagccaggtaagtaatatttgagtgtgcatgttttctaaaccttatctgcaacatttatttcaaactgaaatgtttatccttaagattagtaaagtattagtaaaatcacatcactttatttgataggttagatttttattcttccctgtttcatcttttactttctctgggcaaattcagttaaactaactttatggcttggctcatccctttggtacttgattaccataatttgtggacccctttttatctagactttctttctccttttctgaaataggggctaagccagctctaccataaccagagtcagggactcttatcccagctgcaaggacagtcgaaggatatgccacctcggttttctaagaaaggacagcttaatgcagatgaggtacatttgcctatgttacttatataccatagtttgtccattcagaaatttattgcccgatgattataaaaagacgcgttattaagaggactttatgctggagttcttgacgtttttctctcttttctatacttctttttctttctttgaatgtccagcgtcctgtgagcgaagattatgagatatgagggcaagtctcctaaagtctgttagagcaagaaaactggttgtcaaaatattgtggtttctttctttgtaagggtgatttaactaaggataaaacagggcattttctaaactgtagttaaatttgcagttttttatttgaatattttagtcatgctaattctaagagaatgtaagatttataatagtatcttactactgtatgcatcagatctttaaattttttgccaaaaattaaacctgttaatgtggagtaccttctttagtttttcaaaaagcttaatgtttccctagattctgtcactgtataggattttagaatgttgtatttaatatgttcgccaactgcatgttgttaatttagatatattttgttttcaattccagattagcctgaggcctgctcagtcgttcctaatgaataaaaatcaagtgccaaagcttcagccccagataactatgattcctcctagtgcacaaccaccacgcactcaaacaccacctctgggacaggtacagaccatagtaggacagcattttctaaagatatctgaagacttttttctaaatttagtgtgttcttccccctaatttcatagtcctctttttaaaaaaagtctgtcattgcttgttttttagacacctcagcttggtctcaaaactaatccaccgcttatccaggaaaagcctgccaagaccagcaaaaagccaccaccgtcaaaggaagaactccttaaactaactgtaagtttcaaatatcccattttagtgtaattagcctgtatttgagatagagaatacattaaagatacttgtgttcttcacaggaaactgttgtgactgaatatctaaatagtggaaatgcaaatgaggctgtcaatggtgtaagagaaatgagggctcctaaacactttcttcctgagatgttaagcaaagtaatcatcctgtcactagatagaagcgatgaagataaagaaaaagcaagttctttgatcagtttactcaaacaggaagggatagccacaagtgacaacttcatgcaggtaggacactttactgattgtgtggtaagaactcttaccactcaaattcgaaaactgataaactgttgtatatttctttcaaggctttcctgaatgtattggaccagtgtcccaaactggaggttgacatccctttggtgaaatcctatttagcacagtttgcagctcgtgccatcatttcagagctggtgagcatttcagaactagctcaaccactagaaagtggcacccattttcctctcttcctactttgtcttcagcagttagctaaattacaagatcgagaatggttaacagaactttttcaacaaagcaaggtcaatatgcagaaaatgctcccaggtaagagaatgctgacttgtttgttttgtttttttaatattatatctagagatttcaggtaccttgagtggatttatgtaggtcagacagtctgattgtcctgctcagataatgataaacattaccacagatctcacctataaagagagatttataatttaactactttcatttgatccgtatgttgagtttttttcatttgctgggttggttctctattctgctacatggatcttacatacttggggacatcatttgtgaagctctgctctctggacaggacaacttggtaaaatgaactattagatgatgcaggtggctttgtctcttcagaaattgatcagaataaggaccgcatgttggagattttggaaggaaagggactgagtttcttattcccactcctcaaattggagaaggaactgttgaagcaaataaagttggatccatcccctcaaaccatatataaatggattaaagataacatctctcccaaacttcatgtagataaaggatttgtgaacatcttaatgactaggtaagacgaatggttttctgcatatggtaatgt

SEQ ID NO: 1638 - DNA, 6000 bp, Homo sapiens
gctcagaaatggattcctgcacgaagcactagacgagatgacaactccgcagcaaacaactccgcaaacgaaaaagaacgacatgatgcaatcttcaggaaagtaagagggtaagtttcaaggtctgttttactaaaagatgggaagtgtggattagctgtgtttggtgtgtgtgctgtattactaagaaggcaaggttcatgcccagagtatgtatgttttaatgaatcctcatggtagcaatttttaaaaatatcttgaactggccaggcactgtggctcacgcctgtaatcccagcactttgggaggccgaggtgggcagatcacttgaggtcaggagtttgagaccagcctggccaacatgttgaaaccccatctctactaaaaatacaaaaattagccggacgtagtggcaggcgcctgtagtcccagctactagagaggctgaggcaggagaatcacttgaataccccacaggtggaggttgcagtgagccgagatcacgccactgcactccagcctgggtgcagagcaagactgtgtctcaaaaaaaaaaaatgtatcttgaactgaagaacagcacgtcatattttggggcttcccgttgctttcagccattggattgcaatccataatcctgtcatgctagcatttcccttgactaagggaagtgctatgttatttaagccagtgaggcagggaatataatggtcttagttcatggtctagccttgataatgagatctttgcgctctaaccttgagaaagtgagaaaggattcttgtcaaacagctggggaccccccagtccaattcaaatcattgtaattaaaataacaggtttatttcagcatccctttggttttagatgagtaagaaaacatgtcttgattttttaaagggagcaagttagaagaaaaatcagtataatttaaaagcagtttttcaattcaaattctgtgtattagctaacacttaaaatgtaattcctttttctccagcatactaaataagcttactcctgaaaagtttgacaagctatgccttgagctcctcaatgtgggtgtagagtctaaactcatccttaaaggggtcatactgctggtaagttttaaatattggcttaactcaaaagggagagggaactgtttaacaaactcaagttgtgtttttttacacttggattactacttaaaacccttaggtgtgagttagataggtatgtatttttgaatactgatggtgattaaaaagaaccactgactttagtagcattagattgaagaggtaaatgttaagttcatggtatggttgaagaggtaaatgggagtgcttagcaagctgttctttttcttttgtggaaaacaccgtatttaggtcttggaaatgcattgtatgacagtttatgtagacttgaaagttttgatatccatggcattttctgactcccaggagatggatgtgactagatgaaatctgtataactggacatttttggtagactgtaatagctaacatttaggtggttgtatttttcctaaaggaagggttcttggagaagttttcatatttagtttaagcaatgacattttctgtagattgtggacaaagccctagaagagccaaagtatagctcactgtatgctcagctatgtctgcgattggcagaagatgcaccaaactttgatggcccagcagcagagggtcaaccaggacagaagcaaagcaccgtaagtggtagtttttgtttgcttgttttaaagttgacttgaaaaatttccttaataaagcatgacaatgtcttcttttccagacattcagacgcctcctaatttccaaattacaagatgaatttgaaaaccgaactagaaatgttgatggtaagacttatagctgataataagtactactgtatattttcagcttaattctgaatgttggcttacttcattggtatctttttcagtctatgataagcgtgaaaatcccctcctccccgaggaggaggaacagagagccattgctaagatcaagatgttgggaaacatcaaattcattggagagcttggcaagcttgatcttattcacgaatctatccttcataagtgcatcaaaacagtaagtgtgacagggaagttaggcgaatgtagtcagtcgtttggaggaaatgagtcaattattcatctaagagggaggttgactagttaaatacagatgtgcaacaaaatttactaaacagaataatttgaaatacgtggtgtgtttgacaaagtagagttagaactgatcaaccagactggtagaaagccctatactagattctgtaggaactgtgaatgagtcagtgcaaacataaagggaaagaaagtactacgcctaaaccagagtaactaaaactttgtcaccatggccttttattcttgtagcttttggaaaagaagaagagagtccaactcaaagatatgggagaggatttggagtgcctctgtcagataatgaggacagtgggacctagattagaccatgaacgagccaaggtacgtgtgtagctgatgaaagtagtacaagtagtttgtctttaaatcaagctattgatttttgtgacatcataagggattgccatatttagccattaactgggttataattttagaagtcttaaagctgtaaattgaacacatttgctttagctcttccaatgaatgtattcttctcttatcagtccttaatggatcagtactttgcccgaatgtgctccttgatgttaagtaaggaattgccagcaaggattcgtttcctgctgcaggtaatactggtttctttaaatttgttggtaagctgagtttttggtttaggaatattaaaataaaattatttttcaattaaaggataccgtagagttgcgagaacaccattgggttcctcgcaaggcttttcttgacaatggaccaaagacgatcaatcaaattcgtcaagatgcagtaaaagtaagattgggttttgttttgtttgtcacatagactctgtgtgtgtagaatagaatgggtttcctcctcacccaccccaaacgcttgaggggtctgtctcatcttagtggtggagcttaatgtttttagtgtctcgtcttccacttttatttttttattttttgagacggagtttcgcactgtcacccaggctggagtgcagtggcgcattctcgattcactgcagcctctgcctcccaggttcaagtgattctcctgcttcagcctccccagtagctgggactataggcgtgcgccaccacaccccgctaattttttgtatttttagtagagacagggttccaccatgttggccaggcttgtcttgaactcctgacctcatgcaaaccaaggcttgggcctcccaaagtcgggggattacagatgtgagccatcatgcccagccttgtctgccatttttggaagaagttatttacagaaataacataaattatggtttaatattctaggtttccccccctagttgcaagaattttagttttaagtgaaatagtgtccagagacaaaaagtgcatattcacttcatttctaaaggatctaggggtgtttattcctgctcctatggctcaagggatgagaagtgacttctttctggagggaccgttcatgccacccaggatgaaaatggatagggacccacttggaggacttgctgatatgtttggacaaatgccaggtaattttgaaaaaacaatggttgcgttaagctgaaaaatcagttaactttagttttgagagttgtccgtatatgtattttaaggtagcggaattggtactggtccaggagttatccaggatagattttcacccaccatgggacgtcatcgttcaaatcaactcttcaatggccatgggggacacatcatgcctcccacacaatcgcagtttggagagatgggaggcaagtttatgaaaagccaggtaagtaatatttgagtgtgcatgttttctaaaccttatctgcaacatttatttcaaactgaaatgtttatccttaagattagtaaagtattagtaaaatcacatcactttatttgataggttagatttttattcttccctgtttcatcttttactttctctgggcaaattcagttaaactaactttatggcttggctcatccctttggtacttgattaccataatttgtggacccctttttatctagactttctttctccttttctgaaataggggctaagccagctctaccataaccagagtcagggactcttatcccagctgcaaggacagtcgaaggatatgccacctcggttttctaagaaaggacagcttaatgcagatgaggtacatttgcctatgttacttatataccatagtttgtccattcagaaatttattgcccgatgattataaaaagacgcgttattaagaggactttatgctggagttcttgacgtttttctctcttttctatacttctttttctttctttgaatgtccagcgtcctgtgagcgaagattatgagatatgagggcaagtctcctaaagtctgttagagcaagaaaactggttgtcaaaatattgtggtttctttctttgtaagggtgatttaactaaggataaaacagggcattttctaaactgtagttaaatttgcagttttttatttgaatattttagtcatgctaattctaagagaatgtaagatttataatagtatcttactactgtatgcatcagatctttaaattttttgccaaaaattaaacctgttaatgtggagtaccttctttagtttttcaaaaagcttaatgtttccctagattctgtcactgtataggattttagaatgttgtatttaatatgttcgccaactgcatgttgttaatttagatatattttgttttcaattccagattagcctgaggcctgctcagtcgttcctaatgaataaaaatcaagtgccaaagcttcagccccagataactatgattcctcctagtgcacaaccaccacgcactcaaacaccacctctgggacaggtacagaccatagtaggacagcattttctaaagatatctgaagacttttttctaaatttagtgtgttcttccccctaatttcatagtcctctttttaaaaaaagtctgtcattgcttgttttttagacacctcagcttggtctcaaaactaatccaccgcttatccaggaaaagcctgccaagaccagcaaaaagccaccaccgtcaaaggaagaactccttaaactaactgtaagtttcaaatatcccattttagtgtaattagcctgtatttgagatagagaatacattaaagatacttgtgttcttcacaggaaactgttgtgactgaatatctaaatagtggaaatgcaaatgaggctgtcaatggtgtaagagaaatgagggctcctaaacactttcttcctgagatgttaagcaaagtaatcatcctgtcactagatagaagcgatgaagataaagaaaaagcaagttctttgatcagtttactcaaacaggaagggatagccacaagtgacaacttcatgcaggtaggacactttactgattgtgtggtaagaactcttaccactcaaattcgaaaactgataaactgttgtatatttctttcaaggctttcctgaatgtattggaccagtgtcccaaactggaggttgacatccctttggtgaaatcctatttagcacagtttgcagctcgtgccatcatttcagagctggtgagcatttcagaactagctcaaccactagaaagtggcacccattttcctctcttcctactttgtcttcagcagttagctaaattacaagatcgagaatggttaacagaactttttcaacaaagcaaggtcaatatgcagaaaatgctcccaggtaagagaatgctgacttgtttgttttgtttttttaatattatatctagagatttcaggtaccttgagtggat

SEQ ID NO: 1639 - DNA, 6000 bp, Homo sapiens
ctaaatacagaatatcagttcctgattattccttagccaaattttctaagtgagttgagactctcaagctgttatttttttccttattctttgggttatttttactaatgtgtttttctgaaatcagtagctattattcctactgattgttattagtaaagtagtacgcactcaacatggtcaataaaacattagaaagtgtttattggcagccggtacagtggctcacacctgtaatcccaacaacaactttgggaggcaaaggtgggagggtcgcttgaacccaagagtttgagatcagcctgggcaagacagcaagaccccatctcttaaaaaaaatgttaattttcaaaatgtggttccacagcgttgatactgggaatatttactagacatgcaaattcttaggccccaccccaaaccagtgaaagcagaaactgggtgggcccagcaatctgtattaacaagcccttcaggtgattctgatgcacactactgttccagaagcactaatttccagagttggctttcttggaggggaagtcgagaaagcctaaattacttttttctatgtaagagaatttatgatgtttaacatttggtgtgtgacaataagtgtttttgctgatttttattaatcagcgagttcctggggaaaaccccagggcaaaacgctcagaaatggattcctgcacgaagcactagacgagatgacaactccgcagcaaacaactccgcaaacgaaaaagaacgacatgatgcaatcttcaggaaagtaagagggtaagtttcaaggtctgttttactaaaagatgggaagtgtggattagctgtgtttggtgtgtgtgctgtattactaagaaggcaaggttcatgcccagagtatgtatgttttaatgaatcctcatggtagcaatttttaaaaatatcttgaactggccaggcactgtggctcacgcctgtaatcccagcactttgggaggccgaggtgggcagatcacttgaggtcaggagtttgagaccagcctggccaacatgttgaaaccccatctctactaaaaatacaaaaattagccggacgtagtggcaggcgcctgtagtcccagctactagagaggctgaggcaggagaatcacttgaataccccacaggtggaggttgcagtgagccgagatcacgccactgcactccagcctgggtgcagagcaagactgtgtctcaaaaaaaaaaaatgtatcttgaactgaagaacagcacgtcatattttggggcttcccgttgctttcagccattggattgcaatccataatcctgtcatgctagcatttcccttgactaagggaagtgctatgttatttaagccagtgaggcagggaatataatggtcttagttcatggtctagccttgataatgagatctttgcgctctaaccttgagaaagtgagaaaggattcttgtcaaacagctggggaccccccagtccaattcaaatcattgtaattaaaataacaggtttatttcagcatccctttggttttagatgagtaagaaaacatgtcttgattttttaaagggagcaagttagaagaaaaatcagtataatttaaaagcagtttttcaattcaaattctgtgtattagctaacacttaaaatgtaattcctttttctccagcatactaaataagcttactcctgaaaagtttgacaagctatgccttgagctcctcaatgtgggtgtagagtctaaactcatccttaaaggggtcatactgctggtaagttttaaatattggcttaactcaaaagggagagggaactgtttaacaaactcaagttgtgtttttttacacttggattactacttaaaacccttaggtgtgagttagataggtatgtatttttgaatactgatggtgattaaaaagaaccactgactttagtagcattagattgaagaggtaaatgttaagttcatggtatggttgaagaggtaaatgggagtgcttagcaagctgttctttttcttttgtggaaaacaccgtatttaggtcttggaaatgcattgtatgacagtttatgtagacttgaaagttttgatatccatggcattttctgactcccaggagatggatgtgactagatgaaatctgtataactggacatttttggtagactgtaatagctaacatttaggtggttgtatttttcctaaaggaagggttcttggagaagttttcatatttagtttaagcaatgacattttctgtagattgtggacaaagccctagaagagccaaagtatagctcactgtatgctcagctatgtctgcgattggcagaagatgcaccaaactttgatggcccagcagcagagggtcaaccaggacagaagcaaagcaccgtaagtggtagtttttgtttgcttgttttaaagttgacttgaaaaatttccttaataaagcatgacaatgtcttcttttccagacattcagacgcctcctaatttccaaattacaagatgaatttgaaaaccgaactagaaatgttgatggtaagacttatagctgataataagtactactgtatattttcagcttaattctgaatgttggcttacttcattggtatctttttcagtctatgataagcgtgaaaatcccctcctccccgaggaggaggaacagagagccattgctaagatcaagatgttgggaaacatcaaattcattggagagcttggcaagcttgatcttattcacgaatctatccttcataagtgcatcaaaacagtaagtgtgacagggaagttaggcgaatgtagtcagtcgtttggaggaaatgagtcaattattcatctaagagggaggttgactagttaaatacagatgtgcaacaaaatttactaaacagaataatttgaaatacgtggtgtgtttgacaaagtagagttagaactgatcaaccagactggtagaaagccctatactagattctgtaggaactgtgaatgagtcagtgcaaacataaagggaaagaaagtactacgcctaaaccagagtaactaaaactttgtcaccatggccttttattcttgtagcttttggaaaagaagaagagagtccaactcaaagatatgggagaggatttggagtgcctctgtcagataatgaggacagtgggacctagattagaccatgaacgagccaaggtacgtgtgtagctgatgaaagtagtacaagtagtttgtctttaaatcaagctattgatttttgtgacatcataagggattgccatatttagccattaactgggttataattttagaagtcttaaagctgtaaattgaacacatttgctttagctcttccaatgaatgtattcttctcttatcagtccttaatggatcagtactttgcccgaatgtgctccttgatgttaagtaaggaattgccagcaaggattcgtttcctgctgcaggtaatactggtttctttaaatttgttggtaagctgagtttttggtttaggaatattaaaataaaattatttttcaattaaaggataccgtagagttgcgagaacaccattgggttcctcgcaaggcttttcttgacaatggaccaaagacgatcaatcaaattcgtcaagatgcagtaaaagtaagattgggttttgttttgtttgtcacatagactctgtgtgtgtagaatagaatgggtttcctcctcacccaccccaaacgcttgaggggtctgtctcatcttagtggtggagcttaatgtttttagtgtctcgtcttccacttttatttttttattttttgagacggagtttcgcactgtcacccaggctggagtgcagtggcgcattctcgattcactgcagcctctgcctcccaggttcaagtgattctcctgcttcagcctccccagtagctgggactataggcgtgcgccaccacaccccgctaattttttgtatttttagtagagacagggttccaccatgttggccaggcttgtcttgaactcctgacctcatgcaaaccaaggcttgggcctcccaaagtcgggggattacagatgtgagccatcatgcccagccttgtctgccatttttggaagaagttatttacagaaataacataaattatggtttaatattctaggtttccccccctagttgcaagaattttagttttaagtgaaatagtgtccagagacaaaaagtgcatattcacttcatttctaaaggatctaggggtgtttattcctgctcctatggctcaagggatgagaagtgacttctttctggagggaccgttcatgccacccaggatgaaaatggatagggacccacttggaggacttgctgatatgtttggacaaatgccaggtaattttgaaaaaacaatggttgcgttaagctgaaaaatcagttaactttagttttgagagttgtccgtatatgtattttaaggtagcggaattggtactggtccaggagttatccaggatagattttcacccaccatgggacgtcatcgttcaaatcaactcttcaatggccatgggggacacatcatgcctcccacacaatcgcagtttggagagatgggaggcaagtttatgaaaagccaggtaagtaatatttgagtgtgcatgttttctaaaccttatctgcaacatttatttcaaactgaaatgtttatccttaagattagtaaagtattagtaaaatcacatcactttatttgataggttagatttttattcttccctgtttcatcttttactttctctgggcaaattcagttaaactaactttatggcttggctcatccctttggtacttgattaccataatttgtggacccctttttatctagactttctttctccttttctgaaataggggctaagccagctctaccataaccagagtcagggactcttatcccagctgcaaggacagtcgaaggatatgccacctcggttttctaagaaaggacagcttaatgcagatgaggtacatttgcctatgttacttatataccatagtttgtccattcagaaatttattgcccgatgattataaaaagacgcgttattaagaggactttatgctggagttcttgacgtttttctctcttttctatacttctttttctttctttgaatgtccagcgtcctgtgagcgaagattatgagatatgagggcaagtctcctaaagtctgttagagcaagaaaactggttgtcaaaatattgtggtttctttctttgtaagggtgatttaactaaggataaaacagggcattttctaaactgtagttaaatttgcagttttttatttgaatattttagtcatgctaattctaagagaatgtaagatttataatagtatcttactactgtatgcatcagatctttaaattttttgccaaaaattaaacctgttaatgtggagtaccttctttagtttttcaaaaagcttaatgtttccctagattctgtcactgtataggattttagaatgttgtatttaatatgttcgccaactgcatgttgttaatttagatatattttgttttcaattccagattagcctgaggcctgctcagtcgttcctaatgaataaaaatcaagtgccaaagcttcagccccagataactatgattcctcctagtgcacaaccaccacgcactcaaacaccacctctgggacaggtacagaccatagtaggacagcattttctaaagatatctgaagacttttttctaaatttagtgtgttcttccccctaatttcatagtcctctttttaaaaaaagtctgtcattgcttgttttttagacacctcagcttggtctcaaaactaatccaccgcttatccaggaaaagcctgccaagaccagcaaaaagccaccaccgtcaaaggaagaactccttaaactaactgtaagtttcaaatatcccattttagtgtaattagcctgtat

SEQ ID NO: 1640 - DNA, 6000 bp, Homo sapiens
ggcctcagctgctcctccccgtcgagcgacccgggcctcgcggggaggttgtcggaagcacttccctaacttgcgcctgggtgggaggaatgctccgctcttttgttcccaggaagggaaaaacggggcggaggttcctgctgccatgttgtggccctggtcttccgcctgcaagtgctagtcctgtacacccggccccctctcgcgcgtctttccacgagctctccacggggaggaggcgaaagggtggacaggggaaaactgctgaagagctttcggagagacctcatctagtcgctggcctcgtcaaggcagtaaaaattcctagggcagacattttccacgtgatgttgctcgtgtctgtagttagacttttctattgatctcagtgctcagttttaaagatagtagaatgtggctttttcaaaagattcgttctgagccgtttaaaatgctcttgtgttctacgaagtctctttgcatccttgaacaccggggaatttccaggtggctaaacaaaatgtaattgtcagtgttttgagtacattttaggttagtcttacagatctgcaatgcagtgacagtgccaggatctgaaatacgttgtaattgaatgaaggcttatagatctgtatgttagcagtgtctaattttggtgctctttctcgttccaggtatttcatttctcctgtcccctcccctccccaccccatctattaatattattcttttgaagattcttcgttgtcaagccgccaaagtggagagtgcgattgcagaagggggtgcttctcgtttcaggtacttgtagatttattttggggaatccttttgaaaaggccagtctcaaaaagtagttaacacagcaaataagtccgacttaatgggctgcaattttcatttgaaaagttcttaagttttcattgacagccttctaagaactgccatctgaagaataaataaaatcaattatttgcctttcctttgggtccgagttcagtcttcatttgtagcataatatacaagcactaaaatacaggcctggctccagtctgggcaaaatagcgagacccccatctctacaagcaaagcaaaacacaaaatagatgcttattctttttgagtgagacatagttgggatacagtaaacaatttttttcttttaaatagtgcttcttcgggcggaggaggaagtaggggtgcacctcagcactatcccaagactgctggcaacaggtgtggtaaacatgtaaaaaaacagtgagctttatttaacagattaaaagtctttcccatgtgacggtataattaaggcaatagccatcaagactcctaatcttaaggggcgtggtttctgttgggtatcctaaatacagaatatcagttcctgattattccttagccaaattttctaagtgagttgagactctcaagctgttatttttttccttattctttgggttatttttactaatgtgtttttctgaaatcagtagctattattcctactgattgttattagtaaagtagtacgcactcaacatggtcaataaaacattagaaagtgtttattggcagccggtacagtggctcacacctgtaatcccaacaacaactttgggaggcaaaggtgggagggtcgcttgaacccaagagtttgagatcagcctgggcaagacagcaagaccccatctcttaaaaaaaatgttaattttcaaaatgtggttccacagcgttgatactgggaatatttactagacatgcaaattcttaggccccaccccaaaccagtgaaagcagaaactgggtgggcccagcaatctgtattaacaagcccttcaggtgattctgatgcacactactgttccagaagcactaatttccagagttggctttcttggaggggaagtcgagaaagcctaaattacttttttctatgtaagagaatttatgatgtttaacatttggtgtgtgacaataagtgtttttgctgatttttattaatcagcgagttcctggggaaaaccccagggcaaaacgctcagaaatggattcctgcacgaagcactagacgagatgacaactccgcagcaaacaactccgcaaacgaaaaagaacgacatgatgcaatcttcaggaaagtaagagggtaagtttcaaggtctgttttactaaaagatgggaagtgtggattagctgtgtttggtgtgtgtgctgtattactaagaaggcaaggttcatgcccagagtatgtatgttttaatgaatcctcatggtagcaatttttaaaaatatcttgaactggccaggcactgtggctcacgcctgtaatcccagcactttgggaggccgaggtgggcagatcacttgaggtcaggagtttgagaccagcctggccaacatgttgaaaccccatctctactaaaaatacaaaaattagccggacgtagtggcaggcgcctgtagtcccagctactagagaggctgaggcaggagaatcacttgaataccccacaggtggaggttgcagtgagccgagatcacgccactgcactccagcctgggtgcagagcaagactgtgtctcaaaaaaaaaaaatgtatcttgaactgaagaacagcacgtcatattttggggcttcccgttgctttcagccattggattgcaatccataatcctgtcatgctagcatttcccttgactaagggaagtgctatgttatttaagccagtgaggcagggaatataatggtcttagttcatggtctagccttgataatgagatctttgcgctctaaccttgagaaagtgagaaaggattcttgtcaaacagctggggaccccccagtccaattcaaatcattgtaattaaaataacaggtttatttcagcatccctttggttttagatgagtaagaaaacatgtcttgattttttaaagggagcaagttagaagaaaaatcagtataatttaaaagcagtttttcaattcaaattctgtgtattagctaacacttaaaatgtaattcctttttctccagcatactaaataagcttactcctgaaaagtttgacaagctatgccttgagctcctcaatgtgggtgtagagtctaaactcatccttaaaggggtcatactgctggtaagttttaaatattggcttaactcaaaagggagagggaactgtttaacaaactcaagttgtgtttttttacacttggattactacttaaaacccttaggtgtgagttagataggtatgtatttttgaatactgatggtgattaaaaagaaccactgactttagtagcattagattgaagaggtaaatgttaagttcatggtatggttgaagaggtaaatgggagtgcttagcaagctgttctttttcttttgtggaaaacaccgtatttaggtcttggaaatgcattgtatgacagtttatgtagacttgaaagttttgatatccatggcattttctgactcccaggagatggatgtgactagatgaaatctgtataactggacatttttggtagactgtaatagctaacatttaggtggttgtatttttcctaaaggaagggttcttggagaagttttcatatttagtttaagcaatgacattttctgtagattgtggacaaagccctagaagagccaaagtatagctcactgtatgctcagctatgtctgcgattggcagaagatgcaccaaactttgatggcccagcagcagagggtcaaccaggacagaagcaaagcaccgtaagtggtagtttttgtttgcttgttttaaagttgacttgaaaaatttccttaataaagcatgacaatgtcttcttttccagacattcagacgcctcctaatttccaaattacaagatgaatttgaaaaccgaactagaaatgttgatggtaagacttatagctgataataagtactactgtatattttcagcttaattctgaatgttggcttacttcattggtatctttttcagtctatgataagcgtgaaaatcccctcctccccgaggaggaggaacagagagccattgctaagatcaagatgttgggaaacatcaaattcattggagagcttggcaagcttgatcttattcacgaatctatccttcataagtgcatcaaaacagtaagtgtgacagggaagttaggcgaatgtagtcagtcgtttggaggaaatgagtcaattattcatctaagagggaggttgactagttaaatacagatgtgcaacaaaatttactaaacagaataatttgaaatacgtggtgtgtttgacaaagtagagttagaactgatcaaccagactggtagaaagccctatactagattctgtaggaactgtgaatgagtcagtgcaaacataaagggaaagaaagtactacgcctaaaccagagtaactaaaactttgtcaccatggccttttattcttgtagcttttggaaaagaagaagagagtccaactcaaagatatgggagaggatttggagtgcctctgtcagataatgaggacagtgggacctagattagaccatgaacgagccaaggtacgtgtgtagctgatgaaagtagtacaagtagtttgtctttaaatcaagctattgatttttgtgacatcataagggattgccatatttagccattaactgggttataattttagaagtcttaaagctgtaaattgaacacatttgctttagctcttccaatgaatgtattcttctcttatcagtccttaatggatcagtactttgcccgaatgtgctccttgatgttaagtaaggaattgccagcaaggattcgtttcctgctgcaggtaatactggtttctttaaatttgttggtaagctgagtttttggtttaggaatattaaaataaaattatttttcaattaaaggataccgtagagttgcgagaacaccattgggttcctcgcaaggcttttcttgacaatggaccaaagacgatcaatcaaattcgtcaagatgcagtaaaagtaagattgggttttgttttgtttgtcacatagactctgtgtgtgtagaatagaatgggtttcctcctcacccaccccaaacgcttgaggggtctgtctcatcttagtggtggagcttaatgtttttagtgtctcgtcttccacttttatttttttattttttgagacggagtttcgcactgtcacccaggctggagtgcagtggcgcattctcgattcactgcagcctctgcctcccaggttcaagtgattctcctgcttcagcctccccagtagctgggactataggcgtgcgccaccacaccccgctaattttttgtatttttagtagagacagggttccaccatgttggccaggcttgtcttgaactcctgacctcatgcaaaccaaggcttgggcctcccaaagtcgggggattacagatgtgagccatcatgcccagccttgtctgccatttttggaagaagttatttacagaaataacataaattatggtttaatattctaggtttccccccctagttgcaagaattttagttttaagtgaaatagtgtccagagacaaaaagtgcatattcacttcatttctaaaggatctaggggtgtttattcctgctcctatggctcaagggatgagaagtgacttctttctggagggaccgttcatgccacccaggatgaaaatggatagggacccacttggaggacttgctgatatgtttggacaaatgccaggtaattttgaaaaaacaatggttgcgttaagctgaaaaatcagttaactttagttttgagagttgtccgtatatgtattttaaggtagcggaattggtactggtccaggagttatccaggatagattttcacccaccatgggacgtcatcgttcaaatcaactcttcaatggccatgggggacacatcatgcctcccacacaatcgcagtttggagagatgggaggcaagtttatgaa

SEQ ID NO: 1641 - DNA, 6000 bp, Homo sapiens
gctgacggagtagaaggaaaacgtcagtgttggccaggccgccgtgcggtcatggccggatggccgacgcctgcagggacgaggccgtggcggaccgaggcacggctgtgctcggacggcgagggagcgtggctcggaccgctagcgccgtggcgggaggcacgcgggccggcagggaaggccaggccgttggcgcgggaccagggaaccgcaggcgtcccggagcctggcctcccggcggggaggtgtgtaggacctggagtcggcaggggctgcccttcgtcggggaggaaagagagagtgatgatttctgccccttttgtcagcagaggaggccgtggcgaggcggttgtcagtcccggggggatttatggtgcaggagggggcccgcttggaggcggcgggtgggcaggaggccgccttcctgcttggagaacaaagagctgggcgccgggctggcgggggtggcctcagctgctcctccccgtcgagcgacccgggcctcgcggggaggttgtcggaagcacttccctaacttgcgcctgggtgggaggaatgctccgctcttttgttcccaggaagggaaaaacggggcggaggttcctgctgccatgttgtggccctggtcttccgcctgcaagtgctagtcctgtacacccggccccctctcgcgcgtctttccacgagctctccacggggaggaggcgaaagggtggacaggggaaaactgctgaagagctttcggagagacctcatctagtcgctggcctcgtcaaggcagtaaaaattcctagggcagacattttccacgtgatgttgctcgtgtctgtagttagacttttctattgatctcagtgctcagttttaaagatagtagaatgtggctttttcaaaagattcgttctgagccgtttaaaatgctcttgtgttctacgaagtctctttgcatccttgaacaccggggaatttccaggtggctaaacaaaatgtaattgtcagtgttttgagtacattttaggttagtcttacagatctgcaatgcagtgacagtgccaggatctgaaatacgttgtaattgaatgaaggcttatagatctgtatgttagcagtgtctaattttggtgctctttctcgttccaggtatttcatttctcctgtcccctcccctccccaccccatctattaatattattcttttgaagattcttcgttgtcaagccgccaaagtggagagtgcgattgcagaagggggtgcttctcgtttcaggtacttgtagatttattttggggaatccttttgaaaaggccagtctcaaaaagtagttaacacagcaaataagtccgacttaatgggctgcaattttcatttgaaaagttcttaagttttcattgacagccttctaagaactgccatctgaagaataaataaaatcaattatttgcctttcctttgggtccgagttcagtcttcatttgtagcataatatacaagcactaaaatacaggcctggctccagtctgggcaaaatagcgagacccccatctctacaagcaaagcaaaacacaaaatagatgcttattctttttgagtgagacatagttgggatacagtaaacaatttttttcttttaaatagtgcttcttcgggcggaggaggaagtaggggtgcacctcagcactatcccaagactgctggcaacaggtgtggtaaacatgtaaaaaaacagtgagctttatttaacagattaaaagtctttcccatgtgacggtataattaaggcaatagccatcaagactcctaatcttaaggggcgtggtttctgttgggtatcctaaatacagaatatcagttcctgattattccttagccaaattttctaagtgagttgagactctcaagctgttatttttttccttattctttgggttatttttactaatgtgtttttctgaaatcagtagctattattcctactgattgttattagtaaagtagtacgcactcaacatggtcaataaaacattagaaagtgtttattggcagccggtacagtggctcacacctgtaatcccaacaacaactttgggaggcaaaggtgggagggtcgcttgaacccaagagtttgagatcagcctgggcaagacagcaagaccccatctcttaaaaaaaatgttaattttcaaaatgtggttccacagcgttgatactgggaatatttactagacatgcaaattcttaggccccaccccaaaccagtgaaagcagaaactgggtgggcccagcaatctgtattaacaagcccttcaggtgattctgatgcacactactgttccagaagcactaatttccagagttggctttcttggaggggaagtcgagaaagcctaaattacttttttctatgtaagagaatttatgatgtttaacatttggtgtgtgacaataagtgtttttgctgatttttattaatcagcgagttcctggggaaaaccccagggcaaaacgctcagaaatggattcctgcacgaagcactagacgagatgacaactccgcagcaaacaactccgcaaacgaaaaagaacgacatgatgcaatcttcaggaaagtaagagggtaagtttcaaggtctgttttactaaaagatgggaagtgtggattagctgtgtttggtgtgtgtgctgtattactaagaaggcaaggttcatgcccagagtatgtatgttttaatgaatcctcatggtagcaatttttaaaaatatcttgaactggccaggcactgtggctcacgcctgtaatcccagcactttgggaggccgaggtgggcagatcacttgaggtcaggagtttgagaccagcctggccaacatgttgaaaccccatctctactaaaaatacaaaaattagccggacgtagtggcaggcgcctgtagtcccagctactagagaggctgaggcaggagaatcacttgaataccccacaggtggaggttgcagtgagccgagatcacgccactgcactccagcctgggtgcagagcaagactgtgtctcaaaaaaaaaaaatgtatcttgaactgaagaacagcacgtcatattttggggcttcccgttgctttcagccattggattgcaatccataatcctgtcatgctagcatttcccttgactaagggaagtgctatgttatttaagccagtgaggcagggaatataatggtcttagttcatggtctagccttgataatgagatctttgcgctctaaccttgagaaagtgagaaaggattcttgtcaaacagctggggaccccccagtccaattcaaatcattgtaattaaaataacaggtttatttcagcatccctttggttttagatgagtaagaaaacatgtcttgattttttaaagggagcaagttagaagaaaaatcagtataatttaaaagcagtttttcaattcaaattctgtgtattagctaacacttaaaatgtaattcctttttctccagcatactaaataagcttactcctgaaaagtttgacaagctatgccttgagctcctcaatgtgggtgtagagtctaaactcatccttaaaggggtcatactgctggtaagttttaaatattggcttaactcaaaagggagagggaactgtttaacaaactcaagttgtgtttttttacacttggattactacttaaaacccttaggtgtgagttagataggtatgtatttttgaatactgatggtgattaaaaagaaccactgactttagtagcattagattgaagaggtaaatgttaagttcatggtatggttgaagaggtaaatgggagtgcttagcaagctgttctttttcttttgtggaaaacaccgtatttaggtcttggaaatgcattgtatgacagtttatgtagacttgaaagttttgatatccatggcattttctgactcccaggagatggatgtgactagatgaaatctgtataactggacatttttggtagactgtaatagctaacatttaggtggttgtatttttcctaaaggaagggttcttggagaagttttcatatttagtttaagcaatgacattttctgtagattgtggacaaagccctagaagagccaaagtatagctcactgtatgctcagctatgtctgcgattggcagaagatgcaccaaactttgatggcccagcagcagagggtcaaccaggacagaagcaaagcaccgtaagtggtagtttttgtttgcttgttttaaagttgacttgaaaaatttccttaataaagcatgacaatgtcttcttttccagacattcagacgcctcctaatttccaaattacaagatgaatttgaaaaccgaactagaaatgttgatggtaagacttatagctgataataagtactactgtatattttcagcttaattctgaatgttggcttacttcattggtatctttttcagtctatgataagcgtgaaaatcccctcctccccgaggaggaggaacagagagccattgctaagatcaagatgttgggaaacatcaaattcattggagagcttggcaagcttgatcttattcacgaatctatccttcataagtgcatcaaaacagtaagtgtgacagggaagttaggcgaatgtagtcagtcgtttggaggaaatgagtcaattattcatctaagagggaggttgactagttaaatacagatgtgcaacaaaatttactaaacagaataatttgaaatacgtggtgtgtttgacaaagtagagttagaactgatcaaccagactggtagaaagccctatactagattctgtaggaactgtgaatgagtcagtgcaaacataaagggaaagaaagtactacgcctaaaccagagtaactaaaactttgtcaccatggccttttattcttgtagcttttggaaaagaagaagagagtccaactcaaagatatgggagaggatttggagtgcctctgtcagataatgaggacagtgggacctagattagaccatgaacgagccaaggtacgtgtgtagctgatgaaagtagtacaagtagtttgtctttaaatcaagctattgatttttgtgacatcataagggattgccatatttagccattaactgggttataattttagaagtcttaaagctgtaaattgaacacatttgctttagctcttccaatgaatgtattcttctcttatcagtccttaatggatcagtactttgcccgaatgtgctccttgatgttaagtaaggaattgccagcaaggattcgtttcctgctgcaggtaatactggtttctttaaatttgttggtaagctgagtttttggtttaggaatattaaaataaaattatttttcaattaaaggataccgtagagttgcgagaacaccattgggttcctcgcaaggcttttcttgacaatggaccaaagacgatcaatcaaattcgtcaagatgcagtaaaagtaagattgggttttgttttgtttgtcacatagactctgtgtgtgtagaatagaatgggtttcctcctcacccaccccaaacgcttgaggggtctgtctcatcttagtggtggagcttaatgtttttagtgtctcgtcttccacttttatttttttattttttgagacggagtttcgcactgtcacccaggctggagtgcagtggcgcattctcgattcactgcagcctctgcctcccaggttcaagtgattctcctgcttcagcctccccagtagctgggactataggcgtgcgccaccacaccccgctaattttttgtatttttagtagagacagggttccaccatgttggccaggcttgtcttgaactcctgacctcatgcaaaccaaggcttgggcctcccaaagtcgggggattacagatgtgagccatcatgcccagccttgtctgccatttttggaagaagttatttacagaaataacataaattatggtttaatattcta

SEQ ID NO: 1642 - DNA, 6000 bp, Homo sapiens
agcgccagcagtgagtcggagctctatggaggtggcagcgggtaccgagtggcggctgcagcagcgactcctctgagctgagtttgaggccgtccccgactccttcctcccccttccctcccccttttttttgttttccgttcccctttcccctcccttccctatccccgacgaccggatcctgaggaggcagctgcggtggcagctgctgagttctcggtgaaggtgagttgagccgctgccgccgccgagtggagcgctctaaaatggccgccgtccctggtcgcttcttctcgagtggtacaaaatggcggccgcaggcggagccgggtggggcgacccttttttagcatttcctctgcgcttcagatacctggaaagtcttggcttttgttctctcttcctgttgctgacggagtagaaggaaaacgtcagtgttggccaggccgccgtgcggtcatggccggatggccgacgcctgcagggacgaggccgtggcggaccgaggcacggctgtgctcggacggcgagggagcgtggctcggaccgctagcgccgtggcgggaggcacgcgggccggcagggaaggccaggccgttggcgcgggaccagggaaccgcaggcgtcccggagcctggcctcccggcggggaggtgtgtaggacctggagtcggcaggggctgcccttcgtcggggaggaaagagagagtgatgatttctgccccttttgtcagcagaggaggccgtggcgaggcggttgtcagtcccggggggatttatggtgcaggagggggcccgcttggaggcggcgggtgggcaggaggccgccttcctgcttggagaacaaagagctgggcgccgggctggcgggggtggcctcagctgctcctccccgtcgagcgacccgggcctcgcggggaggttgtcggaagcacttccctaacttgcgcctgggtgggaggaatgctccgctcttttgttcccaggaagggaaaaacggggcggaggttcctgctgccatgttgtggccctggtcttccgcctgcaagtgctagtcctgtacacccggccccctctcgcgcgtctttccacgagctctccacggggaggaggcgaaagggtggacaggggaaaactgctgaagagctttcggagagacctcatctagtcgctggcctcgtcaaggcagtaaaaattcctagggcagacattttccacgtgatgttgctcgtgtctgtagttagacttttctattgatctcagtgctcagttttaaagatagtagaatgtggctttttcaaaagattcgttctgagccgtttaaaatgctcttgtgttctacgaagtctctttgcatccttgaacaccggggaatttccaggtggctaaacaaaatgtaattgtcagtgttttgagtacattttaggttagtcttacagatctgcaatgcagtgacagtgccaggatctgaaatacgttgtaattgaatgaaggcttatagatctgtatgttagcagtgtctaattttggtgctctttctcgttccaggtatttcatttctcctgtcccctcccctccccaccccatctattaatattattcttttgaagattcttcgttgtcaagccgccaaagtggagagtgcgattgcagaagggggtgcttctcgtttcaggtacttgtagatttattttggggaatccttttgaaaaggccagtctcaaaaagtagttaacacagcaaataagtccgacttaatgggctgcaattttcatttgaaaagttcttaagttttcattgacagccttctaagaactgccatctgaagaataaataaaatcaattatttgcctttcctttgggtccgagttcagtcttcatttgtagcataatatacaagcactaaaatacaggcctggctccagtctgggcaaaatagcgagacccccatctctacaagcaaagcaaaacacaaaatagatgcttattctttttgagtgagacatagttgggatacagtaaacaatttttttcttttaaatagtgcttcttcgggcggaggaggaagtaggggtgcacctcagcactatcccaagactgctggcaacaggtgtggtaaacatgtaaaaaaacagtgagctttatttaacagattaaaagtctttcccatgtgacggtataattaaggcaatagccatcaagactcctaatcttaaggggcgtggtttctgttgggtatcctaaatacagaatatcagttcctgattattccttagccaaattttctaagtgagttgagactctcaagctgttatttttttccttattctttgggttatttttactaatgtgtttttctgaaatcagtagctattattcctactgattgttattagtaaagtagtacgcactcaacatggtcaataaaacattagaaagtgtttattggcagccggtacagtggctcacacctgtaatcccaacaacaactttgggaggcaaaggtgggagggtcgcttgaacccaagagtttgagatcagcctgggcaagacagcaagaccccatctcttaaaaaaaatgttaattttcaaaatgtggttccacagcgttgatactgggaatatttactagacatgcaaattcttaggccccaccccaaaccagtgaaagcagaaactgggtgggcccagcaatctgtattaacaagcccttcaggtgattctgatgcacactactgttccagaagcactaatttccagagttggctttcttggaggggaagtcgagaaagcctaaattacttttttctatgtaagagaatttatgatgtttaacatttggtgtgtgacaataagtgtttttgctgatttttattaatcagcgagttcctggggaaaaccccagggcaaaacgctcagaaatggattcctgcacgaagcactagacgagatgacaactccgcagcaaacaactccgcaaacgaaaaagaacgacatgatgcaatcttcaggaaagtaagagggtaagtttcaaggtctgttttactaaaagatgggaagtgtggattagctgtgtttggtgtgtgtgctgtattactaagaaggcaaggttcatgcccagagtatgtatgttttaatgaatcctcatggtagcaatttttaaaaatatcttgaactggccaggcactgtggctcacgcctgtaatcccagcactttgggaggccgaggtgggcagatcacttgaggtcaggagtttgagaccagcctggccaacatgttgaaaccccatctctactaaaaatacaaaaattagccggacgtagtggcaggcgcctgtagtcccagctactagagaggctgaggcaggagaatcacttgaataccccacaggtggaggttgcagtgagccgagatcacgccactgcactccagcctgggtgcagagcaagactgtgtctcaaaaaaaaaaaatgtatcttgaactgaagaacagcacgtcatattttggggcttcccgttgctttcagccattggattgcaatccataatcctgtcatgctagcatttcccttgactaagggaagtgctatgttatttaagccagtgaggcagggaatataatggtcttagttcatggtctagccttgataatgagatctttgcgctctaaccttgagaaagtgagaaaggattcttgtcaaacagctggggaccccccagtccaattcaaatcattgtaattaaaataacaggtttatttcagcatccctttggttttagatgagtaagaaaacatgtcttgattttttaaagggagcaagttagaagaaaaatcagtataatttaaaagcagtttttcaattcaaattctgtgtattagctaacacttaaaatgtaattcctttttctccagcatactaaataagcttactcctgaaaagtttgacaagctatgccttgagctcctcaatgtgggtgtagagtctaaactcatccttaaaggggtcatactgctggtaagttttaaatattggcttaactcaaaagggagagggaactgtttaacaaactcaagttgtgtttttttacacttggattactacttaaaacccttaggtgtgagttagataggtatgtatttttgaatactgatggtgattaaaaagaaccactgactttagtagcattagattgaagaggtaaatgttaagttcatggtatggttgaagaggtaaatgggagtgcttagcaagctgttctttttcttttgtggaaaacaccgtatttaggtcttggaaatgcattgtatgacagtttatgtagacttgaaagttttgatatccatggcattttctgactcccaggagatggatgtgactagatgaaatctgtataactggacatttttggtagactgtaatagctaacatttaggtggttgtatttttcctaaaggaagggttcttggagaagttttcatatttagtttaagcaatgacattttctgtagattgtggacaaagccctagaagagccaaagtatagctcactgtatgctcagctatgtctgcgattggcagaagatgcaccaaactttgatggcccagcagcagagggtcaaccaggacagaagcaaagcaccgtaagtggtagtttttgtttgcttgttttaaagttgacttgaaaaatttccttaataaagcatgacaatgtcttcttttccagacattcagacgcctcctaatttccaaattacaagatgaatttgaaaaccgaactagaaatgttgatggtaagacttatagctgataataagtactactgtatattttcagcttaattctgaatgttggcttacttcattggtatctttttcagtctatgataagcgtgaaaatcccctcctccccgaggaggaggaacagagagccattgctaagatcaagatgttgggaaacatcaaattcattggagagcttggcaagcttgatcttattcacgaatctatccttcataagtgcatcaaaacagtaagtgtgacagggaagttaggcgaatgtagtcagtcgtttggaggaaatgagtcaattattcatctaagagggaggttgactagttaaatacagatgtgcaacaaaatttactaaacagaataatttgaaatacgtggtgtgtttgacaaagtagagttagaactgatcaaccagactggtagaaagccctatactagattctgtaggaactgtgaatgagtcagtgcaaacataaagggaaagaaagtactacgcctaaaccagagtaactaaaactttgtcaccatggccttttattcttgtagcttttggaaaagaagaagagagtccaactcaaagatatgggagaggatttggagtgcctctgtcagataatgaggacagtgggacctagattagaccatgaacgagccaaggtacgtgtgtagctgatgaaagtagtacaagtagtttgtctttaaatcaagctattgatttttgtgacatcataagggattgccatatttagccattaactgggttataattttagaagtcttaaagctgtaaattgaacacatttgctttagctcttccaatgaatgtattcttctcttatcagtccttaatggatcagtactttgcccgaatgtgctccttgatgttaagtaaggaattgccagcaaggattcgtttcctgctgcaggtaatactggtttctttaaatttgttggtaagctgagtttttggtttaggaatattaaaataaaattatttttcaattaaaggataccgtagagttgcgagaacaccattgggttcctcgcaaggcttttcttgacaatggaccaaagacgatcaatcaaattcgtcaagatgcagtaaaagtaagattgggttttgttttgtttgtcacatagactctgtgtgtgtagaatagaatgggtttcctcctcacccaccccaaacgcttgaggggtctgtctc

SEQ ID NO: 1643 - DNA, 6000 bp, Homo sapiens
catcaatacattacctggtaagtataaatagttcaacttgccggctttgaaaagcttaatcctatttcttatggtgaaccttaaataaaatgaaaatacacaactgacaatgtttaacgtgcacttaaacaaacaaaaaacaaaaaaaaacaggagctagcaattcgaaatcctccaaacacccgcggaagtctgacacacagggtgttttcctcggtgaccgccagccggacattcctatgggaaaagcagcttcttctgtgcggttcgaagaaaatcaaccccttcctttcatcactttctcattcactctgcagggggtgggccaataaggagctgaatgaagctcccctttggcatccgggcgcacgtctcgcctcctccccactactttctgggttccctaaggctgccgaagccgaggacctggagccgggtagtgtcccggcgctgcgcccgggggctccaggcctcaacccgaagggctcagccccgggagaggccaggcacgcgagggcagccacagctccaaggggcgccaagaaaagcaatgctcactcgccacgcacagggttcgggggaggtaagggtgcgttttcttcccatattcccggtgagaaaacgaggtcgagggaaaaggggatgatacaactggagcatggcatatggactcagtgaacaaagggactggagcaagaagcagcagccacgccaacgcagactcaaaagggctctccggctttacgcacgcaaccctcatctcgacagcgctcggcgccccttacgccactggctcagcctcagagacttcgcgaatatggctttgcgcactgcggcggggctgcgccgcaaccgagctcagccctgtggctcctcctcgctgccctgcgcggattggtggcagacggcaaccgggccgctgattgggcggcgaaggagccattcggggagactctggtgggttcggctgccccaagagtgataagttcggcttcagacacgccttagcgccagcagtgagtcggagctctatggaggtggcagcgggtaccgagtggcggctgcagcagcgactcctctgagctgagtttgaggccgtccccgactccttcctcccccttccctcccccttttttttgttttccgttcccctttcccctcccttccctatccccgacgaccggatcctgaggaggcagctgcggtggcagctgctgagttctcggtgaaggtgagttgagccgctgccgccgccgagtggagcgctctaaaatggccgccgtccctggtcgcttcttctcgagtggtacaaaatggcggccgcaggcggagccgggtggggcgacccttttttagcatttcctctgcgcttcagatacctggaaagtcttggcttttgttctctcttcctgttgctgacggagtagaaggaaaacgtcagtgttggccaggccgccgtgcggtcatggccggatggccgacgcctgcagggacgaggccgtggcggaccgaggcacggctgtgctcggacggcgagggagcgtggctcggaccgctagcgccgtggcgggaggcacgcgggccggcagggaaggccaggccgttggcgcgggaccagggaaccgcaggcgtcccggagcctggcctcccggcggggaggtgtgtaggacctggagtcggcaggggctgcccttcgtcggggaggaaagagagagtgatgatttctgccccttttgtcagcagaggaggccgtggcgaggcggttgtcagtcccggggggatttatggtgcaggagggggcccgcttggaggcggcgggtgggcaggaggccgccttcctgcttggagaacaaagagctgggcgccgggctggcgggggtggcctcagctgctcctccccgtcgagcgacccgggcctcgcggggaggttgtcggaagcacttccctaacttgcgcctgggtgggaggaatgctccgctcttttgttcccaggaagggaaaaacggggcggaggttcctgctgccatgttgtggccctggtcttccgcctgcaagtgctagtcctgtacacccggccccctctcgcgcgtctttccacgagctctccacggggaggaggcgaaagggtggacaggggaaaactgctgaagagctttcggagagacctcatctagtcgctggcctcgtcaaggcagtaaaaattcctagggcagacattttccacgtgatgttgctcgtgtctgtagttagacttttctattgatctcagtgctcagttttaaagatagtagaatgtggctttttcaaaagattcgttctgagccgtttaaaatgctcttgtgttctacgaagtctctttgcatccttgaacaccggggaatttccaggtggctaaacaaaatgtaattgtcagtgttttgagtacattttaggttagtcttacagatctgcaatgcagtgacagtgccaggatctgaaatacgttgtaattgaatgaaggcttatagatctgtatgttagcagtgtctaattttggtgctctttctcgttccaggtatttcatttctcctgtcccctcccctccccaccccatctattaatattattcttttgaagattcttcgttgtcaagccgccaaagtggagagtgcgattgcagaagggggtgcttctcgtttcaggtacttgtagatttattttggggaatccttttgaaaaggccagtctcaaaaagtagttaacacagcaaataagtccgacttaatgggctgcaattttcatttgaaaagttcttaagttttcattgacagccttctaagaactgccatctgaagaataaataaaatcaattatttgcctttcctttgggtccgagttcagtcttcatttgtagcataatatacaagcactaaaatacaggcctggctccagtctgggcaaaatagcgagacccccatctctacaagcaaagcaaaacacaaaatagatgcttattctttttgagtgagacatagttgggatacagtaaacaatttttttcttttaaatagtgcttcttcgggcggaggaggaagtaggggtgcacctcagcactatcccaagactgctggcaacaggtgtggtaaacatgtaaaaaaacagtgagctttatttaacagattaaaagtctttcccatgtgacggtataattaaggcaatagccatcaagactcctaatcttaaggggcgtggtttctgttgggtatcctaaatacagaatatcagttcctgattattccttagccaaattttctaagtgagttgagactctcaagctgttatttttttccttattctttgggttatttttactaatgtgtttttctgaaatcagtagctattattcctactgattgttattagtaaagtagtacgcactcaacatggtcaataaaacattagaaagtgtttattggcagccggtacagtggctcacacctgtaatcccaacaacaactttgggaggcaaaggtgggagggtcgcttgaacccaagagtttgagatcagcctgggcaagacagcaagaccccatctcttaaaaaaaatgttaattttcaaaatgtggttccacagcgttgatactgggaatatttactagacatgcaaattcttaggccccaccccaaaccagtgaaagcagaaactgggtgggcccagcaatctgtattaacaagcccttcaggtgattctgatgcacactactgttccagaagcactaatttccagagttggctttcttggaggggaagtcgagaaagcctaaattacttttttctatgtaagagaatttatgatgtttaacatttggtgtgtgacaataagtgtttttgctgatttttattaatcagcgagttcctggggaaaaccccagggcaaaacgctcagaaatggattcctgcacgaagcactagacgagatgacaactccgcagcaaacaactccgcaaacgaaaaagaacgacatgatgcaatcttcaggaaagtaagagggtaagtttcaaggtctgttttactaaaagatgggaagtgtggattagctgtgtttggtgtgtgtgctgtattactaagaaggcaaggttcatgcccagagtatgtatgttttaatgaatcctcatggtagcaatttttaaaaatatcttgaactggccaggcactgtggctcacgcctgtaatcccagcactttgggaggccgaggtgggcagatcacttgaggtcaggagtttgagaccagcctggccaacatgttgaaaccccatctctactaaaaatacaaaaattagccggacgtagtggcaggcgcctgtagtcccagctactagagaggctgaggcaggagaatcacttgaataccccacaggtggaggttgcagtgagccgagatcacgccactgcactccagcctgggtgcagagcaagactgtgtctcaaaaaaaaaaaatgtatcttgaactgaagaacagcacgtcatattttggggcttcccgttgctttcagccattggattgcaatccataatcctgtcatgctagcatttcccttgactaagggaagtgctatgttatttaagccagtgaggcagggaatataatggtcttagttcatggtctagccttgataatgagatctttgcgctctaaccttgagaaagtgagaaaggattcttgtcaaacagctggggaccccccagtccaattcaaatcattgtaattaaaataacaggtttatttcagcatccctttggttttagatgagtaagaaaacatgtcttgattttttaaagggagcaagttagaagaaaaatcagtataatttaaaagcagtttttcaattcaaattctgtgtattagctaacacttaaaatgtaattcctttttctccagcatactaaataagcttactcctgaaaagtttgacaagctatgccttgagctcctcaatgtgggtgtagagtctaaactcatccttaaaggggtcatactgctggtaagttttaaatattggcttaactcaaaagggagagggaactgtttaacaaactcaagttgtgtttttttacacttggattactacttaaaacccttaggtgtgagttagataggtatgtatttttgaatactgatggtgattaaaaagaaccactgactttagtagcattagattgaagaggtaaatgttaagttcatggtatggttgaagaggtaaatgggagtgcttagcaagctgttctttttcttttgtggaaaacaccgtatttaggtcttggaaatgcattgtatgacagtttatgtagacttgaaagttttgatatccatggcattttctgactcccaggagatggatgtgactagatgaaatctgtataactggacatttttggtagactgtaatagctaacatttaggtggttgtatttttcctaaaggaagggttcttggagaagttttcatatttagtttaagcaatgacattttctgtagattgtggacaaagccctagaagagccaaagtatagctcactgtatgctcagctatgtctgcgattggcagaagatgcaccaaactttgatggcccagcagcagagggtcaaccaggacagaagcaaagcaccgtaagtggtagtttttgtttgcttgttttaaagttgacttgaaaaatttccttaataaagcatgacaatgtcttcttttccagacattcagacgcctcctaatttccaaattacaagatgaatttgaaaaccgaactagaaatgttgatggtaagacttatagctgataataagtactactgtatattttcagcttaattctgaatgttggcttacttcattggtatctttttcagtctatgataagcgtgaaaatcccctcctccccgaggaggaggaacagagagccattgctaagatcaagatgttgggaaacatcaaattcattggagagcttggcaagcttgatct

SEQ ID NO: 1644 - DNA, 6000 bp, Homo sapiens
cttcaaatctttctatttaagtgagagaaaggtaattgaaagattgttttatcaatatttttactttttctaccttaggttattcccttccaggtcaatttctcacataaactcatatctgcaaagcccataccaaaagggttcccaattagcaaagattaaataaaatattaagtaaaaccttttttaaatttttaattactgaattttaagtgtcttaattataagaacatccgacttttacggctaggtgaatattctctttgaagtctagacaatagtttttgaatactactcttcttagtaaactaatgtattcgttcattatcagataaatggaatgtaaaccagttatgtaaaaatatcacatatactaatgcatttttccaaaccttaaagccctacagaaattataaagaaacattattctcgtgttatcatgaagctagaagggtccaaagaaatacaaagtgaaacctcttgtatttaaaacaaaacttgcaccaccaccaccaccccaaaatagtttttttttttttttagaatatctcttccaagttttaaagttcaagtaaaattgatgtaatagcaataagtgtagtaacagtaaagtagggaatggtgactattctatagcaaagatctacagatgttggaattgtgttaaaaaccttcagagccacaccacagccttctattacatttaaatgtcgtaggaaaaactgcaattttccggaaaattgtattaaggaccaggtgctctaataccaagagctgttttgacacatcaaaggttaagtttgggtctttgaaaatcctgcctcttactgaacactttaaaagtcattcatgttaaaacacacacattcttgcctttgactatacactgtaaaagtactacatgttaaaatggagatggggacatttttgttgtttaagtttatggaagtatgactccattttagtatagctacaatgtcgcaaacgatggaataaggtactcatcaatacattacctggtaagtataaatagttcaacttgccggctttgaaaagcttaatcctatttcttatggtgaaccttaaataaaatgaaaatacacaactgacaatgtttaacgtgcacttaaacaaacaaaaaacaaaaaaaaacaggagctagcaattcgaaatcctccaaacacccgcggaagtctgacacacagggtgttttcctcggtgaccgccagccggacattcctatgggaaaagcagcttcttctgtgcggttcgaagaaaatcaaccccttcctttcatcactttctcattcactctgcagggggtgggccaataaggagctgaatgaagctcccctttggcatccgggcgcacgtctcgcctcctccccactactttctgggttccctaaggctgccgaagccgaggacctggagccgggtagtgtcccggcgctgcgcccgggggctccaggcctcaacccgaagggctcagccccgggagaggccaggcacgcgagggcagccacagctccaaggggcgccaagaaaagcaatgctcactcgccacgcacagggttcgggggaggtaagggtgcgttttcttcccatattcccggtgagaaaacgaggtcgagggaaaaggggatgatacaactggagcatggcatatggactcagtgaacaaagggactggagcaagaagcagcagccacgccaacgcagactcaaaagggctctccggctttacgcacgcaaccctcatctcgacagcgctcggcgccccttacgccactggctcagcctcagagacttcgcgaatatggctttgcgcactgcggcggggctgcgccgcaaccgagctcagccctgtggctcctcctcgctgccctgcgcggattggtggcagacggcaaccgggccgctgattgggcggcgaaggagccattcggggagactctggtgggttcggctgccccaagagtgataagttcggcttcagacacgccttagcgccagcagtgagtcggagctctatggaggtggcagcgggtaccgagtggcggctgcagcagcgactcctctgagctgagtttgaggccgtccccgactccttcctcccccttccctcccccttttttttgttttccgttcccctttcccctcccttccctatccccgacgaccggatcctgaggaggcagctgcggtggcagctgctgagttctcggtgaaggtgagttgagccgctgccgccgccgagtggagcgctctaaaatggccgccgtccctggtcgcttcttctcgagtggtacaaaatggcggccgcaggcggagccgggtggggcgacccttttttagcatttcctctgcgcttcagatacctggaaagtcttggcttttgttctctcttcctgttgctgacggagtagaaggaaaacgtcagtgttggccaggccgccgtgcggtcatggccggatggccgacgcctgcagggacgaggccgtggcggaccgaggcacggctgtgctcggacggcgagggagcgtggctcggaccgctagcgccgtggcgggaggcacgcgggccggcagggaaggccaggccgttggcgcgggaccagggaaccgcaggcgtcccggagcctggcctcccggcggggaggtgtgtaggacctggagtcggcaggggctgcccttcgtcggggaggaaagagagagtgatgatttctgccccttttgtcagcagaggaggccgtggcgaggcggttgtcagtcccggggggatttatggtgcaggagggggcccgcttggaggcggcgggtgggcaggaggccgccttcctgcttggagaacaaagagctgggcgccgggctggcgggggtggcctcagctgctcctccccgtcgagcgacccgggcctcgcggggaggttgtcggaagcacttccctaacttgcgcctgggtgggaggaatgctccgctcttttgttcccaggaagggaaaaacggggcggaggttcctgctgccatgttgtggccctggtcttccgcctgcaagtgctagtcctgtacacccggccccctctcgcgcgtctttccacgagctctccacggggaggaggcgaaagggtggacaggggaaaactgctgaagagctttcggagagacctcatctagtcgctggcctcgtcaaggcagtaaaaattcctagggcagacattttccacgtgatgttgctcgtgtctgtagttagacttttctattgatctcagtgctcagttttaaagatagtagaatgtggctttttcaaaagattcgttctgagccgtttaaaatgctcttgtgttctacgaagtctctttgcatccttgaacaccggggaatttccaggtggctaaacaaaatgtaattgtcagtgttttgagtacattttaggttagtcttacagatctgcaatgcagtgacagtgccaggatctgaaatacgttgtaattgaatgaaggcttatagatctgtatgttagcagtgtctaattttggtgctctttctcgttccaggtatttcatttctcctgtcccctcccctccccaccccatctattaatattattcttttgaagattcttcgttgtcaagccgccaaagtggagagtgcgattgcagaagggggtgcttctcgtttcaggtacttgtagatttattttggggaatccttttgaaaaggccagtctcaaaaagtagttaacacagcaaataagtccgacttaatgggctgcaattttcatttgaaaagttcttaagttttcattgacagccttctaagaactgccatctgaagaataaataaaatcaattatttgcctttcctttgggtccgagttcagtcttcatttgtagcataatatacaagcactaaaatacaggcctggctccagtctgggcaaaatagcgagacccccatctctacaagcaaagcaaaacacaaaatagatgcttattctttttgagtgagacatagttgggatacagtaaacaatttttttcttttaaatagtgcttcttcgggcggaggaggaagtaggggtgcacctcagcactatcccaagactgctggcaacaggtgtggtaaacatgtaaaaaaacagtgagctttatttaacagattaaaagtctttcccatgtgacggtataattaaggcaatagccatcaagactcctaatcttaaggggcgtggtttctgttgggtatcctaaatacagaatatcagttcctgattattccttagccaaattttctaagtgagttgagactctcaagctgttatttttttccttattctttgggttatttttactaatgtgtttttctgaaatcagtagctattattcctactgattgttattagtaaagtagtacgcactcaacatggtcaataaaacattagaaagtgtttattggcagccggtacagtggctcacacctgtaatcccaacaacaactttgggaggcaaaggtgggagggtcgcttgaacccaagagtttgagatcagcctgggcaagacagcaagaccccatctcttaaaaaaaatgttaattttcaaaatgtggttccacagcgttgatactgggaatatttactagacatgcaaattcttaggccccaccccaaaccagtgaaagcagaaactgggtgggcccagcaatctgtattaacaagcccttcaggtgattctgatgcacactactgttccagaagcactaatttccagagttggctttcttggaggggaagtcgagaaagcctaaattacttttttctatgtaagagaatttatgatgtttaacatttggtgtgtgacaataagtgtttttgctgatttttattaatcagcgagttcctggggaaaaccccagggcaaaacgctcagaaatggattcctgcacgaagcactagacgagatgacaactccgcagcaaacaactccgcaaacgaaaaagaacgacatgatgcaatcttcaggaaagtaagagggtaagtttcaaggtctgttttactaaaagatgggaagtgtggattagctgtgtttggtgtgtgtgctgtattactaagaaggcaaggttcatgcccagagtatgtatgttttaatgaatcctcatggtagcaatttttaaaaatatcttgaactggccaggcactgtggctcacgcctgtaatcccagcactttgggaggccgaggtgggcagatcacttgaggtcaggagtttgagaccagcctggccaacatgttgaaaccccatctctactaaaaatacaaaaattagccggacgtagtggcaggcgcctgtagtcccagctactagagaggctgaggcaggagaatcacttgaataccccacaggtggaggttgcagtgagccgagatcacgccactgcactccagcctgggtgcagagcaagactgtgtctcaaaaaaaaaaaatgtatcttgaactgaagaacagcacgtcatattttggggcttcccgttgctttcagccattggattgcaatccataatcctgtcatgctagcatttcccttgactaagggaagtgctatgttatttaagccagtgaggcagggaatataatggtcttagttcatggtctagccttgataatgagatctttgcgctctaaccttgagaaagtgagaaaggattcttgtcaaacagctggggaccccccagtccaattcaaatcattgtaattaaaataacaggtttatttcagcatccctttggttttagatgagtaagaaaacatgtcttgattttttaaagggagcaagttagaagaaaaatcagtataatttaaaagcagtttttcaattcaaattctgtgtattagctaacacttaaaatgtaattcctttttctccagcatactaaataagcttactcctgaaaagtttgacaagctatgccttgagctcctcaatgtgggtgtagagtctaaact

SEQ ID NO: 1645 - DNA, 6000 bp, Homo sapiens
ctgagctcaagctacccacctgcttcagtctccaaaagagctgggattgcaggcatcagccaccatgcctagcattttattttttttgagacaggatctcactctactgccctggctggagtgcagtggcgtgaccatggcttagtgcagcctcaaagtcctgggcttaagggattcgcccatgtcagcctcccaagtagctgggactacagatgcatgtcaccacatctggattaatttttaattttagagatgggggggtctccctatgttgcccagattggtctccaactcctgggctcaaagaatcctcccagcttggcctccaaaagtgctgctgaattttcatatatccatgacgtgatggaaacatttagaaagtttcaatgtttatttccctcacttaaatatatttcgatttgaaaaaaaactattgtctagacttcaaagagtatattcatctagccctaaaagctagatgttcttataattaagacacttaaaattcaataattaaaaattttttacactgggcacagtggctcacacctgtaatcccagtattttgggaggcccagacgggtggatcacttgaggtcaggagtttgagaccagtctgggcaacatggtgaaaccccatctcaagtagaaatacaaaaattagctgggcgtggtggcacatgcttgtaatcccagctactcaggaggctgaggcacgagaactgcttgaacccaggaggtggaggctgcagtgtgcagagatcacaccactacactccagcctgagtgacaaagtgagactctgtctcaaaaaaaaatttttttttctaaaggttttacttaatgtttttatttaatctttgctaattgtgaacccttctgcaatgggctttgcaggtacgatttcaacttcaaatctttctatttaagtgagagaaaggtaattgaaagattgttttatcaatatttttactttttctaccttaggttattcccttccaggtcaatttctcacataaactcatatctgcaaagcccataccaaaagggttcccaattagcaaagattaaataaaatattaagtaaaaccttttttaaatttttaattactgaattttaagtgtcttaattataagaacatccgacttttacggctaggtgaatattctctttgaagtctagacaatagtttttgaatactactcttcttagtaaactaatgtattcgttcattatcagataaatggaatgtaaaccagttatgtaaaaatatcacatatactaatgcatttttccaaaccttaaagccctacagaaattataaagaaacattattctcgtgttatcatgaagctagaagggtccaaagaaatacaaagtgaaacctcttgtatttaaaacaaaacttgcaccaccaccaccaccccaaaatagtttttttttttttttagaatatctcttccaagttttaaagttcaagtaaaattgatgtaatagcaataagtgtagtaacagtaaagtagggaatggtgactattctatagcaaagatctacagatgttggaattgtgttaaaaaccttcagagccacaccacagccttctattacatttaaatgtcgtaggaaaaactgcaattttccggaaaattgtattaaggaccaggtgctctaataccaagagctgttttgacacatcaaaggttaagtttgggtctttgaaaatcctgcctcttactgaacactttaaaagtcattcatgttaaaacacacacattcttgcctttgactatacactgtaaaagtactacatgttaaaatggagatggggacatttttgttgtttaagtttatggaagtatgactccattttagtatagctacaatgtcgcaaacgatggaataaggtactcatcaatacattacctggtaagtataaatagttcaacttgccggctttgaaaagcttaatcctatttcttatggtgaaccttaaataaaatgaaaatacacaactgacaatgtttaacgtgcacttaaacaaacaaaaaacaaaaaaaaacaggagctagcaattcgaaatcctccaaacacccgcggaagtctgacacacagggtgttttcctcggtgaccgccagccggacattcctatgggaaaagcagcttcttctgtgcggttcgaagaaaatcaaccccttcctttcatcactttctcattcactctgcagggggtgggccaataaggagctgaatgaagctcccctttggcatccgggcgcacgtctcgcctcctccccactactttctgggttccctaaggctgccgaagccgaggacctggagccgggtagtgtcccggcgctgcgcccgggggctccaggcctcaacccgaagggctcagccccgggagaggccaggcacgcgagggcagccacagctccaaggggcgccaagaaaagcaatgctcactcgccacgcacagggttcgggggaggtaagggtgcgttttcttcccatattcccggtgagaaaacgaggtcgagggaaaaggggatgatacaactggagcatggcatatggactcagtgaacaaagggactggagcaagaagcagcagccacgccaacgcagactcaaaagggctctccggctttacgcacgcaaccctcatctcgacagcgctcggcgccccttacgccactggctcagcctcagagacttcgcgaatatggctttgcgcactgcggcggggctgcgccgcaaccgagctcagccctgtggctcctcctcgctgccctgcgcggattggtggcagacggcaaccgggccgctgattgggcggcgaaggagccattcggggagactctggtgggttcggctgccccaagagtgataagttcggcttcagacacgccttagcgccagcagtgagtcggagctctatggaggtggcagcgggtaccgagtggcggctgcagcagcgactcctctgagctgagtttgaggccgtccccgactccttcctcccccttccctcccccttttttttgttttccgttcccctttcccctcccttccctatccccgacgaccggatcctgaggaggcagctgcggtggcagctgctgagttctcggtgaaggtgagttgagccgctgccgccgccgagtggagcgctctaaaatggccgccgtccctggtcgcttcttctcgagtggtacaaaatggcggccgcaggcggagccgggtggggcgacccttttttagcatttcctctgcgcttcagatacctggaaagtcttggcttttgttctctcttcctgttgctgacggagtagaaggaaaacgtcagtgttggccaggccgccgtgcggtcatggccggatggccgacgcctgcagggacgaggccgtggcggaccgaggcacggctgtgctcggacggcgagggagcgtggctcggaccgctagcgccgtggcgggaggcacgcgggccggcagggaaggccaggccgttggcgcgggaccagggaaccgcaggcgtcccggagcctggcctcccggcggggaggtgtgtaggacctggagtcggcaggggctgcccttcgtcggggaggaaagagagagtgatgatttctgccccttttgtcagcagaggaggccgtggcgaggcggttgtcagtcccggggggatttatggtgcaggagggggcccgcttggaggcggcgggtgggcaggaggccgccttcctgcttggagaacaaagagctgggcgccgggctggcgggggtggcctcagctgctcctccccgtcgagcgacccgggcctcgcggggaggttgtcggaagcacttccctaacttgcgcctgggtgggaggaatgctccgctcttttgttcccaggaagggaaaaacggggcggaggttcctgctgccatgttgtggccctggtcttccgcctgcaagtgctagtcctgtacacccggccccctctcgcgcgtctttccacgagctctccacggggaggaggcgaaagggtggacaggggaaaactgctgaagagctttcggagagacctcatctagtcgctggcctcgtcaaggcagtaaaaattcctagggcagacattttccacgtgatgttgctcgtgtctgtagttagacttttctattgatctcagtgctcagttttaaagatagtagaatgtggctttttcaaaagattcgttctgagccgtttaaaatgctcttgtgttctacgaagtctctttgcatccttgaacaccggggaatttccaggtggctaaacaaaatgtaattgtcagtgttttgagtacattttaggttagtcttacagatctgcaatgcagtgacagtgccaggatctgaaatacgttgtaattgaatgaaggcttatagatctgtatgttagcagtgtctaattttggtgctctttctcgttccaggtatttcatttctcctgtcccctcccctccccaccccatctattaatattattcttttgaagattcttcgttgtcaagccgccaaagtggagagtgcgattgcagaagggggtgcttctcgtttcaggtacttgtagatttattttggggaatccttttgaaaaggccagtctcaaaaagtagttaacacagcaaataagtccgacttaatgggctgcaattttcatttgaaaagttcttaagttttcattgacagccttctaagaactgccatctgaagaataaataaaatcaattatttgcctttcctttgggtccgagttcagtcttcatttgtagcataatatacaagcactaaaatacaggcctggctccagtctgggcaaaatagcgagacccccatctctacaagcaaagcaaaacacaaaatagatgcttattctttttgagtgagacatagttgggatacagtaaacaatttttttcttttaaatagtgcttcttcgggcggaggaggaagtaggggtgcacctcagcactatcccaagactgctggcaacaggtgtggtaaacatgtaaaaaaacagtgagctttatttaacagattaaaagtctttcccatgtgacggtataattaaggcaatagccatcaagactcctaatcttaaggggcgtggtttctgttgggtatcctaaatacagaatatcagttcctgattattccttagccaaattttctaagtgagttgagactctcaagctgttatttttttccttattctttgggttatttttactaatgtgtttttctgaaatcagtagctattattcctactgattgttattagtaaagtagtacgcactcaacatggtcaataaaacattagaaagtgtttattggcagccggtacagtggctcacacctgtaatcccaacaacaactttgggaggcaaaggtgggagggtcgcttgaacccaagagtttgagatcagcctgggcaagacagcaagaccccatctcttaaaaaaaatgttaattttcaaaatgtggttccacagcgttgatactgggaatatttactagacatgcaaattcttaggccccaccccaaaccagtgaaagcagaaactgggtgggcccagcaatctgtattaacaagcccttcaggtgattctgatgcacactactgttccagaagcactaatttccagagttggctttcttggaggggaagtcgagaaagcctaaattacttttttctatgtaagagaatttatgatgtttaacatttggtgtgtgacaataagtgtttttgctgatttttattaatcagcgagttcctggggaaaaccccagggcaaaacgctcagaaatggattcctgcacgaagcactagacgagatgacaactccgcagcaaacaactccgcaaacgaaaaagaacgacatgatgcaatcttcaggaaagtaagagggtaagtttcaaggtctgttttactaaaagatgggaagtgtggattagctgtgtttggtgt

SEQ ID NO: 1646 - DNA, 6000 bp, Homo sapiens
ctgggctgaaggtaaatgattagggaattcataagcacagagaggatggtagatgcttccaaaacagtatgtgttagaatagtaaccagcacttgacatgattagttaaaataaggcaaaaatatatgagttaacaagttagtcaggacttagagaaaactgataaaactagcagtggaaaactagcagacttaagtgggtatatttaaaattcaattttcaatgaactaaaagctaaattccagacaatgactctgtgtgtgtgtgtgtgtttaagataggatttcgctctgttacccaggctggagtgcagtgacatgatcatggctcacttcagcctcgacctccagggctcaagccatcctactgcctcagcctcccaagtagctggtactacaggcatgtgggacacaggctaatttttgtattttttgtagagacaggttttcaccacgttgcccaggctagtctcaaactcctgagctcaagctacccacctgcttcagtctccaaaagagctgggattgcaggcatcagccaccatgcctagcattttattttttttgagacaggatctcactctactgccctggctggagtgcagtggcgtgaccatggcttagtgcagcctcaaagtcctgggcttaagggattcgcccatgtcagcctcccaagtagctgggactacagatgcatgtcaccacatctggattaatttttaattttagagatgggggggtctccctatgttgcccagattggtctccaactcctgggctcaaagaatcctcccagcttggcctccaaaagtgctgctgaattttcatatatccatgacgtgatggaaacatttagaaagtttcaatgtttatttccctcacttaaatatatttcgatttgaaaaaaaactattgtctagacttcaaagagtatattcatctagccctaaaagctagatgttcttataattaagacacttaaaattcaataattaaaaattttttacactgggcacagtggctcacacctgtaatcccagtattttgggaggcccagacgggtggatcacttgaggtcaggagtttgagaccagtctgggcaacatggtgaaaccccatctcaagtagaaatacaaaaattagctgggcgtggtggcacatgcttgtaatcccagctactcaggaggctgaggcacgagaactgcttgaacccaggaggtggaggctgcagtgtgcagagatcacaccactacactccagcctgagtgacaaagtgagactctgtctcaaaaaaaaatttttttttctaaaggttttacttaatgtttttatttaatctttgctaattgtgaacccttctgcaatgggctttgcaggtacgatttcaacttcaaatctttctatttaagtgagagaaaggtaattgaaagattgttttatcaatatttttactttttctaccttaggttattcccttccaggtcaatttctcacataaactcatatctgcaaagcccataccaaaagggttcccaattagcaaagattaaataaaatattaagtaaaaccttttttaaatttttaattactgaattttaagtgtcttaattataagaacatccgacttttacggctaggtgaatattctctttgaagtctagacaatagtttttgaatactactcttcttagtaaactaatgtattcgttcattatcagataaatggaatgtaaaccagttatgtaaaaatatcacatatactaatgcatttttccaaaccttaaagccctacagaaattataaagaaacattattctcgtgttatcatgaagctagaagggtccaaagaaatacaaagtgaaacctcttgtatttaaaacaaaacttgcaccaccaccaccaccccaaaatagtttttttttttttttagaatatctcttccaagttttaaagttcaagtaaaattgatgtaatagcaataagtgtagtaacagtaaagtagggaatggtgactattctatagcaaagatctacagatgttggaattgtgttaaaaaccttcagagccacaccacagccttctattacatttaaatgtcgtaggaaaaactgcaattttccggaaaattgtattaaggaccaggtgctctaataccaagagctgttttgacacatcaaaggttaagtttgggtctttgaaaatcctgcctcttactgaacactttaaaagtcattcatgttaaaacacacacattcttgcctttgactatacactgtaaaagtactacatgttaaaatggagatggggacatttttgttgtttaagtttatggaagtatgactccattttagtatagctacaatgtcgcaaacgatggaataaggtactcatcaatacattacctggtaagtataaatagttcaacttgccggctttgaaaagcttaatcctatttcttatggtgaaccttaaataaaatgaaaatacacaactgacaatgtttaacgtgcacttaaacaaacaaaaaacaaaaaaaaacaggagctagcaattcgaaatcctccaaacacccgcggaagtctgacacacagggtgttttcctcggtgaccgccagccggacattcctatgggaaaagcagcttcttctgtgcggttcgaagaaaatcaaccccttcctttcatcactttctcattcactctgcagggggtgggccaataaggagctgaatgaagctcccctttggcatccgggcgcacgtctcgcctcctccccactactttctgggttccctaaggctgccgaagccgaggacctggagccgggtagtgtcccggcgctgcgcccgggggctccaggcctcaacccgaagggctcagccccgggagaggccaggcacgcgagggcagccacagctccaaggggcgccaagaaaagcaatgctcactcgccacgcacagggttcgggggaggtaagggtgcgttttcttcccatattcccggtgagaaaacgaggtcgagggaaaaggggatgatacaactggagcatggcatatggactcagtgaacaaagggactggagcaagaagcagcagccacgccaacgcagactcaaaagggctctccggctttacgcacgcaaccctcatctcgacagcgctcggcgccccttacgccactggctcagcctcagagacttcgcgaatatggctttgcgcactgcggcggggctgcgccgcaaccgagctcagccctgtggctcctcctcgctgccctgcgcggattggtggcagacggcaaccgggccgctgattgggcggcgaaggagccattcggggagactctggtgggttcggctgccccaagagtgataagttcggcttcagacacgccttagcgccagcagtgagtcggagctctatggaggtggcagcgggtaccgagtggcggctgcagcagcgactcctctgagctgagtttgaggccgtccccgactccttcctcccccttccctcccccttttttttgttttccgttcccctttcccctcccttccctatccccgacgaccggatcctgaggaggcagctgcggtggcagctgctgagttctcggtgaaggtgagttgagccgctgccgccgccgagtggagcgctctaaaatggccgccgtccctggtcgcttcttctcgagtggtacaaaatggcggccgcaggcggagccgggtggggcgacccttttttagcatttcctctgcgcttcagatacctggaaagtcttggcttttgttctctcttcctgttgctgacggagtagaaggaaaacgtcagtgttggccaggccgccgtgcggtcatggccggatggccgacgcctgcagggacgaggccgtggcggaccgaggcacggctgtgctcggacggcgagggagcgtggctcggaccgctagcgccgtggcgggaggcacgcgggccggcagggaaggccaggccgttggcgcgggaccagggaaccgcaggcgtcccggagcctggcctcccggcggggaggtgtgtaggacctggagtcggcaggggctgcccttcgtcggggaggaaagagagagtgatgatttctgccccttttgtcagcagaggaggccgtggcgaggcggttgtcagtcccggggggatttatggtgcaggagggggcccgcttggaggcggcgggtgggcaggaggccgccttcctgcttggagaacaaagagctgggcgccgggctggcgggggtggcctcagctgctcctccccgtcgagcgacccgggcctcgcggggaggttgtcggaagcacttccctaacttgcgcctgggtgggaggaatgctccgctcttttgttcccaggaagggaaaaacggggcggaggttcctgctgccatgttgtggccctggtcttccgcctgcaagtgctagtcctgtacacccggccccctctcgcgcgtctttccacgagctctccacggggaggaggcgaaagggtggacaggggaaaactgctgaagagctttcggagagacctcatctagtcgctggcctcgtcaaggcagtaaaaattcctagggcagacattttccacgtgatgttgctcgtgtctgtagttagacttttctattgatctcagtgctcagttttaaagatagtagaatgtggctttttcaaaagattcgttctgagccgtttaaaatgctcttgtgttctacgaagtctctttgcatccttgaacaccggggaatttccaggtggctaaacaaaatgtaattgtcagtgttttgagtacattttaggttagtcttacagatctgcaatgcagtgacagtgccaggatctgaaatacgttgtaattgaatgaaggcttatagatctgtatgttagcagtgtctaattttggtgctctttctcgttccaggtatttcatttctcctgtcccctcccctccccaccccatctattaatattattcttttgaagattcttcgttgtcaagccgccaaagtggagagtgcgattgcagaagggggtgcttctcgtttcaggtacttgtagatttattttggggaatccttttgaaaaggccagtctcaaaaagtagttaacacagcaaataagtccgacttaatgggctgcaattttcatttgaaaagttcttaagttttcattgacagccttctaagaactgccatctgaagaataaataaaatcaattatttgcctttcctttgggtccgagttcagtcttcatttgtagcataatatacaagcactaaaatacaggcctggctccagtctgggcaaaatagcgagacccccatctctacaagcaaagcaaaacacaaaatagatgcttattctttttgagtgagacatagttgggatacagtaaacaatttttttcttttaaatagtgcttcttcgggcggaggaggaagtaggggtgcacctcagcactatcccaagactgctggcaacaggtgtggtaaacatgtaaaaaaacagtgagctttatttaacagattaaaagtctttcccatgtgacggtataattaaggcaatagccatcaagactcctaatcttaaggggcgtggtttctgttgggtatcctaaatacagaatatcagttcctgattattccttagccaaattttctaagtgagttgagactctcaagctgttatttttttccttattctttgggttatttttactaatgtgtttttctgaaatcagtagctattattcctactgattgttattagtaaagtagtacgcactcaacatggtcaataaaacattagaaagtgtttattggcagccggtacagtggctcacacctgtaatcccaacaacaactttgggaggcaaaggtgggagggtcgcttgaacccaagagtttgagatcagcctgggcaagacagcaagaccccatctcttaaaaaaaatgttaattttcaaaatgtggttccac

SEQ ID NO: 1647 - DNA, 6000 bp, Homo sapiens
acgtgccttacatacattatctcatttaatctttacaaccaccatataaatactactatcattccgattttacagttttagaaactgagtaagagtaattaaattatttgcccaaagttacacagtaaatggtagagaagacatttgacctcaactggtctaactacttttcctcataggaagatgaccagtttacatatggaatctgttgaatttgagcaaacaactcaaaaaagcaaaatggctatagaggccagatgggaacataaatgagtgaatcaagtcagatgcaactgtggagaaatcaaaacatcgagagaaggtagttctacttagttatgcttgaatgttgccctatgagaatttcaggcccagtattgccatattttaagatttttcatgaaaagatggaaatctggatttgtatgcaaaaatttgtgtgaatatcaaattcaagtgtttaaaactactgtggctcaaactatggcttcaagtttgcatctctgagcaaaaggctgttggaaattcagaactggatgtaaagtgagagatctgggctgaaggtaaatgattagggaattcataagcacagagaggatggtagatgcttccaaaacagtatgtgttagaatagtaaccagcacttgacatgattagttaaaataaggcaaaaatatatgagttaacaagttagtcaggacttagagaaaactgataaaactagcagtggaaaactagcagacttaagtgggtatatttaaaattcaattttcaatgaactaaaagctaaattccagacaatgactctgtgtgtgtgtgtgtgtttaagataggatttcgctctgttacccaggctggagtgcagtgacatgatcatggctcacttcagcctcgacctccagggctcaagccatcctactgcctcagcctcccaagtagctggtactacaggcatgtgggacacaggctaatttttgtattttttgtagagacaggttttcaccacgttgcccaggctagtctcaaactcctgagctcaagctacccacctgcttcagtctccaaaagagctgggattgcaggcatcagccaccatgcctagcattttattttttttgagacaggatctcactctactgccctggctggagtgcagtggcgtgaccatggcttagtgcagcctcaaagtcctgggcttaagggattcgcccatgtcagcctcccaagtagctgggactacagatgcatgtcaccacatctggattaatttttaattttagagatgggggggtctccctatgttgcccagattggtctccaactcctgggctcaaagaatcctcccagcttggcctccaaaagtgctgctgaattttcatatatccatgacgtgatggaaacatttagaaagtttcaatgtttatttccctcacttaaatatatttcgatttgaaaaaaaactattgtctagacttcaaagagtatattcatctagccctaaaagctagatgttcttataattaagacacttaaaattcaataattaaaaattttttacactgggcacagtggctcacacctgtaatcccagtattttgggaggcccagacgggtggatcacttgaggtcaggagtttgagaccagtctgggcaacatggtgaaaccccatctcaagtagaaatacaaaaattagctgggcgtggtggcacatgcttgtaatcccagctactcaggaggctgaggcacgagaactgcttgaacccaggaggtggaggctgcagtgtgcagagatcacaccactacactccagcctgagtgacaaagtgagactctgtctcaaaaaaaaatttttttttctaaaggttttacttaatgtttttatttaatctttgctaattgtgaacccttctgcaatgggctttgcaggtacgatttcaacttcaaatctttctatttaagtgagagaaaggtaattgaaagattgttttatcaatatttttactttttctaccttaggttattcccttccaggtcaatttctcacataaactcatatctgcaaagcccataccaaaagggttcccaattagcaaagattaaataaaatattaagtaaaaccttttttaaatttttaattactgaattttaagtgtcttaattataagaacatccgacttttacggctaggtgaatattctctttgaagtctagacaatagtttttgaatactactcttcttagtaaactaatgtattcgttcattatcagataaatggaatgtaaaccagttatgtaaaaatatcacatatactaatgcatttttccaaaccttaaagccctacagaaattataaagaaacattattctcgtgttatcatgaagctagaagggtccaaagaaatacaaagtgaaacctcttgtatttaaaacaaaacttgcaccaccaccaccaccccaaaatagtttttttttttttttagaatatctcttccaagttttaaagttcaagtaaaattgatgtaatagcaataagtgtagtaacagtaaagtagggaatggtgactattctatagcaaagatctacagatgttggaattgtgttaaaaaccttcagagccacaccacagccttctattacatttaaatgtcgtaggaaaaactgcaattttccggaaaattgtattaaggaccaggtgctctaataccaagagctgttttgacacatcaaaggttaagtttgggtctttgaaaatcctgcctcttactgaacactttaaaagtcattcatgttaaaacacacacattcttgcctttgactatacactgtaaaagtactacatgttaaaatggagatggggacatttttgttgtttaagtttatggaagtatgactccattttagtatagctacaatgtcgcaaacgatggaataaggtactcatcaatacattacctggtaagtataaatagttcaacttgccggctttgaaaagcttaatcctatttcttatggtgaaccttaaataaaatgaaaatacacaactgacaatgtttaacgtgcacttaaacaaacaaaaaacaaaaaaaaacaggagctagcaattcgaaatcctccaaacacccgcggaagtctgacacacagggtgttttcctcggtgaccgccagccggacattcctatgggaaaagcagcttcttctgtgcggttcgaagaaaatcaaccccttcctttcatcactttctcattcactctgcagggggtgggccaataaggagctgaatgaagctcccctttggcatccgggcgcacgtctcgcctcctccccactactttctgggttccctaaggctgccgaagccgaggacctggagccgggtagtgtcccggcgctgcgcccgggggctccaggcctcaacccgaagggctcagccccgggagaggccaggcacgcgagggcagccacagctccaaggggcgccaagaaaagcaatgctcactcgccacgcacagggttcgggggaggtaagggtgcgttttcttcccatattcccggtgagaaaacgaggtcgagggaaaaggggatgatacaactggagcatggcatatggactcagtgaacaaagggactggagcaagaagcagcagccacgccaacgcagactcaaaagggctctccggctttacgcacgcaaccctcatctcgacagcgctcggcgccccttacgccactggctcagcctcagagacttcgcgaatatggctttgcgcactgcggcggggctgcgccgcaaccgagctcagccctgtggctcctcctcgctgccctgcgcggattggtggcagacggcaaccgggccgctgattgggcggcgaaggagccattcggggagactctggtgggttcggctgccccaagagtgataagttcggcttcagacacgccttagcgccagcagtgagtcggagctctatggaggtggcagcgggtaccgagtggcggctgcagcagcgactcctctgagctgagtttgaggccgtccccgactccttcctcccccttccctcccccttttttttgttttccgttcccctttcccctcccttccctatccccgacgaccggatcctgaggaggcagctgcggtggcagctgctgagttctcggtgaaggtgagttgagccgctgccgccgccgagtggagcgctctaaaatggccgccgtccctggtcgcttcttctcgagtggtacaaaatggcggccgcaggcggagccgggtggggcgacccttttttagcatttcctctgcgcttcagatacctggaaagtcttggcttttgttctctcttcctgttgctgacggagtagaaggaaaacgtcagtgttggccaggccgccgtgcggtcatggccggatggccgacgcctgcagggacgaggccgtggcggaccgaggcacggctgtgctcggacggcgagggagcgtggctcggaccgctagcgccgtggcgggaggcacgcgggccggcagggaaggccaggccgttggcgcgggaccagggaaccgcaggcgtcccggagcctggcctcccggcggggaggtgtgtaggacctggagtcggcaggggctgcccttcgtcggggaggaaagagagagtgatgatttctgccccttttgtcagcagaggaggccgtggcgaggcggttgtcagtcccggggggatttatggtgcaggagggggcccgcttggaggcggcgggtgggcaggaggccgccttcctgcttggagaacaaagagctgggcgccgggctggcgggggtggcctcagctgctcctccccgtcgagcgacccgggcctcgcggggaggttgtcggaagcacttccctaacttgcgcctgggtgggaggaatgctccgctcttttgttcccaggaagggaaaaacggggcggaggttcctgctgccatgttgtggccctggtcttccgcctgcaagtgctagtcctgtacacccggccccctctcgcgcgtctttccacgagctctccacggggaggaggcgaaagggtggacaggggaaaactgctgaagagctttcggagagacctcatctagtcgctggcctcgtcaaggcagtaaaaattcctagggcagacattttccacgtgatgttgctcgtgtctgtagttagacttttctattgatctcagtgctcagttttaaagatagtagaatgtggctttttcaaaagattcgttctgagccgtttaaaatgctcttgtgttctacgaagtctctttgcatccttgaacaccggggaatttccaggtggctaaacaaaatgtaattgtcagtgttttgagtacattttaggttagtcttacagatctgcaatgcagtgacagtgccaggatctgaaatacgttgtaattgaatgaaggcttatagatctgtatgttagcagtgtctaattttggtgctctttctcgttccaggtatttcatttctcctgtcccctcccctccccaccccatctattaatattattcttttgaagattcttcgttgtcaagccgccaaagtggagagtgcgattgcagaagggggtgcttctcgtttcaggtacttgtagatttattttggggaatccttttgaaaaggccagtctcaaaaagtagttaacacagcaaataagtccgacttaatgggctgcaattttcatttgaaaagttcttaagttttcattgacagccttctaagaactgccatctgaagaataaataaaatcaattatttgcctttcctttgggtccgagttcagtcttcatttgtagcataatatacaagcactaaaatacaggcctggctccagtctgggcaaaatagcgagacccccatctctacaagcaaagcaaaacacaaaatagatgcttattctttttgagtgagacatagttgggatacagtaaacaatttttttcttttaaatagtgcttcttc

SEQ ID NO: 1648 - DNA, 6000 bp, Homo sapiens
attttaatattcctaaaccaaaaactcagcttaccaacaaatttaaagaaaccagtattacctgcagcaggaaacgaatccttgctggcaattccttacttaacatcaaggagcacattcgggcaaagtactgatccattaaggactgataagagaagaatacattcattggaagagctaaagcaaatgtgttcaatttacagctttaagacttctaaaattataacccagttaatggctaaatatggcaatcccttatgatgtcacaaaaatcaatagcttgatttaaagacaaactacttgtactactttcatcagctacacacgtaccttggctcgttcatggtctaatctaggtcccactgtcctcattatctgacagaggcactccaaatcctctcccatatctttgagttggactctcttcttcttttccaaaagctacaagaataaaaggccatggtgacaaagttttagttactctggtttaggcgtagtactttctttccctttatgtttgcactgactcattcacagttcctacagaatctagtatagggctttctaccagtctggttgatcagttctaactctactttgtcaaacacaccacgtatttcaaattattctgtttagtaaattttgttgcacatctgtatttaactagtcaacctccctcttagatgaataattgactcatttcctccaaacgactgactacattcgcctaacttccctgtcacacttactgttttgatgcacttatgaaggatagattcgtgaataagatcaagcttgccaagctctccaatgaatttgatgtttcccaacatcttgatcttagcaatggctctctgttcctcctcctcggggaggaggggattttcacgcttatcatagactgaaaaagataccaatgaagtaagccaacattcagaattaagctgaaaatatacagtagtacttattatcagctataagtcttaccatcaacatttctagttcggttttcaaattcatcttgtaatttggaaattaggaggcgtctgaatgtctggaaaagaagacattgtcatgctttattaaggaaatttttcaagtcaactttaaaacaagcaaacaaaaactaccacttacggtgctttgcttctgtcctggttgaccctctgctgctgggccatcaaagtttggtgcatcttctgccaatcgcagacatagctgagcatacagtgagctatactttggctcttctagggctttgtccacaatctacagaaaatgtcattgcttaaactaaatatgaaaacttctccaagaacccttcctttaggaaaaatacaaccacctaaatgttagctattacagtctaccaaaaatgtccagttatacagatttcatctagtcacatccatctcctgggagtcagaaaatgccatggatatcaaaactttcaagtctacataaactgtcatacaatgcatttccaagacctaaatacggtgttttccacaaaagaaaaagaacagcttgctaagcactcccatttacctcttcaaccataccatgaacttaacatttacctcttcaatctaatgctactaaagtcagtggttctttttaatcaccatcagtattcaaaaatacatacctatctaactcacacctaagggttttaagtagtaatccaagtgtaaaaaaacacaacttgagtttgttaaacagttccctctcccttttgagttaagccaatatttaaaacttaccagcagtatgacccctttaaggatgagtttagactctacacccacattgaggagctcaaggcatagcttgtcaaacttttcaggagtaagcttatttagtatgctggagaaaaaggaattacattttaagtgttagctaatacacagaatttgaattgaaaaactgcttttaaattatactgatttttcttctaacttgctccctttaaaaaatcaagacatgttttcttactcatctaaaaccaaagggatgctgaaataaacctgttattttaattacaatgatttgaattggactggggggtccccagctgtttgacaagaatcctttctcactttctcaaggttagagcgcaaagatctcattatcaaggctagaccatgaactaagaccattatattccctgcctcactggcttaaataacatagcacttcccttagtcaagggaaatgctagcatgacaggattatggattgcaatccaatggctgaaagcaacgggaagccccaaaatatgacgtgctgttcttcagttcaagatacattttttttttttgagacacagtcttgctctgcacccaggctggagtgcagtggcgtgatctcggctcactgcaacctccacctgtggggtattcaagtgattctcctgcctcagcctctctagtagctgggactacaggcgcctgccactacgtccggctaatttttgtatttttagtagagatggggtttcaacatgttggccaggctggtctcaaactcctgacctcaagtgatctgcccacctcggcctcccaaagtgctgggattacaggcgtgagccacagtgcctggccagttcaagatatttttaaaaattgctaccatgaggattcattaaaacatacatactctgggcatgaaccttgccttcttagtaatacagcacacacaccaaacacagctaatccacacttcccatcttttagtaaaacagaccttgaaacttaccctcttactttcctgaagattgcatcatgtcgttctttttcgtttgcggagttgtttgctgcggagttgtcatctcgtctagtgcttcgtgcaggaatccatttctgagcgttttgccctggggttttccccaggaactcgctgattaataaaaatcagcaaaaacacttattgtcacacaccaaatgttaaacatcataaattctcttacatagaaaaaagtaatttaggctttctcgacttcccctccaagaaagccaactctggaaattagtgcttctggaacagtagtgtgcatcagaatcacctgaagggcttgttaatacagattgctgggcccacccagtttctgctttcactggtttggggtggggcctaagaatttgcatgtctagtaaatattcccagtatcaacgctgtggaaccacattttgaaaattaacattttttttaagagatggggtcttgctgtcttgcccaggctgatctcaaactcttgggttcaagcgaccctcccacctttgcctcccaaagttgttgttgggattacaggtgtgagccactgtaccggctgccaataaacactttctaatgttttattgaccatgttgagtgcgtactactttactaataacaatcagtaggaataatagctactgatttcagaaaaacacattagtaaaaataacccaaagaataaggaaaaaaataacagcttgagagtctcaactcacttagaaaatttggctaaggaataatcaggaactgatattctgtatttaggatacccaacagaaaccacgccccttaagattaggagtcttgatggctattgccttaattataccgtcacatgggaaagacttttaatctgttaaataaagctcactgtttttttacatgtttaccacacctgttgccagcagtcttgggatagtgctgaggtgcacccctacttcctcctccgcccgaagaagcactatttaaaagaaaaaaattgtttactgtatcccaactatgtctcactcaaaaagaataagcatctattttgtgttttgctttgcttgtagagatgggggtctcgctattttgcccagactggagccaggcctgtattttagtgcttgtatattatgctacaaatgaagactgaactcggacccaaaggaaaggcaaataattgattttatttattcttcagatggcagttcttagaaggctgtcaatgaaaacttaagaacttttcaaatgaaaattgcagcccattaagtcggacttatttgctgtgttaactactttttgagactggccttttcaaaaggattccccaaaataaatctacaagtacctgaaacgagaagcacccccttctgcaatcgcactctccactttggcggcttgacaacgaagaatcttcaaaagaataatattaatagatggggtggggaggggaggggacaggagaaatgaaatacctggaacgagaaagagcaccaaaattagacactgctaacatacagatctataagccttcattcaattacaacgtatttcagatcctggcactgtcactgcattgcagatctgtaagactaacctaaaatgtactcaaaacactgacaattacattttgtttagccacctggaaattccccggtgttcaaggatgcaaagagacttcgtagaacacaagagcattttaaacggctcagaacgaatcttttgaaaaagccacattctactatctttaaaactgagcactgagatcaatagaaaagtctaactacagacacgagcaacatcacgtggaaaatgtctgccctaggaatttttactgccttgacgaggccagcgactagatgaggtctctccgaaagctcttcagcagttttcccctgtccaccctttcgcctcctccccgtggagagctcgtggaaagacgcgcgagagggggccgggtgtacaggactagcacttgcaggcggaagaccagggccacaacatggcagcaggaacctccgccccgtttttcccttcctgggaacaaaagagcggagcattcctcccacccaggcgcaagttagggaagtgcttccgacaacctccccgcgaggcccgggtcgctcgacggggaggagcagctgaggccacccccgccagcccggcgcccagctctttgttctccaagcaggaaggcggcctcctgcccacccgccgcctccaagcgggccccctcctgcaccataaatccccccgggactgacaaccgcctcgccacggcctcctctgctgacaaaaggggcagaaatcatcactctctctttcctccccgacgaagggcagcccctgccgactccaggtcctacacacctccccgccgggaggccaggctccgggacgcctgcggttccctggtcccgcgccaacggcctggccttccctgccggcccgcgtgcctcccgccacggcgctagcggtccgagccacgctccctcgccgtccgagcacagccgtgcctcggtccgccacggcctcgtccctgcaggcgtcggccatccggccatgaccgcacggcggcctggccaacactgacgttttccttctactccgtcagcaacaggaagagagaacaaaagccaagactttccaggtatctgaagcgcagaggaaatgctaaaaaagggtcgccccacccggctccgcctgcggccgccattttgtaccactcgagaagaagcgaccagggacggcggccattttagagcgctccactcggcggcggcagcggctcaactcaccttcaccgagaactcagcagctgccaccgcagctgcctcctcaggatccggtcgtcggggatagggaagggaggggaaaggggaacggaaaacaaaaaaaagggggagggaagggggaggaaggagtcggggacggcctcaaactcagctcagaggagtcgctgctgcagccgccactcggtacccgctgccacctccatagagctccgactcactgctggcgctaaggcgtgtctgaagccgaacttatcactcttggggcagccgaacccaccagagtctccccgaatggctccttcgccgcccaatcagcggcccggttgccgtctgccaccaatccgcgcagggcagcgaggaggagccacagggctgagctcggttgcggcgcagccccgccgcagtgcgcaaagccatattcgcgaagtctctgaggctgagccagtgg

SEQ ID NO: 1649 - DNA, 6000 bp, Homo sapiens
atgttgtaattttctataatgctctgacctgctacagtggctctgaaaccttgactgcacactggaatcacctagagagctttaaaagctactgatggctagatctcactaccaaagattcagatttatctggtcttaggtgcagcctggacactgagatatttaaaagttctccaggtgattctaatgtgcagccaaggttgagatcaactcatgtagaaaatagtgaagcactaagattcttaagcatggtaataatatgttaaaatttagtttagtttttttgttttttttgttttttccaagacggagtcttgctctgtcgcccaggctggagtacaatggcatgatttcaactcactgcaacctccacctcctgggttcaagcgattctcctgcctcagcctcccgagtagctaggattacaggtgcgcaccacaacgtctggccaattttttgtatttttagtagagacagggtttcaccatgttggccagggtggtctataactcctgaccttgtaatctgcctgcctcagcctcccaaagtgctgggattacaggcatgagccaccgcgcctggctgaaaaaaggtattttaagaaagactaacaggaatatacagactagtagggaaagactacagaagatcaactagaattttgcaataatccaggagaaaagtttagtaagggctggattagcatacatgcaatgatgttgtagggaggaagatgaatgcaagaaacatttggagagaaggagcaccaggattcagtaagtgattgaatgttaaatctgagcaaaaggaaaaaaaatatggtcaagtttctagcatagaagaataatagactccttaacaaaattaaagtagttgtgaaacagctggttaatcaatattattgagaatatggaaactaacattaaattctaagtcggggtctaacctacgtgccttacatacattatctcatttaatctttacaaccaccatataaatactactatcattccgattttacagttttagaaactgagtaagagtaattaaattatttgcccaaagttacacagtaaatggtagagaagacatttgacctcaactggtctaactacttttcctcataggaagatgaccagtttacatatggaatctgttgaatttgagcaaacaactcaaaaaagcaaaatggctatagaggccagatgggaacataaatgagtgaatcaagtcagatgcaactgtggagaaatcaaaacatcgagagaaggtagttctacttagttatgcttgaatgttgccctatgagaatttcaggcccagtattgccatattttaagatttttcatgaaaagatggaaatctggatttgtatgcaaaaatttgtgtgaatatcaaattcaagtgtttaaaactactgtggctcaaactatggcttcaagtttgcatctctgagcaaaaggctgttggaaattcagaactggatgtaaagtgagagatctgggctgaaggtaaatgattagggaattcataagcacagagaggatggtagatgcttccaaaacagtatgtgttagaatagtaaccagcacttgacatgattagttaaaataaggcaaaaatatatgagttaacaagttagtcaggacttagagaaaactgataaaactagcagtggaaaactagcagacttaagtgggtatatttaaaattcaattttcaatgaactaaaagctaaattccagacaatgactctgtgtgtgtgtgtgtgtttaagataggatttcgctctgttacccaggctggagtgcagtgacatgatcatggctcacttcagcctcgacctccagggctcaagccatcctactgcctcagcctcccaagtagctggtactacaggcatgtgggacacaggctaatttttgtattttttgtagagacaggttttcaccacgttgcccaggctagtctcaaactcctgagctcaagctacccacctgcttcagtctccaaaagagctgggattgcaggcatcagccaccatgcctagcattttattttttttgagacaggatctcactctactgccctggctggagtgcagtggcgtgaccatggcttagtgcagcctcaaagtcctgggcttaagggattcgcccatgtcagcctcccaagtagctgggactacagatgcatgtcaccacatctggattaatttttaattttagagatgggggggtctccctatgttgcccagattggtctccaactcctgggctcaaagaatcctcccagcttggcctccaaaagtgctgctgaattttcatatatccatgacgtgatggaaacatttagaaagtttcaatgtttatttccctcacttaaatatatttcgatttgaaaaaaaactattgtctagacttcaaagagtatattcatctagccctaaaagctagatgttcttataattaagacacttaaaattcaataattaaaaattttttacactgggcacagtggctcacacctgtaatcccagtattttgggaggcccagacgggtggatcacttgaggtcaggagtttgagaccagtctgggcaacatggtgaaaccccatctcaagtagaaatacaaaaattagctgggcgtggtggcacatgcttgtaatcccagctactcaggaggctgaggcacgagaactgcttgaacccaggaggtggaggctgcagtgtgcagagatcacaccactacactccagcctgagtgacaaagtgagactctgtctcaaaaaaaaatttttttttctaaaggttttacttaatgtttttatttaatctttgctaattgtgaacccttctgcaatgggctttgcaggtacgatttcaacttcaaatctttctatttaagtgagagaaaggtaattgaaagattgttttatcaatatttttactttttctaccttaggttattcccttccaggtcaatttctcacataaactcatatctgcaaagcccataccaaaagggttcccaattagcaaagattaaataaaatattaagtaaaaccttttttaaatttttaattactgaattttaagtgtcttaattataagaacatccgacttttacggctaggtgaatattctctttgaagtctagacaatagtttttgaatactactcttcttagtaaactaatgtattcgttcattatcagataaatggaatgtaaaccagttatgtaaaaatatcacatatactaatgcatttttccaaaccttaaagccctacagaaattataaagaaacattattctcgtgttatcatgaagctagaagggtccaaagaaatacaaagtgaaacctcttgtatttaaaacaaaacttgcaccaccaccaccaccccaaaatagtttttttttttttttagaatatctcttccaagttttaaagttcaagtaaaattgatgtaatagcaataagtgtagtaacagtaaagtagggaatggtgactattctatagcaaagatctacagatgttggaattgtgttaaaaaccttcagagccacaccacagccttctattacatttaaatgtcgtaggaaaaactgcaattttccggaaaattgtattaaggaccaggtgctctaataccaagagctgttttgacacatcaaaggttaagtttgggtctttgaaaatcctgcctcttactgaacactttaaaagtcattcatgttaaaacacacacattcttgcctttgactatacactgtaaaagtactacatgttaaaatggagatggggacatttttgttgtttaagtttatggaagtatgactccattttagtatagctacaatgtcgcaaacgatggaataaggtactcatcaatacattacctggtaagtataaatagttcaacttgccggctttgaaaagcttaatcctatttcttatggtgaaccttaaataaaatgaaaatacacaactgacaatgtttaacgtgcacttaaacaaacaaaaaacaaaaaaaaacaggagctagcaattcgaaatcctccaaacacccgcggaagtctgacacacagggtgttttcctcggtgaccgccagccggacattcctatgggaaaagcagcttcttctgtgcggttcgaagaaaatcaaccccttcctttcatcactttctcattcactctgcagggggtgggccaataaggagctgaatgaagctcccctttggcatccgggcgcacgtctcgcctcctccccactactttctgggttccctaaggctgccgaagccgaggacctggagccgggtagtgtcccggcgctgcgcccgggggctccaggcctcaacccgaagggctcagccccgggagaggccaggcacgcgagggcagccacagctccaaggggcgccaagaaaagcaatgctcactcgccacgcacagggttcgggggaggtaagggtgcgttttcttcccatattcccggtgagaaaacgaggtcgagggaaaaggggatgatacaactggagcatggcatatggactcagtgaacaaagggactggagcaagaagcagcagccacgccaacgcagactcaaaagggctctccggctttacgcacgcaaccctcatctcgacagcgctcggcgccccttacgccactggctcagcctcagagacttcgcgaatatggctttgcgcactgcggcggggctgcgccgcaaccgagctcagccctgtggctcctcctcgctgccctgcgcggattggtggcagacggcaaccgggccgctgattgggcggcgaaggagccattcggggagactctggtgggttcggctgccccaagagtgataagttcggcttcagacacgccttagcgccagcagtgagtcggagctctatggaggtggcagcgggtaccgagtggcggctgcagcagcgactcctctgagctgagtttgaggccgtccccgactccttcctcccccttccctcccccttttttttgttttccgttcccctttcccctcccttccctatccccgacgaccggatcctgaggaggcagctgcggtggcagctgctgagttctcggtgaaggtgagttgagccgctgccgccgccgagtggagcgctctaaaatggccgccgtccctggtcgcttcttctcgagtggtacaaaatggcggccgcaggcggagccgggtggggcgacccttttttagcatttcctctgcgcttcagatacctggaaagtcttggcttttgttctctcttcctgttgctgacggagtagaaggaaaacgtcagtgttggccaggccgccgtgcggtcatggccggatggccgacgcctgcagggacgaggccgtggcggaccgaggcacggctgtgctcggacggcgagggagcgtggctcggaccgctagcgccgtggcgggaggcacgcgggccggcagggaaggccaggccgttggcgcgggaccagggaaccgcaggcgtcccggagcctggcctcccggcggggaggtgtgtaggacctggagtcggcaggggctgcccttcgtcggggaggaaagagagagtgatgatttctgccccttttgtcagcagaggaggccgtggcgaggcggttgtcagtcccggggggatttatggtgcaggagggggcccgcttggaggcggcgggtgggcaggaggccgccttcctgcttggagaacaaagagctgggcgccgggctggcgggggtggcctcagctgctcctccccgtcgagcgacccgggcctcgcggggaggttgtcggaagcacttccctaacttgcgcctgggtgggaggaatgctccgctcttttgttcccaggaagggaaaaacggggcggaggttcctgctgccatgttgtggccctggtcttccgcctgcaagtgctagtcctgtacacccggccccctctcgcgcgtctttccacgagctctccacgg

SEQ ID NO: 1650 - DNA, 6000 bp, Homo sapiens
ttctgtcctggttgaccctctgctgctgggccatcaaagtttggtgcatcttctgccaatcgcagacatagctgagcatacagtgagctatactttggctcttctagggctttgtccacaatctacagaaaatgtcattgcttaaactaaatatgaaaacttctccaagaacccttcctttaggaaaaatacaaccacctaaatgttagctattacagtctaccaaaaatgtccagttatacagatttcatctagtcacatccatctcctgggagtcagaaaatgccatggatatcaaaactttcaagtctacataaactgtcatacaatgcatttccaagacctaaatacggtgttttccacaaaagaaaaagaacagcttgctaagcactcccatttacctcttcaaccataccatgaacttaacatttacctcttcaatctaatgctactaaagtcagtggttctttttaatcaccatcagtattcaaaaatacatacctatctaactcacacctaagggttttaagtagtaatccaagtgtaaaaaaacacaacttgagtttgttaaacagttccctctcccttttgagttaagccaatatttaaaacttaccagcagtatgacccctttaaggatgagtttagactctacacccacattgaggagctcaaggcatagcttgtcaaacttttcaggagtaagcttatttagtatgctggagaaaaaggaattacattttaagtgttagctaatacacagaatttgaattgaaaaactgcttttaaattatactgatttttcttctaacttgctccctttaaaaaatcaagacatgttttcttactcatctaaaaccaaagggatgctgaaataaacctgttattttaattacaatgatttgaattggactggggggtccccagctgtttgacaagaatcctttctcactttctcaaggttagagcgcaaagatctcattatcaaggctagaccatgaactaagaccattatattccctgcctcactggcttaaataacatagcacttcccttagtcaagggaaatgctagcatgacaggattatggattgcaatccaatggctgaaagcaacgggaagccccaaaatatgacgtgctgttcttcagttcaagatacattttttttttttgagacacagtcttgctctgcacccaggctggagtgcagtggcgtgatctcggctcactgcaacctccacctgtggggtattcaagtgattctcctgcctcagcctctctagtagctgggactacaggcgcctgccactacgtccggctaatttttgtatttttagtagagatggggtttcaacatgttggccaggctggtctcaaactcctgacctcaagtgatctgcccacctcggcctcccaaagtgctgggattacaggcgtgagccacagtgcctggccagttcaagatatttttaaaaattgctaccatgaggattcattaaaacatacatactctgggcatgaaccttgccttcttagtaatacagcacacacaccaaacacagctaatccacacttcccatcttttagtaaaacagaccttgaaacttaccctcttactttcctgaagattgcatcatgtcgttctttttcgtttgcggagttgtttgctgcggagttgtcatctcgtctagtgcttcgtgcaggaatccatttctgagcgttttgccctggggttttccccaggaactcgctgattaataaaaatcagcaaaaacacttattgtcacacaccaaatgttaaacatcataaattctcttacatagaaaaaagtaatttaggctttctcgacttcccctccaagaaagccaactctggaaattagtgcttctggaacagtagtgtgcatcagaatcacctgaagggcttgttaatacagattgctgggcccacccagtttctgctttcactggtttggggtggggcctaagaatttgcatgtctagtaaatattcccagtatcaacgctgtggaaccacattttgaaaattaacattttttttaagagatggggtcttgctgtcttgcccaggctgatctcaaactcttgggttcaagcgaccctcccacctttgcctcccaaagttgttgttgggattacaggtgtgagccactgtaccggctgccaataaacactttctaatgttttattgaccatgttgagtgcgtactactttactaataacaatcagtaggaataatagctactgatttcagaaaaacacattagtaaaaataacccaaagaataaggaaaaaaataacagcttgagagtctcaactcacttagaaaatttggctaaggaataatcaggaactgatattctgtatttaggatacccaacagaaaccacgccccttaagattaggagtcttgatggctattgccttaattataccgtcacatgggaaagacttttaatctgttaaataaagctcactgtttttttacatgtttaccacacctgttgccagcagtcttgggatagtgctgaggtgcacccctacttcctcctccgcccgaagaagcactatttaaaagaaaaaaattgtttactgtatcccaactatgtctcactcaaaaagaataagcatctattttgtgttttgctttgcttgtagagatgggggtctcgctattttgcccagactggagccaggcctgtattttagtgcttgtatattatgctacaaatgaagactgaactcggacccaaaggaaaggcaaataattgattttatttattcttcagatggcagttcttagaaggctgtcaatgaaaacttaagaacttttcaaatgaaaattgcagcccattaagtcggacttatttgctgtgttaactactttttgagactggccttttcaaaaggattccccaaaataaatctacaagtacctgaaacgagaagcacccccttctgcaatcgcactctccactttggcggcttgacaacgaagaatcttcaaaagaataatattaatagatggggtggggaggggaggggacaggagaaatgaaatacctggaacgagaaagagcaccaaaattagacactgctaacatacagatctataagccttcattcaattacaacgtatttcagatcctggcactgtcactgcattgcagatctgtaagactaacctaaaatgtactcaaaacactgacaattacattttgtttagccacctggaaattccccggtgttcaaggatgcaaagagacttcgtagaacacaagagcattttaaacggctcagaacgaatcttttgaaaaagccacattctactatctttaaaactgagcactgagatcaatagaaaagtctaactacagacacgagcaacatcacgtggaaaatgtctgccctaggaatttttactgccttgacgaggccagcgactagatgaggtctctccgaaagctcttcagcagttttcccctgtccaccctttcgcctcctccccgtggagagctcgtggaaagacgcgcgagagggggccgggtgtacaggactagcacttgcaggcggaagaccagggccacaacatggcagcaggaacctccgccccgtttttcccttcctgggaacaaaagagcggagcattcctcccacccaggcgcaagttagggaagtgcttccgacaacctccccgcgaggcccgggtcgctcgacggggaggagcagctgaggccacccccgccagcccggcgcccagctctttgttctccaagcaggaaggcggcctcctgcccacccgccgcctccaagcgggccccctcctgcaccataaatccccccgggactgacaaccgcctcgccacggcctcctctgctgacaaaaggggcagaaatcatcactctctctttcctccccgacgaagggcagcccctgccgactccaggtcctacacacctccccgccgggaggccaggctccgggacgcctgcggttccctggtcccgcgccaacggcctggccttccctgccggcccgcgtgcctcccgccacggcgctagcggtccgagccacgctccctcgccgtccgagcacagccgtgcctcggtccgccacggcctcgtccctgcaggcgtcggccatccggccatgaccgcacggcggcctggccaacactgacgttttccttctactccgtcagcaacaggaagagagaacaaaagccaagactttccaggtatctgaagcgcagaggaaatgctaaaaaagggtcgccccacccggctccgcctgcggccgccattttgtaccactcgagaagaagcgaccagggacggcggccattttagagcgctccactcggcggcggcagcggctcaactcaccttcaccgagaactcagcagctgccaccgcagctgcctcctcaggatccggtcgtcggggatagggaagggaggggaaaggggaacggaaaacaaaaaaaagggggagggaagggggaggaaggagtcggggacggcctcaaactcagctcagaggagtcgctgctgcagccgccactcggtacccgctgccacctccatagagctccgactcactgctggcgctaaggcgtgtctgaagccgaacttatcactcttggggcagccgaacccaccagagtctccccgaatggctccttcgccgcccaatcagcggcccggttgccgtctgccaccaatccgcgcagggcagcgaggaggagccacagggctgagctcggttgcggcgcagccccgccgcagtgcgcaaagccatattcgcgaagtctctgaggctgagccagtggcgtaaggggcgccgagcgctgtcgagatgagggttgcgtgcgtaaagccggagagcccttttgagtctgcgttggcgtggctgctgcttcttgctccagtccctttgttcactgagtccatatgccatgctccagttgtatcatccccttttccctcgacctcgttttctcaccgggaatatgggaagaaaacgcacccttacctcccccgaaccctgtgcgtggcgagtgagcattgcttttcttggcgccccttggagctgtggctgccctcgcgtgcctggcctctcccggggctgagcccttcgggttgaggcctggagcccccgggcgcagcgccgggacactacccggctccaggtcctcggcttcggcagccttagggaacccagaaagtagtggggaggaggcgagacgtgcgcccggatgccaaaggggagcttcattcagctccttattggcccaccccctgcagagtgaatgagaaagtgatgaaaggaaggggttgattttcttcgaaccgcacagaagaagctgcttttcccataggaatgtccggctggcggtcaccgaggaaaacaccctgtgtgtcagacttccgcgggtgtttggaggatttcgaattgctagctcctgtttttttttgttttttgtttgtttaagtgcacgttaaacattgtcagttgtgtattttcattttatttaaggttcaccataagaaataggattaagcttttcaaagccggcaagttgaactatttatacttaccaggtaatgtattgatgagtaccttattccatcgtttgcgacattgtagctatactaaaatggagtcatacttccataaacttaaacaacaaaaatgtccccatctccattttaacatgtagtacttttacagtgtatagtcaaaggcaagaatgtgtgtgttttaacatgaatgacttttaaagtgttcagtaagaggcaggattttcaaagacccaaacttaacctttgatgtgtcaaaacagctcttggtattagagcacctggtccttaatacaattttccggaaaattgcagtttttcctacgacatttaaatgtaatagaaggctgtggtgtggctctgaaggtttttaacacaattccaacatctgtagat

SEQ ID NO: 1651 - DNA, 6000 bp, Homo sapiens
ttgtcattgatctggatatccaggttcttgtcctggcaccaaagttgaatcccaagatcttagatgatatatttaataaacgtgtgactcagtttctccatctataaaaacaattagctatcaagaacacgatagatacactaaatcaactacctaaactgttgaatgcaattcatggttgtatttgttatgtgagagcagaaaattacaatactttctttcagacacctacctttaccaaatccaacctcttatgtgcccaaccagatatcttagtcatgctacagttatttaaagctctcatttgttaaaaaaaaaaaaaaattatctagcattcatatttacaaataaatgagataaatggggaacaagtatagccactttagatgctatttaacatccgttctgttttctttctataatagtgacctctactttccttggggaccttacttcctcccctactcccagacatgtgggaagagatagccccacccggcttcattcccagagccacagtgacaatcataaggtttaatcagaactaaggagatacagctggggacttctgcttacagttatgctctttctactggacttgaatctagggggatgtacttgatagcttcaatcatccattctcctcatttatctaccttattgtatgccctgaagaaaactggtctgcacaatataagttccctctagcttctggttgaatttagacaatgaagagtatgagcaagagcacagcctttgggtcatcttgcagggtctgagagtaaggccgacgtgaagggaaatagagccatggttggcagagggactgggtcctggccccattggctgactggctgattctggtcatgccaagactattatatacactgattctttagttgcatgagccaggacatttcctttttttttttcctcaaaacattttgagtttggggcttcaaacacgtgaaacagagtcttaatgaaggtataactaaaaatatagctctgaagtgaagatgcatggatccctgatcctgaggactctaaatctgacctaaatacagttccagtctccctaaggccccatcctacagcagatcctgttttgagatttctctgagattctgtctctcttatacatgatttatagccttacaatattacaatattcaccatctttactcgccatgagtcagtttgttccttggagcaaagcgaatgtaatgaaacagttcccatcttacagatagggaaatggaggccaagatatatgaagagacttcatcaaaggcaaacctgaacgtggcaggcaggtctctggccaaggatctttccatgccagctccgtttctttatgtcccctttccctccttccctatgctttccccttcccctttgccctgaatttttgtggtccggttgctctaggagcctaggtcttgtcacattatctcagcacttggatgacatggttccagctgtcagagaaggaaaggcatggacttgtttttctctgagtttccttctatttctgtatgctcatttggccttcagcatgtgccaccctgtgaaagtttgggggatgttttataatgttgcttaactttatttagcttcccaagtatttatgacttgccttcaagatgagagtgaatttagctggtgtccctgattcaccttggaaaaatctattgtgcctagcacagtatctggcttgcattagataatcagtaaatatccattgacaagattgactaaaagaatcttacattaggcaaaatgctggctaagctgctgtaacaaaattacagtggctccaacatgacagaagttgatttttctctcactccccagaggtgtgccggcagtccagggtgggcaggcggctctgttctatgaagtcatccaagggctccttgccctgctatcctctagagagtgtctttctcctcatggtcagagctggtttaccagtacattcacattctggcctaagcaaagggggaaagggaaagtgaagggaaagggaaagtgaaaggaaagaaggtaacttccttataaagatgtgattcaaatgtgcacatattacctctgcttgcttctcgttggctaaatcactgtcacgtgctcgtgctagcttgcaagtgtgttgtgggaagtcagggaccccgaatggagggactgcctggagctccggcagaggaacataaattgtgaagatttcatggacacttatcggttcccaaataatacttttataatttcttatgcctgtctttactttaatctcttaatcctgttatcttcgtaagctgaggatatacgtcacctcaggaccactatgataactgtattaactgtacaaattgattgtaaaacgtgtgtttgaacaatatgaaatcagtgcaccttgaaaaagaacagaataacagcaatttttaggggacaagggaagacaaccaaaaggtctgattgcctgcagggtcattatattatatatatatatatatatatatatatatatatatatatatatatacacacacacacacacatcttatatatatatacacattttatatatatatatacacattttatatatatacacacattatatatacacacacattatatatatacacattatatatacacattatatatacacacattatatatatacacattttatatatatatacacattatatatatatataaaacattatatgtgtgtgtgtgtgtgtgtatatatatgtccaagagtaatgaaaacatgttactgcagaaagactggtccaataatgttcataggagccttattcataattagccaaaaggtagaaacaaaccaaatgtccatcaacaggagaatatttaaacatgttgtgggatattcatactggaatactggaaggctactcagcaataaaaaggaatgaattcctgatacatgaaacaaccagggctgatttactcatttggcacagtaggcacagttctggggcctgtgaaaataaacttttaggtggaagaaaatgttttaggtgaaagaaattgtcatattcatctttatagcaacatagtcataagacataatttttgattatataaatagtttgtcatattcatctttatagcaacatagtcataagacataatttttgattatatagtgtgtgtacataaaatgaaggggctcatgaagtgcttagggcccatagaaatcataatgcaggcctacaaacaagaataaatactaaaatatgtgttaagccaaaaacctgggacacaaaagagtacatgctgtactcttaaatagaattctacaacaggcaaaactaatctatgttgatagtgaccagaaagtgattacctctggagtggggagagattgcaagaagggaatgaaggcactttcagggatggcagacatgctctatatcttgtttttggtggtggttatttaggtgtatatacaatctcctaaaatcatggaacagaacctttaggttctgtacattttattgtatattaattatgccacaattttaaacaaaggggaagaatagacagggtacaatgaataatttctgtgacagatttgataaatgaattactaggacagtgtttgctgacaaggtttaacattgcattcttgtagaaaacctttaggaactcaaagggaagagtccaggcactgtgacaggccagtggggaatgaaccacactgctctatattaatcaagcttttttattgcaaacaacagaatatatctggtaagcttatacagcacaggaatttatcagaagaataacaggaagtactgtattcacaacagtctctgaaaacaggcaggaatttaagacaagatcagaccatcagatggctggtggatcatatgatgccataatcctatacccttgccccaaccaacccacatatatctcaggccttcactgcatcttttcattactcctccaaaactgaaaacctatgcgtgagcctctggcttgctgagcctaggcaaagcctacatataataactcccatggagatggaagaggcaatgtgtttcattggcttctagatgggaggtggggcccccaaatgaccaatgttcccaacaaaacctgaacaatctgaaattattcagatttctgcttgtcattctaacctctgttcaggacttccaagatccaggacaggcccagtgtagatacctgtgtcccaaaccactgatctgggctaggaagactgaatcacaggtgtggaaggtcacccgggttcaaccatctaggtgatgaattaggccaggacctgggcaggtagaccatttattctggggagatatgatgcgagcttgaattacatgggagaaatatttgtaaggcagatgggataacaggacttgataagtctgtagtgtggaaaggctagaaaagaaaggaatcaaaggaatcctgatttctgacttgacagggtagaaggaggtgtgtgtgtgtgtgcgtgtgtgtgtgtatgtttatgtagggacagtgacacccaagagaggctaggaataggtttgttttattcctgtttggggtggttgggtaggcagggttaagtttttgacttggtgaatttgagatgatggccaatatacaattgacattccagctggggggaccattgaagatcaagtctggcaagtctactagctggcgcctgggtgagctgagcccagcaggtgagggaaaacgcgggaagagggtcttgcagattccaaacttaggaagggtcgcggctccgcgcacgtgctctcggggtcaccttccccgcgcctgtgagggtgccaggagttcgtctccaggtcccgcccctgtgggcggggcgaggcagcgtcgccgcgaggccacccggaagaccaagccgggtaggcgctgtctccgtcgcctccaacccccccggtccgaccagggaaggtgggatgctctgatggccgggcctgcggcgctgagcgcggcggcggcggctgctctggcggccgccctgctcctgctgcgtcgtgaggacccggggccgggggctggccccaggtaacccctccgcgtatgggaccgagctgggccaggtctcctggccgggccggggataccgtggggtatgcccagtgatgccagcagcttgtggcacctgggcgcaccctccagctcgggccccttccgatgggtctgctggctcaggtgcgggcgatggccggggagccgcgccccgcacgtgactcagcactttccccagagcccggactgcggagaacaatatcctcctccctaacagataaacagcccttgttcctcgggataaggactggcagtcccctgacaccctaagaccggcatctgtcgatgttatttccccagcatggccgaaacagaagccctgtcgaagcttcgggaagacttcaggatgcagaataaatccgtctttattttgggcgccagcggagaaaccggcagagtgctcttaaaggaaatcctggagcagggcctgttttccaaagtcacgctcattggccggaggaagctcaccttcgacgaggaagcttataaaaatgtggtgggtatttcagctgggactcaaatggacccccaggattctgcgaggtgaacatatttcatgcctaaaggctgaatactgccctgccagtggtgggggtagtgagaggccatcaaaacttggccaagattggtctgtgagagtccctcccagaagtctgactcctggattgtagcccaggtgtgcctccctcccgctcattgtgtggtcttgggcaaagcccttctctccatctgcaaccctataaagctgggtctgggttgtaatgggggtgggggctggtgagacagaagagcactgttttcagggtcatacaagctgtattctagaggcagccctggtgaccttgagaattttctcagccactttgctgattttgtcaacctgcgcac

SEQ ID NO: 1652 - DNA, 6000 bp, Homo sapiens
ccgttctgttttctttctataatagtgacctctactttccttggggaccttacttcctcccctactcccagacatgtgggaagagatagccccacccggcttcattcccagagccacagtgacaatcataaggtttaatcagaactaaggagatacagctggggacttctgcttacagttatgctctttctactggacttgaatctagggggatgtacttgatagcttcaatcatccattctcctcatttatctaccttattgtatgccctgaagaaaactggtctgcacaatataagttccctctagcttctggttgaatttagacaatgaagagtatgagcaagagcacagcctttgggtcatcttgcagggtctgagagtaaggccgacgtgaagggaaatagagccatggttggcagagggactgggtcctggccccattggctgactggctgattctggtcatgccaagactattatatacactgattctttagttgcatgagccaggacatttcctttttttttttcctcaaaacattttgagtttggggcttcaaacacgtgaaacagagtcttaatgaaggtataactaaaaatatagctctgaagtgaagatgcatggatccctgatcctgaggactctaaatctgacctaaatacagttccagtctccctaaggccccatcctacagcagatcctgttttgagatttctctgagattctgtctctcttatacatgatttatagccttacaatattacaatattcaccatctttactcgccatgagtcagtttgttccttggagcaaagcgaatgtaatgaaacagttcccatcttacagatagggaaatggaggccaagatatatgaagagacttcatcaaaggcaaacctgaacgtggcaggcaggtctctggccaaggatctttccatgccagctccgtttctttatgtcccctttccctccttccctatgctttccccttcccctttgccctgaatttttgtggtccggttgctctaggagcctaggtcttgtcacattatctcagcacttggatgacatggttccagctgtcagagaaggaaaggcatggacttgtttttctctgagtttccttctatttctgtatgctcatttggccttcagcatgtgccaccctgtgaaagtttgggggatgttttataatgttgcttaactttatttagcttcccaagtatttatgacttgccttcaagatgagagtgaatttagctggtgtccctgattcaccttggaaaaatctattgtgcctagcacagtatctggcttgcattagataatcagtaaatatccattgacaagattgactaaaagaatcttacattaggcaaaatgctggctaagctgctgtaacaaaattacagtggctccaacatgacagaagttgatttttctctcactccccagaggtgtgccggcagtccagggtgggcaggcggctctgttctatgaagtcatccaagggctccttgccctgctatcctctagagagtgtctttctcctcatggtcagagctggtttaccagtacattcacattctggcctaagcaaagggggaaagggaaagtgaagggaaagggaaagtgaaaggaaagaaggtaacttccttataaagatgtgattcaaatgtgcacatattacctctgcttgcttctcgttggctaaatcactgtcacgtgctcgtgctagcttgcaagtgtgttgtgggaagtcagggaccccgaatggagggactgcctggagctccggcagaggaacataaattgtgaagatttcatggacacttatcggttcccaaataatacttttataatttcttatgcctgtctttactttaatctcttaatcctgttatcttcgtaagctgaggatatacgtcacctcaggaccactatgataactgtattaactgtacaaattgattgtaaaacgtgtgtttgaacaatatgaaatcagtgcaccttgaaaaagaacagaataacagcaatttttaggggacaagggaagacaaccaaaaggtctgattgcctgcagggtcattatattatatatatatatatatatatatatatatatatatatatatatatacacacacacacacacatcttatatatatatacacattttatatatatatatacacattttatatatatacacacattatatatacacacacattatatatatacacattatatatacacattatatatacacacattatatatatacacattttatatatatatacacattatatatatatataaaacattatatgtgtgtgtgtgtgtgtgtatatatatgtccaagagtaatgaaaacatgttactgcagaaagactggtccaataatgttcataggagccttattcataattagccaaaaggtagaaacaaaccaaatgtccatcaacaggagaatatttaaacatgttgtgggatattcatactggaatactggaaggctactcagcaataaaaaggaatgaattcctgatacatgaaacaaccagggctgatttactcatttggcacagtaggcacagttctggggcctgtgaaaataaacttttaggtggaagaaaatgttttaggtgaaagaaattgtcatattcatctttatagcaacatagtcataagacataatttttgattatataaatagtttgtcatattcatctttatagcaacatagtcataagacataatttttgattatatagtgtgtgtacataaaatgaaggggctcatgaagtgcttagggcccatagaaatcataatgcaggcctacaaacaagaataaatactaaaatatgtgttaagccaaaaacctgggacacaaaagagtacatgctgtactcttaaatagaattctacaacaggcaaaactaatctatgttgatagtgaccagaaagtgattacctctggagtggggagagattgcaagaagggaatgaaggcactttcagggatggcagacatgctctatatcttgtttttggtggtggttatttaggtgtatatacaatctcctaaaatcatggaacagaacctttaggttctgtacattttattgtatattaattatgccacaattttaaacaaaggggaagaatagacagggtacaatgaataatttctgtgacagatttgataaatgaattactaggacagtgtttgctgacaaggtttaacattgcattcttgtagaaaacctttaggaactcaaagggaagagtccaggcactgtgacaggccagtggggaatgaaccacactgctctatattaatcaagcttttttattgcaaacaacagaatatatctggtaagcttatacagcacaggaatttatcagaagaataacaggaagtactgtattcacaacagtctctgaaaacaggcaggaatttaagacaagatcagaccatcagatggctggtggatcatatgatgccataatcctatacccttgccccaaccaacccacatatatctcaggccttcactgcatcttttcattactcctccaaaactgaaaacctatgcgtgagcctctggcttgctgagcctaggcaaagcctacatataataactcccatggagatggaagaggcaatgtgtttcattggcttctagatgggaggtggggcccccaaatgaccaatgttcccaacaaaacctgaacaatctgaaattattcagatttctgcttgtcattctaacctctgttcaggacttccaagatccaggacaggcccagtgtagatacctgtgtcccaaaccactgatctgggctaggaagactgaatcacaggtgtggaaggtcacccgggttcaaccatctaggtgatgaattaggccaggacctgggcaggtagaccatttattctggggagatatgatgcgagcttgaattacatgggagaaatatttgtaaggcagatgggataacaggacttgataagtctgtagtgtggaaaggctagaaaagaaaggaatcaaaggaatcctgatttctgacttgacagggtagaaggaggtgtgtgtgtgtgtgcgtgtgtgtgtgtatgtttatgtagggacagtgacacccaagagaggctaggaataggtttgttttattcctgtttggggtggttgggtaggcagggttaagtttttgacttggtgaatttgagatgatggccaatatacaattgacattccagctggggggaccattgaagatcaagtctggcaagtctactagctggcgcctgggtgagctgagcccagcaggtgagggaaaacgcgggaagagggtcttgcagattccaaacttaggaagggtcgcggctccgcgcacgtgctctcggggtcaccttccccgcgcctgtgagggtgccaggagttcgtctccaggtcccgcccctgtgggcggggcgaggcagcgtcgccgcgaggccacccggaagaccaagccgggtaggcgctgtctccgtcgcctccaacccccccggtccgaccagggaaggtgggatgctctgatggccgggcctgcggcgctgagcgcggcggcggcggctgctctggcggccgccctgctcctgctgcgtcgtgaggacccggggccgggggctggccccaggtaacccctccgcgtatgggaccgagctgggccaggtctcctggccgggccggggataccgtggggtatgcccagtgatgccagcagcttgtggcacctgggcgcaccctccagctcgggccccttccgatgggtctgctggctcaggtgcgggcgatggccggggagccgcgccccgcacgtgactcagcactttccccagagcccggactgcggagaacaatatcctcctccctaacagataaacagcccttgttcctcgggataaggactggcagtcccctgacaccctaagaccggcatctgtcgatgttatttccccagcatggccgaaacagaagccctgtcgaagcttcgggaagacttcaggatgcagaataaatccgtctttattttgggcgccagcggagaaaccggcagagtgctcttaaaggaaatcctggagcagggcctgttttccaaagtcacgctcattggccggaggaagctcaccttcgacgaggaagcttataaaaatgtggtgggtatttcagctgggactcaaatggacccccaggattctgcgaggtgaacatatttcatgcctaaaggctgaatactgccctgccagtggtgggggtagtgagaggccatcaaaacttggccaagattggtctgtgagagtccctcccagaagtctgactcctggattgtagcccaggtgtgcctccctcccgctcattgtgtggtcttgggcaaagcccttctctccatctgcaaccctataaagctgggtctgggttgtaatgggggtgggggctggtgagacagaagagcactgttttcagggtcatacaagctgtattctagaggcagccctggtgaccttgagaattttctcagccactttgctgattttgtcaacctgcgcacttcacactaatattgtcagggattctgaaactgctttgcagagtgagataggtctatggcagtgaaaggtgggattattcacttacaagaatttgccctgcctgacttcccaggcttgtgtctgtaaatcggatattcccttcactctaagttaaaggtttttttttttttttttctgagacggagtctcactctgtcccccaggctggagtgcagtggcacgatctcggctcagtgcaacctctgcctttcaggttcaagcgattcttctgcctcagcctcccgagtaactggaactacaggcgtgcgtcaccactcctggctaacttttgtatttttagtagagacgagacaaggtttcaccatgttggccaggctggtctcgaactcttgacctcag

SEQ ID NO: 1653 - DNA, 6000 bp, Homo sapiens
atacttagtttatttgtgtctaagtgttctatgtgtctgttccataatgtatttcatattgtgggtcacaataaaaatttgaaagccactgcagtagtaatattttctattgcttttcattgcactcttgttatattggctatgattaaaccttgagtccaaatgaacctaggtttttaatgaagtgacaagtgacacagactgacctcatttataagcctggcacacaggcaagcatctgttttagtgaactctagttacattttaccagatgaaatgctgctagcttgggagtgaaactatcatttgtaatgttattttaacattgcttttctattctggattctaaactattaaattagagacaatatataaagatataaccaattagttgtatattttctaagacaccagcttctaaaataatcattcatttctttcaacaattattgagtgtctactatatgtctaatgatattctacatgccagagatgtagtggtggaaaagacaagaaaggttgttgaaataaacatattttacattaaacatttatattatacttgaggtacttgtgattaaagtaacatgacatagacttttttaagatttagaagcaaactacaagataaagaaagaaagaaaacttaaaaaaaaaacaccttcaacttagacaacagacgtcacaccacagaaggtactgcataggatatttaaaactagatgaggcagggtgtggtggctcatgcctctaacccagaaactttggagggttggggtagggcatcatgtgaggccaggagtttgagactagcctgggcaacatagtgggactgtgtccctgggcaacatagtgggaccgtgtctctgcaaaaaaaaaaaaaataaaaataaaaaattagccacagttggtggctgtgttagtctgttttcactgtgctataaagaactacctgagactgggtcatttataaagaaaagaggtttaattgactcacagttctgcatggctggggaggcctcaggaaacttacaatcatggggaaaggcaaaggggcagcacggcatgtcttacatggcagcaggagagagagaaagagagaggggaagtgccacccttttaaaaccattaggtcttgtgagaactccctcactatcatgagaacagcatgcgggaaacggaccccatgatccagtcacctcccaccaggtccctctctcaacatttggggattacaattctagatgaaatttgaatggggacatagagccaaaccatatcagtggtgctcacttgtggtcccacctaccgtgacactgagatgggaggatagctagagcctgaaggtcaaggctgcagtaagccatggcaacgccactgcaatagcccttctcaaaaaaaaaaataaaaaaataaaaaataaatgaataaaagtagataagacaaatggcatatttcacaaaatgatttttaatctatttcttatgtaaaaattagaaaacatatgcttatacctaacacaatttgccagaaaaaaatgagtcttgcacaggagggaattaatatttatgctactgttgtgttgtacttaaaaagtttaaagttctccactgagagtaaagtaatagattttttaaattgcatattagatggagagtaaaccttgaactttacatatgaaatttctttgatttatccttgtagttttatatatgaatggtggtgaaaagtaatagcatttatcgtttaaaatttcagaaacagtctgtttttattcgtaacactatttgtaatgactatgctaggatttataaaatttattctctttgccttatgacattaaaaaactataattcaaaatatgtcaattgaaggccttatattatagactaagatgctaggttgggaaaaataaacatatttgacctcactgaggaagtatgtcaacaaaatgtaagtaaatgatttaagttattattaaatatatgtcttcatgtattttttaataccattgcatgtcttcatactgctttctgtatcattattctcacttgcttcccaagctgtcttttgtcatttttaactgctcctttgaagctgtttaggaatataagtctttcttggtcacttctggaaatttattttaccaaatttaacccagtggctgtttccgtgttatttaattttttctcaaagtgtcctctaacctcaatcatttattgaaggtttgcttcacttttcagagtgagtactacatatattattttcatttgggagaaggactaagagagaaaaggagagttatctacataggagggaaaaataacgtgttttattgatcatttttaaactcaaaaaagtatttattagagaaatgagaaaattcatgtttgagacaatgttgaaagtttagaatgtgggacacacatagtaatgcagaaatttcccgtgttaaagtcctctaactgtgatcacttgaaaataaaaactaaactgtttaaatctggcttgacttctttttaatggtgttaagtttcaaggatgtatttaaacatttttcatcttattgaagtatttgcttcctttgcattcacattagagaagctatagttgcttcagttggactacattttcctaaggtgaacagtttgggttgagtccacactaaactaagaaaatacttagacaaaagattatctttgacaaatatatcagtgagtgatcagaatatataaatagaaatattgattttgaaaaacaagataaaaatcaaatgggaatttttacatatgctaaaaaaattaaaataaaaacactgtatccgtgtctcttcagaaatcttttgtattacttctcttttgtcaccaaaaaaaatattcagtacaactcttagatgttaatgaaagaaaaaacacattatttatttcttctcgtatttttcttttcgctctttctgagagacagaggatctgacataatgcaaaatttaagacaaaaaaaaaaatacctggaagaaatgagcatggagagggagtaattttgaatgattatgctttcccaattcctctgtaagcctcctttttttccccaaactgtatttagcattgttcctgaatcaacaaaaacattgccttactcttagctttttataacaccaataatgaacaatgtgacaagaatattcatatctggggagaaataggatgtaagattttgaaagttcaaggtgctaaattttttgaactcattacatatttggataattcttaaattagcatttattggctgatgatgttttgatcaggaaaaattatcaagaacatttgattttttactaaattgtatgtgttcagacactcaaaattctttgttggggctctaggaatactcagatctgatcacattttaagaaattttatcattcagattcgtttactaaaactcatcagtaatgagttctgtatgttttgttgttatttatgtttatccaagctgttatgttgaccttttaaaaatgctgtttctccttaaaattaagaataactatttttcccttcttttagaaagctaaggaggaaatgtggacctgatagctgcaaaagcaaattgaactaaaataaaaagttcggagttcaaggactccaaacttttcaatcggttttctcttcttctttattaaatgtattgccactagaagcaaataactgatgcagtttctgccagataatggcaataataaaggtgaaatgtgaatattttttaaattatatctaaaatcatccacatcatttagcttgtggatgtacaggtagtttctatttgggagtggggctaggtaactcatcattataaaaatggtatccaagcaaggatcacaatacctgtaccactgccattgtaaacattggatggcaatatacatgaaactgatgaacatgagaacaaaacaaaataaaaagtgtaatacattttatttatgctccatgggaggtggtaacctgtggggatcagcacactcagcaagcggtccccgcgcattagaggtgaatcagacacttgaacatctgtccacttcatggaagacgtttcatctcagaatacacgtactaataaacaacagttggagacaattgtctctgacattcaacataatgctgagctgaggctgaaagaaggaagggtggaattgtatttcctttggtaaagcaaaaacagccgtgagtacagcctcttctaaaaatctgatatttaaagagaattgtaagacatcaaaatgttcaatttggaatgaagagtggccgaagttactggaaagctcgtgcctccgtctgcaaaatcactggccaggaaagcaaaaacttttccaacacccaattttaatattgtgctaaagctattgactctgttaaacctctagagttaaatatgatcccctccccagcccccaccttttctctcttaggttagtgtctgggggacaaggagggggctggagcttggccccaacctcggaattgctgccaagggcttgtaatacaatctctccccgtttgaagggtaaatcagtgtcaactgcatttgcgtccaccaaaaaaagtaagcattttacttccgctcggtctatgaggactgatgaaatgtaggaaatctgtttctggcagggagaaaaaatcgttttcccaaacagcactaaaaggagccatcagagaagtatgaagaggggtagtgcggctgtagctgctgccgctgccgccaggctggtggggtgcggggagcggctgctgcaggacctgtgcctggagggggccggccccgagaagctgcaggagcccagcccggagcccaagcgcctctgagagccgccagcagcccagctcgggacgcgggggtgagcacgactggctggcccagttctgcgccaacgccgccgcagcgtgcgcgcaccgcagccggggctcacgggagcccctgcctgtctactgcacccggggcggcgggggaggggagaggtcattaaaaaataacctcaggaacgaggcggggaagagtgaagagccgcggacagttggacaggctctttctctaagagtgggtattcactgcagggggtgactttctgattctctggaaacaaccatgtgttccttatccctattgcggaacaccccggacaaccgcagcacgtaagcccgctggggtggctctgccaaccagggacagagtgaggatttttaatgaacacatcgattataaatgcacacatatgcattcgtgcacaagagtatctgtaatgcatgctcagcattgtctgttatggtggggtgggatagagccagaatggtcttaaagggctgatcctgaatgttttacttgagtcgttgaggccaggatgggaggaaagagcgccacatgtgtgatctggggtgatactcactgtgtctgatgagtttgatgaaattgagttttatgtgaataaacaaacgctagccgatatatatcaacacactttggggagattttgcgtggtatcgttctttttgttcagtccaaagttgagactggaatctgaaattgtttggggaacaaaggaggcaattttgctttggagacattatttatactggcaaaattaaattctgtcaactcagtatggtaaattaccattaacttagcccaggtatccgaagaagtttccattgtcttgaatgaagagggagcaaaagcgagggttaacagattctgtttctacattctaaaaacaattgaggttgggggagggttgttaattcttttcccagttaacctttttgaaatcacagtctttaccctctccatcttcttcatcttcatcctctcacctccgtgatcttcttacagtgaagagtttgcaaaactttattcttataaaattatctcctccaaccctctccaacaaggttagatcagttgtgtatgagagatcttatgccaaggaaataagatctgcttgtgcacaggaac

SEQ ID NO: 1654 - DNA, 6000 bp, Homo sapiens
gagagaggggaagtgccacccttttaaaaccattaggtcttgtgagaactccctcactatcatgagaacagcatgcgggaaacggaccccatgatccagtcacctcccaccaggtccctctctcaacatttggggattacaattctagatgaaatttgaatggggacatagagccaaaccatatcagtggtgctcacttgtggtcccacctaccgtgacactgagatgggaggatagctagagcctgaaggtcaaggctgcagtaagccatggcaacgccactgcaatagcccttctcaaaaaaaaaaataaaaaaataaaaaataaatgaataaaagtagataagacaaatggcatatttcacaaaatgatttttaatctatttcttatgtaaaaattagaaaacatatgcttatacctaacacaatttgccagaaaaaaatgagtcttgcacaggagggaattaatatttatgctactgttgtgttgtacttaaaaagtttaaagttctccactgagagtaaagtaatagattttttaaattgcatattagatggagagtaaaccttgaactttacatatgaaatttctttgatttatccttgtagttttatatatgaatggtggtgaaaagtaatagcatttatcgtttaaaatttcagaaacagtctgtttttattcgtaacactatttgtaatgactatgctaggatttataaaatttattctctttgccttatgacattaaaaaactataattcaaaatatgtcaattgaaggccttatattatagactaagatgctaggttgggaaaaataaacatatttgacctcactgaggaagtatgtcaacaaaatgtaagtaaatgatttaagttattattaaatatatgtcttcatgtattttttaataccattgcatgtcttcatactgctttctgtatcattattctcacttgcttcccaagctgtcttttgtcatttttaactgctcctttgaagctgtttaggaatataagtctttcttggtcacttctggaaatttattttaccaaatttaacccagtggctgtttccgtgttatttaattttttctcaaagtgtcctctaacctcaatcatttattgaaggtttgcttcacttttcagagtgagtactacatatattattttcatttgggagaaggactaagagagaaaaggagagttatctacataggagggaaaaataacgtgttttattgatcatttttaaactcaaaaaagtatttattagagaaatgagaaaattcatgtttgagacaatgttgaaagtttagaatgtgggacacacatagtaatgcagaaatttcccgtgttaaagtcctctaactgtgatcacttgaaaataaaaactaaactgtttaaatctggcttgacttctttttaatggtgttaagtttcaaggatgtatttaaacatttttcatcttattgaagtatttgcttcctttgcattcacattagagaagctatagttgcttcagttggactacattttcctaaggtgaacagtttgggttgagtccacactaaactaagaaaatacttagacaaaagattatctttgacaaatatatcagtgagtgatcagaatatataaatagaaatattgattttgaaaaacaagataaaaatcaaatgggaatttttacatatgctaaaaaaattaaaataaaaacactgtatccgtgtctcttcagaaatcttttgtattacttctcttttgtcaccaaaaaaaatattcagtacaactcttagatgttaatgaaagaaaaaacacattatttatttcttctcgtatttttcttttcgctctttctgagagacagaggatctgacataatgcaaaatttaagacaaaaaaaaaaatacctggaagaaatgagcatggagagggagtaattttgaatgattatgctttcccaattcctctgtaagcctcctttttttccccaaactgtatttagcattgttcctgaatcaacaaaaacattgccttactcttagctttttataacaccaataatgaacaatgtgacaagaatattcatatctggggagaaataggatgtaagattttgaaagttcaaggtgctaaattttttgaactcattacatatttggataattcttaaattagcatttattggctgatgatgttttgatcaggaaaaattatcaagaacatttgattttttactaaattgtatgtgttcagacactcaaaattctttgttggggctctaggaatactcagatctgatcacattttaagaaattttatcattcagattcgtttactaaaactcatcagtaatgagttctgtatgttttgttgttatttatgtttatccaagctgttatgttgaccttttaaaaatgctgtttctccttaaaattaagaataactatttttcccttcttttagaaagctaaggaggaaatgtggacctgatagctgcaaaagcaaattgaactaaaataaaaagttcggagttcaaggactccaaacttttcaatcggttttctcttcttctttattaaatgtattgccactagaagcaaataactgatgcagtttctgccagataatggcaataataaaggtgaaatgtgaatattttttaaattatatctaaaatcatccacatcatttagcttgtggatgtacaggtagtttctatttgggagtggggctaggtaactcatcattataaaaatggtatccaagcaaggatcacaatacctgtaccactgccattgtaaacattggatggcaatatacatgaaactgatgaacatgagaacaaaacaaaataaaaagtgtaatacattttatttatgctccatgggaggtggtaacctgtggggatcagcacactcagcaagcggtccccgcgcattagaggtgaatcagacacttgaacatctgtccacttcatggaagacgtttcatctcagaatacacgtactaataaacaacagttggagacaattgtctctgacattcaacataatgctgagctgaggctgaaagaaggaagggtggaattgtatttcctttggtaaagcaaaaacagccgtgagtacagcctcttctaaaaatctgatatttaaagagaattgtaagacatcaaaatgttcaatttggaatgaagagtggccgaagttactggaaagctcgtgcctccgtctgcaaaatcactggccaggaaagcaaaaacttttccaacacccaattttaatattgtgctaaagctattgactctgttaaacctctagagttaaatatgatcccctccccagcccccaccttttctctcttaggttagtgtctgggggacaaggagggggctggagcttggccccaacctcggaattgctgccaagggcttgtaatacaatctctccccgtttgaagggtaaatcagtgtcaactgcatttgcgtccaccaaaaaaagtaagcattttacttccgctcggtctatgaggactgatgaaatgtaggaaatctgtttctggcagggagaaaaaatcgttttcccaaacagcactaaaaggagccatcagagaagtatgaagaggggtagtgcggctgtagctgctgccgctgccgccaggctggtggggtgcggggagcggctgctgcaggacctgtgcctggagggggccggccccgagaagctgcaggagcccagcccggagcccaagcgcctctgagagccgccagcagcccagctcgggacgcgggggtgagcacgactggctggcccagttctgcgccaacgccgccgcagcgtgcgcgcaccgcagccggggctcacgggagcccctgcctgtctactgcacccggggcggcgggggaggggagaggtcattaaaaaataacctcaggaacgaggcggggaagagtgaagagccgcggacagttggacaggctctttctctaagagtgggtattcactgcagggggtgactttctgattctctggaaacaaccatgtgttccttatccctattgcggaacaccccggacaaccgcagcacgtaagcccgctggggtggctctgccaaccagggacagagtgaggatttttaatgaacacatcgattataaatgcacacatatgcattcgtgcacaagagtatctgtaatgcatgctcagcattgtctgttatggtggggtgggatagagccagaatggtcttaaagggctgatcctgaatgttttacttgagtcgttgaggccaggatgggaggaaagagcgccacatgtgtgatctggggtgatactcactgtgtctgatgagtttgatgaaattgagttttatgtgaataaacaaacgctagccgatatatatcaacacactttggggagattttgcgtggtatcgttctttttgttcagtccaaagttgagactggaatctgaaattgtttggggaacaaaggaggcaattttgctttggagacattatttatactggcaaaattaaattctgtcaactcagtatggtaaattaccattaacttagcccaggtatccgaagaagtttccattgtcttgaatgaagagggagcaaaagcgagggttaacagattctgtttctacattctaaaaacaattgaggttgggggagggttgttaattcttttcccagttaacctttttgaaatcacagtctttaccctctccatcttcttcatcttcatcctctcacctccgtgatcttcttacagtgaagagtttgcaaaactttattcttataaaattatctcctccaaccctctccaacaaggttagatcagttgtgtatgagagatcttatgccaaggaaataagatctgcttgtgcacaggaacacccatttgacatcctagtattaaaataaaggcttagacagtttggatgtaccagcctggcagaggaagtccacttttcctccccacgtatcccctgagattcacagaggcaaggcagagaacaagacctgtgcttctttactccaaactcttagcagtgtggacactgattaactgcagctggggtctgatttgcccagcctgtctttgatattgatcaatgaactccttctcaaggaatgctttcctctaactgcggtgaaggtggtggctctggtggttctctccaacatgggtgtctgggttttgactgcctaagagaaggtaagggacagatggatgaggcatgggacagtgtgcctttgcaaagcacattggagactttgcacagggctgcctgaatggtcccttacatggaaaaggtagcttggatttcagcctgaatgctactgaagtttgggtttatttcattactttattgctaaacactatgctgtggtgttatggactgtgctttactgggaaataagttcacatggcaaaaaaatatttcaccaggtgcaaaaggtcatgtgattgccctggaattttttagcatcttggttagaaacttcagttaaacctcaaactttcgagtatggtgaaatacctggtcttatattaaccctaagtatgttgtgtgttacttagaaatcttacttcaagactggaagtctgcattgaagactcagggaaactttggaaaactaagttaccttggttgagaaggcatgatgaggctgtaactgtttacagagagacttttgtttaaaactgcagggcatgttgtaaggttggtttggtatctttgtggttttgatattaaggtccaaacaggatccaactgtttctttaaacctgagcaactaggaaggtttccactcaatgttttttgactagagaaatgaactggagtaacagtagaaaataatctgctgtcaaaattaagtaagaggcttatgtaagtttctgtattaaatgttttcagcatcaatacaattaaaactttgctaattttactcctttatgtgagaccatgtcacatatgtgtatatat

SEQ ID NO: 1655 - DNA, 6000 bp, Homo sapiens
ttgaaaatgtatattttgtgagatactattaattagccaaaatgaatcacaaaagagtgaagaactcacaatgatgaaagagatatctagaactttcctgggtggtttattctttgagttcagctaggaaaatggcattttctctttccagattttggaagggtattcgatttggagcactgtttatttttaattttaaaaggtaacgtgattgaccaataaactatttcctcagtgtttgacacctgtaacacatgaaactgaatagatgtggggaacaatgctgcagatgacagcaaagattacctttagggaggagacctttgactgtgggttgattaggattcattgttttcaatgttcacagttgagtctgtgtgtgtagatggggtggtggtagtgatgtcctctcacacttactttgagaggtatatagcatttccctattaactgattaatcatcatcttaggggcagcattcttctccatatgaagaaaacttggaataatccattatctactgtatcattaatacatttatttgttctccccgttgtcctttgtcttttcttaattatttagagttctataaaatattcctattttgtcacagaattgctttccgttttgggataggtcaatagaagttttattttggcacatttctgatggtgatcatttctattttgctaataaaaaacatatcgaatattaaatatatgccaagcattggcacaaatatttaatcctcacaattatctttaagttttcagcctccgttgtatatagtagaaaacacaggtacaaagaggaaaattcatatgactagaatagagtagctactaaatggttaggtagtggacctattatttgaccctggacttctgattccagttccaatattctatccattattcaggcttctaagtgaaatctcatagccgacagaagtgtatatcatttcatgttttttgtctttccagttgcttttctatgtaatgttgcaatgcattttctctaacatgtcagcaaagcctagagataagccagaaatcatcttggtcatagtcaaagaacacctctaggtggcatggaagaatactttttcttcagagtcaaaactatgatgtcttcagctgggattctgggacaacaaactagacagagtctttaaacatgtgatattttacttacaaagtcattatttttttctttttctcctgggctatttcaagtctcatcatattcataattgttattccagaatcacttctactatggaaagaaagaaaaaatatatacacacacagtctttgaaggatttagtattaagtttctgcatgtttttctcttgaagttttatttttctggattcctagacctaagggttggttatccattttaggtagaccgagaaagcttggaggagccatagaagtatttgagtacttactccccttttaaaagtgattggctttgtttaatagttactaaagttacttatcaagcttttaaaatacttggactatatacactttattggaaacatcattcagtgtttaggcacattatacaaaaaagtttttctttctccctaacctactgctttcttcaagtctagtggatcatcagtcactttatttcccacctttttaaaaagttaccccttggcatctcttgtggttttgaacacttttgaatgaattcaagagaactgaaatgatctttttgtgtagcttgttctttacgatgtaattcatctgatccatattgactaaacacttctttaaaaagttacaaggagggtaaaattccatagtgatctttttatgggaataagataaattaatttgatctttcttcaccacaatataatcattttagttggaaactacttcaccatggggtaaattctccatactccaaattttgatcatgctagctgaatccatttttcatgtttcgtattcatggattagccaaatctaaatccaagacctgcaggtattgactttcagccaaaccgttgagtcatttaagtttggcagtgatttgaaatgtgaaaaaaaggatcatgagaaattggattgagaatctgaattcttttaagaaggggcttaaacagaagagtccttatctatgacagtgactttaggtttctacatatttgacatatgtctaattgtgtaacttctattgcatgttaattactcactaagccttctttctctcacctctgtctcctggggaaatgtaactgtgtttttgcttttttctcaccactaaaattttgactgtatacaaagtaacaaaataaaaattgcttaattattcttattgtttttacttaatgttcatctctaattattagaaggtagtttgagttacttttctggcaaaacacaggacagagtacatgagaaataaatgtgccactgtcaaagaaaataaaaacttcactgtttagaggttttgagggaaaggattgtgtccttctggctcattgaaattgttacatgccattaggcttactgtaaactatcccttgataaattatttgctggacaatgagcttaagaatctgaggtgtcttcttgcttttatagagcaaaataggactctgatgcttaaatggaagtcacagagcacataatagggtgtaggtaaagttactgaacagccacatctcactttcaggaaagtagtggaagagattgtgtcttgagaagacaggcattttagaggtaacccttttaagatttcaattagttatttaagtatatgaatcatgtgcttatatgtattacttaaatgtttctgaggccagcaggcatataggaatcttaaccagctacagggagaagttttgtttttctaggactagacatattttttttttaactggggcagaaaatgctttgggtttttcatgtttaatcacagaatttggagaaaactttaggactttatatggataacatcattattaactatgaaataataaaaagtggtgttctgattcccataatgacaatctaataatgtatgacaaggtgtattgaaagcagttcacattttcaatggttgactttagatagatatatataagatgttttcagagaaaatttatggtatttttttcaaaaattactcgacagtaatttaattagaaatgaaattgtgcttttaaatactatatttatgataccttttaggtacttactcatactcccaacagtcttttctattactacagcaaaatatttgagagatgctcccactttgcatttttctaaacaccagtgtcttatttgttcttcaaaagcaatatttaaaataaattaacttatgttaagtgaattagagtttgaggttaactggaaaggaatactgtgtagagtttcaaataataaaaccaaaaggagaatatattacttattggtaactttaaaatgccataaatactgcaatatcactgaaaacctcatgatatcatataaacattacctcttgcctattgcaagtattttcattttcattgtcatacagtcataatgcatctggttatttcataagcatatttatatacagcgtagaatcctgcatgttattaaacatgactattacattaactgcttcattagttcttccgtagtcttacatcctataaataatgcatacaaaagtgctatattctgtccgggcatggtggctcaacgcctgtaatcccagcattttgggaggccgaggcaggtggatcacttgaggtcaggagttaaagaccagcctggccaacatggcgaaaccccatctctactaaaaaatacaaaacaaacaaacaaaaatgccatattcaaggccaaatatatattcaaataccttttctacaacccaagtaggggattgcactgctcacaatatgatcaggttaatgaaagcatccttgtttttatagatgtaagatatttaagtacttctactctaaagatactttcaaacaaaacgcagcatgtaaaacaaataaagtggaaagataaaaaacaagaaagagaaagagattgttgtagcaatagcagaggacaaacaaacacctctggcagcatttgttagaactatgatgcagtgcttgggttatcatcaatatgggttcttggctattccattttgtaaaaatgtgtcattacagaaagagtagtggtcttgggaatatgaagactcaggttcaagcctagttctgtcatgacctagctgtatgatcttggtgaagtcacttatcctctatttttttattttttttttttatttttctttttttggtttctttgactgcaagagagaagtgtggtagagagtctttgggtgtacctcttcccctgcttctcacccagttctctaaattgtgagtccatgattgcttggccgtctccaaaaaagaagtactttgcttaaccttttaggctatatttttaagggtaatgatcatgtgtttacagtgagttgtaaaaatgctgtcattgccagtgttcagtcataaaatttggtgaaaatctatggttttaaatagcccaaacaatgggagttaacaaattgggcactaacattttaactttttctcgtgtttcaatatgtggaatttcttgcttagaagctggctctttccaagtatattgtttcatacaaacttggagtttcttgtttgattttctatttgacctttgattgctgctgttttcctactaagtgtttggccaaaagtgagagggccagtacagataaagcaaatagtgtttcatggggttaataattaataaactgaactgtcatcagaaaacccgcggatccagttcattataatgtcatgatgacaacattttgtgagagaagtctgtataaaaagcaattgctcttttgtttccaaaacaggtattacaagtggataaataatgtgcactgctctgagcccaaaggtacgcagtggacctggcctctctgatatgcatcagtatagccaatggctagccagcagacatgaagctaatttgctaccaatgaaagaagatctggccttgtggttaaccaatctattaggtaaggttataagatctcattttgtgagcaaagacaacagtttttgttttatttttcctcctgtagtgtccttcacctaagcatgtgatagcaccttggaaagaaagacttttattatttgacatttgcatctgggaaacctgaagcaggtggaaaatttaagtgaatttcccaatgtctgtcatattaactgtgcttagtaattccaatatgatgcactcaaatgtggaaatatgcagtcagattgcttattttatctatatgctggtctgatttatttttggcttttctttcatgcagctgaccaatttgacctactcttttgacattgtacacaggccacagtgtctgtaaaatctggcttctaaatctggatttctttgccctacttttacagcacaccttctaaaactgctgaatacccaaactcaggaacaaaatcatgtattctttttccaaatgagctgactagagtcatcccaccctgaactaaaatttttcttttccatttgcttttgtttttaaggtctagtctaacagtacttttgctgacctcatgctacctcctggtaaagattcctctccttttgttgctgttgtgctttcatattcccaggataaaatttcaactatgtgaaaaatagaatcacatgtttaaaggatcatcatatatagcagcactatttccactaagttttttatagagaataaatttaatttaaatgtgagaaaaaagatccctgtagactttataagatataagatttgagcatatcatttgcaggggagatttcatcaacactattttattatttaaatcatctgtcaaggtaagagttgttatcctcattttctagctaatgaaactaagagcttagtaaggtgcaccctgtccatctgaaattttagcaa

SEQ ID NO: 1656 - DNA, 6000 bp, Homo sapiens
gttttaatgttttccttcctaacattcttaagaagttcctttaggaaggatctactgatggtaatctctttctatttgtatttgtctaagatatctttacttccctgttattcttcaaagatggtgttattgggcatacaattatacatcattaactattgccctctcagcctttttactatgattttttggctttaggtttttgttgttgagaagtctgctattagtctcattgttagttcattgcaggtgatcatctctgctcaattttggaaaattcttagctatcatctccttggatattaccttcacctccttttctctattccctccttttagatatgtgccattttcttcatctctcctctccctctcttaacttctctttcctatatttaattcgtttcctgtctttcagatcgatcgttgttgtttctaacctactatttaacttatgcattgacttttcaatttcaatgtttatatttagtacattttcagtctccttggtcttttaaaaatataacatcttatttctttgtaatgttttacatttcattttaagtctttgagtggtataaacatacttgttttatatttatgtatcataattcaattatatgtagttcttgggggttaaatttctgctgtttgtgatttctggtggtttgttttctcatatgctttatagttctgcattgtgagtttacatttgtcagggttttatttgtcagaatcctaggtagcttgtgttgaggatgtgggtctccagaggggatttatgtttccttctgttggatgtctttgggtgctaccaacctgggaatactgtatgttactatcctggcttggagcttcctagaccatgctggtggtataaattcaaaccccagatggtcataaagcttgattgctatgaactgaatgttcatcccctcccacacctccttcatatgttgaagtcctaatccccagtgtgatgattattggaggtggggcctttgggatgtaattaggtcttgagggtggaatcctcatgagtaggattagtgccctgacaagaagagacacagaaaggtctttttctccaccatatgagaatatagcaagaaggtaaccctctgcaaaccagaaaaagagccctcatcaggaaccaaattggccagcaccttgatcttggacttcctagcctctagagctgggagaaataaattcctgttgtttaagccacccagtctgtggtatttttgttatagcagcccgaactgactaagatatgcgtgttaaagatcatcagtgagactctcttctttttccattccctggacaagacaggtaagtttctttggtggatgttgagcaaattttttccagtattccctgttgggtgtaattctttaagatcctagctttatgggtttctttgtatcagcttcctgccttgtatgcccaagatagttgtagcttcaatgtcatttctattatttaagcttcatttttgactttggatgttttccttccttttttttgtgcgtaagctcagctattcacttgagaaggtattccttatatttcacctggttaggtgttttttagcctaccatgctgcctgccagtgctgttttaagctgagccaacctaaggtcccacagatcaattatattatggagcccttttctttagagaatatgcctttttccattcttggatatctctgttacagtagactcttgaataatgtgggggttggggtgccaatcccctaagcagttgaaaaatgatgtataacttttgactcccccaaaacttaactactaatagccttctgttgactggacaccttactgataatgtaaatagtctattaaacatattttatatgttatatatattaaatactgtattcttacaataaagtaagcaagagaaaagaaaatgttattaagaaagtcaggaggaagaaaaatatatttactattcattaagtggaagtcataacgatcttcatcctcctcatcttcatgttgtgtaggccaaggaggagaaggaaggggggttggtctcactgtctcaggagtggcagaggcagaataggtagcagaggtggaaagagaagctggagaggcaggcacacttggtgtaacttttgttgaaaaaaaatctgcacagcagtggatctgcaaagtttaaacctgtgttgttcaagaatcaactgtatttagaggaagtgctaaatatgggattcaaccctacaccagctctttctcctaattggaaactcactttcccctgatgacactattttccacgaaagccattccctttctaatcctgactttcatatttcctgactcactgggtaagggggtatctgtgtaatctttgctttgccctgtaacttcaaattcagtaaagcagtatctttctacaacctctcctccttcaaccaccagctactaagacgcttttctgccttctcagaaacttcaggtcctggcttataatttatttcccactcctccctgaagtcatccttggatactttcgcatcatgtagcttctaatttcacatcttctatattttcccacctccctcacttgcatggtttctatgcctagaaatgtagccacactggattgaaaaacacttgctctttctgattgcttttccttctttatttttatttattactctttttttttgcagagatgggggtctcacttttttgcctaggctggtattgaacttgtggtctcaagtgatcctcctgcctcggcctcccaaagtgctggggttacagatgtgagccattctgcccagctgcttttccttctttaacacatgctcatgactttctttctctgccttgaatgcccttttcacctctctgcttgtcaaaatactaagtgtcctccaggataaacaaagatatcaactgttgattgaactcttcctagatttttccaactggatgtcacctcttttttttttttgaattctgtagcattttgtttatatgcttctatgccactttttaccttctcctttgaataatcttattgtcttatttctagttagctcctcccagtgtctaggcatcctttctccattcaacaactatttattgagcaattaactatatgccaggcattaggcaagtttaaggttataaaaaatgaagaagataggcagcattgtgtgaggctgtgcctcacacagttctttaacacggcaaattctcattttataaaagaacaaaggattaattaaaaacatacatgtttaaaatacagataaatatggagaagaaaaaaagaggccacaatcttccagaccagatagctattgttgacttatttcaaaaagtgaaaacaatattccctgggataagataaatttggatacagttccagtggtgattgtcactgctctccacccatccagttctcaaatggggtgggtgtgtgctacattttgtatcatttgcaggggggatttgatttggaaagcagagcaatgcccccttggatgtggggaagcagaacatgagtgtcccatccccagaatgtcctcatcccaatctccctagatctgtgacaagcaggcattaactcacaaaaatatccctggaatcgaggttgctgccggaagcctctgtaggtatctagtctcagaatcatcactttgaatatttaagctatcagtgacaacttccaccagatggcgccaaagtacatctgggaccagaagggatttggatcctgtagccagacccacaactctaccaaaccaacatcgcaggcccaggggtcatttcattaacctctcaataacatcgctctgaattttaatttaattttttagtttccacttactgctttatgacagcggttttagtgtgcatggatagggctaaatcatgtaaataatagagaaagatacaaaacaaaaatgcgttttttttttttttttttggagacagggtcttgctctatcacccaggctggagtgcagtggcacgaccacggcccactgcagccttgacctcctgggctcaagcaatcttcctgcctctgcctcctaagtagttgggactacaagcgtgtgctacgatgcctagttaactttttattttttgtagagatggggtcttgctctgctgcccaggctggtctcaaactcttgggctcaagcgatcctctcgtttaggcctccccaaatgctggaattacaggcgtgagccacctttcctcgccataaatgcttccatttccgcctcgacaactactccacctgaagctgttcatttcttcttgcattccttccagaaaaaagttatacacatgcctgaatataagcacctactttatatatttctccctcttgtttttgcatatgcatagtttacctaaaagtgacttgcccgctgttttggactacgctttgatcttaactaatatcttggagatatttccttacccaaatatattgcactatctcacattactcaaatcaatcaaattccataatttatttcgattgtgtctagcatttcgctatgattagaaagaatgctgtcatggaactttttgacaaacattgttgagaatatccatagggcaaactccgtacagagagcttgttggaatgaagggtaccagcattttccgtttgatggatagtaccaaattgccctccaggaatgttatacgctcaccagaactgattataataaaacgtctacatatttgttagttttataagcaacgcgtggtgtctcgtttgggtttaaggattctttaattatgaatgaggctgtctgagcatttcactgcggagcctgagcgcgcctgcctgggaaaacactgcagcggtgctcggactcctcctgtccagcaggaggcgcggcccggcagctcccgcatgcgcagtgcgctcggtgtcagacggcccggatcccggttaccggcccctcgctcgctgctcgccagcccagactcggccctggcagtggcggctggcgattcggaccgatccgacctgggcggaggtggcccgcgccccgcggcatgagccggtgaccaagctcggggccgagcgggaggcagccgtggccgaggtaagcgcggctctccagggcggcggccgggcgggcgctgaagcgagggctcgggcctccgggggccgctgctgggtcgggacaagggccgagggagcgcggccgcgcggaggctccgtggaggcccgtgggctgcgagaggccacccccagccccgccggggctgtgacaatgactgcccgcttttggagcgctccgatttccactcctgcttctccttctcctccggcggcggccgcgctttcagcatcttggtacccacctgttctcctagccaaccttcgcccccagtccgctccttcctttcctcctgcgacccgccctccgccctccgccgtgacccctcccttcctgctgccaccttcccgccagccacagggatctgattcctcccagggggatgtcctgcgcctcagggtccggtggtggcctgcggcatcccttgcggtgccagaagccgtgggacgaggtagggaaggggccaggggcatgttatgccggggactgggtggtcgggggcgtgttaggccggggactgggtgaccgggaactagatggccgggggcgtgttaggccggggactgggtggccggggtcatgttgggccaggcactaggtggctgggggcgtgttaggcaggggactgggtggccgggggcctgtcaggacggggcaggagtatgttagactgcggactagattgctggtggcatgttaggccagggactaggtggcccgggggtgtgtcgggccggggccaggggcatgttagtctcgggactaggtggccagaagcacactggctctgggcttcaacttgaagtccagaggtgtttggggctttgttacattcggtgggaaccagatctaaacacacaat

SEQ ID NO: 1657 - DNA, 6000 bp, Homo sapiens
ttaagatataccttgaatagatttttctcccctttggctgcttttaatattcttctttaactttctttttagcagtttggctttgatatatctaggtagcattttctttatatatatatatgttctgttctgagttgagcatcttgagtctgtgaattgatgtattttatcatttttggaaaaacttaaaaaaacacagttggattatcccattggcttctacattcagtctgttgcagtgtcatatgtcatgtagcctctggaaaatggaagtgaataaagcaaatgtcagtattaaactagtataagccctttgaaagggcctgggatgcctgaagcatacttcaagaaccagtgttctaagattttggtatgaagcatttgctagcctcctaaactgagctttgaagtgtttcctcttttttttctgaactctggaataatttgtggaaaattggaattattatttcttgaatatttggtagaacttggaaaattttctgggcctggaattttctttataggaagatttttaaacttttgattcagtgtctttaatgttatagagctactcagagttgctgtttctccttgagatgcttttggtaagtatattttaaaataatttttccatgttatctgagttttcaaatgtactggcataaattcattgataccatcttatcttttaaatatatgcagcatttagagttatgttccccttttcaggtatttatttgcacctttttccttgaattcttgattaatcttaccagaattttattagtctgtttttaaacaaacaacttttagccttgttgaccatttctattttgttttttaattaatctctgtgcttttatttattattttcttctgttatctttggttttactttgttgtgatatgtcttttttatagttaatctgcaactcataaagatttgtgaagctcatgtgtgaatacagtttttgttcccttaacctcaattttgtcatacatagaagctatttttcaagctatggaggacccattattgggtggtataattgatctagtaggttatggccagaattttttaaaaagcaatagaataacagagtagaaaaatggagggttcattgcgtgttctgtggctaacactgtgtactcacagtacatagcttaaatgttgttttttgaagctttatttaaaatatccatatacacacatatatatatctgtctatattgggtcacaatataacatatatttcttactgtcaattttagtttaaaaaaagttttgaaaaacactattaaagggtagtttgtctaatattaataaaggtttaaaaccagatggcacaaaatacttgaggagcttgtttttaaatgacatattctgtggccctattttaaacttactgataacagcctccagtggtggggccaaggaatctgttttaacaaactcttgtgcttcttacccttcaggtgttggggaaccactgattcaagtatacacatagaccttgagagcttcttgggaagttctaacatgggccagcggagggcagctccttgcctgcatttgtcccaaaacttcctgtcttcaaactccaggagggatatgcagaatggcaaggaagccataccatagggtgggcctgcagctggtaggggatgggagcaggcaggaatattctgcttactgttagaatgatagaaaaagtgaaatcgctgtcatgccacatttctgtcatagaacaattagaatatattgagtgactgatgtatatactccaaagatgataatcttttaagctcaaaatgtatgaattttcatgtattagtcaatgataggcaaattccttgttatgttccagtttctggtcttagagagatatgacttgaaatgattcatgaccatttagcatattttacccccaaaactgaaagtgattgcaacattcaagcttggcaatactcagctcgctaggcaggaagcagtttaccatgtgggcactgatggggagagctccatttatccgaagcaaaaatggttgataactctaagatggtctatgagcttttcagttacttcccattatattaatagctttcctggaagatccgtgagtagaatgataccattttgtttatttatttttattttattttattttttgagaaagagtcgtgctctattgcccaggctggagtgcagtggcacaatcttggttcactgcacctccgcctcccaggtttaagtgactgtcttgcctcagcctcccaagtagctgggattacaggtgtctgccatcatgcctggctaatttttgtatttttagtagagacagggtttcaccatgttggctaggctggtcttgaactcctgatctcaggtgatctgtctgccttggcctcccaaagtgctgggattataggcatgagccactgtgcccagctgtctttttgtggattggtattttgacatgcaggatgccaaaatagcttgttgcagtaacatggtaagtatgtggcagatgatgcagccacactcaaggctctgccctcccccgaaacagtatccgggaatcatataggagaggcttgtttggtaaggatcttaaaatgtggtctacatgggaactctacatttttagctgaggactacaaattttctttacatctcagtcaataatgcttattggctgttttatatatctatagctgtataacaaaccaccccaaaacttagaagctttaaacaacaacagtcatttatttgctgatgattgtggaatctatgcagagcttggtggggatggctcatctcttccctaatggttttgactgagatctccgtgtccactggggcaggttgccttccactgggagctcagcttccttagagcatggcggctggattcgaagagtgcaaaggcagactctatagggcctctcaagtcttgtgctcaaaaatcccaaaacatcacttcagccacattttcttggtcaaagcaaatcataaagctagcctagattcatggggaagggacatggattctacattttgtttggagaagtaccatgcaaattcagggatggaaagaactgttggtgttcgtctttgtaaatgaatctaccacattggcccttttcctccctttctcccttctctctctttctcttccttttcctccctccctttgtctctcctaccccattcctttcttcatttcttccatttatctaaatgcaactatcaccttcattataaatcatcactatatgttttatttgaagatgaaagattaattttttttcttattgatatccttttgtacttaatcgatactttcctagtggtgtttttacattctgccttttgttatagctttgttttctctccctcattagagtagggtctttgctttcatctttgttttcttcacagtacatgatgggtgctcaataatggtttgaatgaataagtgaacgaaaacagatttttttttttatgacacagagtcttgctctgtcacttgggctggagtgcagtggcacgatctcggctcaccgcaacctccacctcctggattcaagcaattctcctgcctcagcctcccaactagctgggattacaggtgcatgccaccacacctggctaatttttgtatttttagtagagacgggttttgccatgttggccatgctggtcttgaattcctgacctcaggtgatccacccatcttggcctcccaaggtgctgggattatagacgtgagccaccgcacatggctgaaaacagattttggaatgatgaagcttcagtttgtccagttaaatcattattttatgttaagcaagtgttttgaaataaaataactgtcttttgctattccacttttgatttttctgccttggtcagagccctccttcccagagtcccacatttgccagcttctgctttaagtaaatgtatattgatagggtatagtaatattttatattatgaattaatatttatgttaaatatatgcagtattaaatattaaatacattatatactatttattcatatatctagatatatatttctaaatgtttataagaagtgtccaaagtccctttttgttatttcaccacaccacttaagggaaagaaataggtacattaaaagtagaggctgggcgcggtggcttatgcctatgatcctagcattttgggaggccgaggcaggctgatagattgagctcaggagttcaagaccagcctgggcaacatggcaagactccttctctactaaaaatgcaaaaaattagctgggcgtggtggtcacagttacttgggaggccaaagtgggaggattgcttgagcctggggaggtgaaggttgcagtgagctgagattgcaccactgcactccagcctgagtgacagagtgaaaccctgtctcaaaacaaaacaaaacaaaaaaaaaggttgaatagtcttttcaagtgtcatttgccatcctaaatacttggtttttcttatttctctccctggtgaccaggagtgtgaggaagaggctgtctgtgtcattatgtgtgcgtcggtcaagtataatatccggggtcctgccctcatcccaagaatgaagaccaagcaccgaatctactatatcaccctcttctccattgtcctcctgggcctcattgccactggcatgtttcagttttggccccattctatcgagtcctcaaatgactggaatgtagagaagcgcagcatccgtgatgtgccggttgttaggctgccagccgacagtcccatcccagagcggggggatctcagttgcagaatgcacacgtgttttgatgtctatcgctgtggcttcaacccaaagaacaaaatcaaggtgtatatctatgctctgaaaaagtacgtggatgactttggcgtctctgtcagcaacaccatctcccgggagtataatgaactgctcatggccatctcagacagtgactactacactgatgacatcaaccgggcctgtctgtttgttccctccatcgatgtgcttaaccagaacacactgcgcatcaaggagacagcacaagcgatggcccagctctctaggtatctcacactcatacagcccagcccccaggagatacttgagtggccctcagggaactaaagggaagggaaggatgggaatgcttctgctcttgagttggtttcccgatgctgtcttcttgcaggacggggtgtgttggagggactgacttgcagcatgaggcctgtgtggcagcatctgcctgtgtgcccgtgaagagtagtctgccatctccggcactactgctgtgggttcccagcctcttagagtttccaaactaagcgtggctcttcttcatttattcttccttttaaatctaaatatgctaccacctcctcgtagcacttacataatacacattcactgtaagaaatctgaaaatacaggtaagcaaaaagaagaatctaagattcattctgaaatccttcctctaagagataaacattattaatattttgatgttactaaaaatacacatacacatctgtatataaatgttttgttccaaatgggatcacacagtacatactcttttgctttttcccttaatatatcatgaatatatttccaaattatgacataattttatgttcttttactatataactttaagggttgcatagtattccattttgcagatgttctaccatatatttaaccaggcttctctaatgtattttgtgtttctttaaccaaatggtgaacatttgggtagttttcaacttttcattattagaagcaggtctgtatgggacaagcttgaagtacacgtgcgttcatttttccctgtcatggagccagacttgtgtctgatgtgctgttgggatttccaggagtttgctttgcatacctgagaagcggccctatttgggcttggggatccttgatagttgttgtctagtaactgactct

SEQ ID NO: 1658 - DNA, 6000 bp, Homo sapiens
gccctgcggagcctcctctgtgctggttccccctactccaagttcccttccctccctggcccccactctatcccagcctggcctttgcttctctcaacaggagcccgatggtgctggagccaagtccccgacatgccagaaactgtcccccaagtggtgcttcctggacggtgagtctactcccagggtgccaagctgtttcgtgttccctccctaggggatcccaggtaggggcagcagaggacctgggcctggacatggcactccctgatcctcagctgccctctctcccacagccaccactgccagccgcttctacaggatcgaccgagcccaggtgagcgattgcaggcctgctccagccacagctgcttccgggccccagggtcgcctctcctgggacgccttccctgttagctcccccgatgggctcacctctgtcctcatgcctctgagagcttttactattgcctgtgtgcatggacagcgtgcggccctgccctccacactggagagtatagggcggtgccagccagaaaggcagtggggtacctaccaaaggcttgctgggtgggtaggagggcctggaagcccagagccatccagggagacacagaagcaaaggcattctggtcaggcgccagctcacctggtaaagtctgggcagtcggaggaggtgtcaggaatgggaaggagtgggagagggacaggcagggccccttgcctggccacctcctttcagtgtttgtgctcatggcagaggcttctccaggtctaccagccttgctgcccctcggcccccaccgtcaggtgccctgacctcccgccctgacctccccccacaggagcacctcaactatgtgactgagatcgcacaggatgagatttatatcctggaccctgagctgctgggggcatcggcccggcctgacctcccaacccccacttcccctctccccacctcaccctgctcacccacgccccggtgagtcctggtgtcccgtccctccagcccctggctttcagccccacctgtaagccgatgacttctgaatccctgcttctagcccctccaccagttaactaaatggtgtcaacctgaacctggccaaagcccacctgacggccttcagccctgtggttctgtggggaagcggcctcacgtccaccctggttccctccctgacttctccctcctctggacctcatccttcagccagtcctggcagcccccggacccaccacctgagcactcctccccacccctactgccaccagcccttcccggctgccacgccctggcccccagctcttatatccctgtggccattcgtgccctcgaacccccatctccataccacggtcaactaaaaatgcagagcataccaggccactccccaacctagaagcttctttctcagcagccctttggacgtggattctccccaggccccccgtcattgcactgggctcccagccccctccctgagttcacctccatggtcctgccccactctcttctcttggttctttgaggcatcaggtgtttgccaccactggacttctgtcatcgctgcctccaactcttcccccatctttccggagctcccccacccccatccccttcgaatctcagcttggctgtttcctccttggagagatcactcccaggaccccctctgcaggggtgccacatcacctgttctgaattcttaagagcacccctgctctcagaactccttatttatttgacttgtttgtatccctgaactagaatgtaagctccatgagggcaaggccttcctctgtctcgtttccctgctgtatccccagtgcctggaatagtgcttggtgtgtagcaggcactcaataaactgtggaaaggatgaagatgcccccagttggggttggggagggcgaccagctggcctgtgccgtagccggtcacagcacatcatgctctgttgcaggtcactgcaaggggatgctgcaccccctcaaggtgaggcctctccctctggggcccctcctttctgcctggttgggggcaggaggctcagtggggtggggatagggcccagacacagccttacacaaacacagcctttgagcttcacgcaccaacggagccctgggcacacatgcctggccggcacagtcctgtccactgaggcaccaacccaagcccaggcctccgactgcagagtaacaggcaggtattccgtgcaggtgaagagctgattgaggctgccaagaggaacgacttctgtaaggtactagctccaggctccagttccttcccccagcagctccctcgggccctggggagcgaggcctctgggttgggccaagagctgacctgctcaggtgctgtcatctgtcatcgtctggccctctgtgggatctccagtgatcgtcccattccacttcactgtatctctgtctaggccacaatagatggctcctagtaggggcttcctagctcagtccacctgtccctggtgcttagaaaggagcaggtcagaggaagcactgctccagggcttggtcaccagtgctgccagagagcccacaggctgtggggtgagaggcccctcctccggtgtgctccagagagacccacagaggcaactcaggagtaagatgtgtgagcgcactcgtttcaggcctgtgctggtgtacccggctgtgggccagcgtgtgagctcagggaaggaggggtggccccaggaggtccagccctgccatgcctcctgccctcagctccaggagctgcaccgagctgggggcgacctcatgcaccgagacgagcagagtcgcacgctcctgcaccacgcagtcagcactggcagcaaggatgtggtccgctacctgctggaccacggtgagccgggcagtggagcccagggcctggggccaaggtgggaggaggaggggctgccaggcctctctgaccaccacctccccttctccagcccccccagagatccttgatgcggtggaggaaaagtaagtatctgggcagtgcagaaccgtggtcaccccggaaaccacccttttccccacccctcccattttgtcaggtcagagcccataaacttcctggtcacatctgtcatcccctgggccacccctattgccccagagccctgaacttcctgccctttctgatggcccttgggagacagatgggtggatcaggggacgggatggggtacacagccagcccctgctcccccagcggggagacctgtttgcaccaagcagcggccctgggccagcgcaccatctgccactacatcgtggaggccggggcctcgctcatgaagacagaccagcaggtgagcagacggcaggcagggagcccacgagggcaccaaccaaacctttcccaaggtcctaggcgggagctggggctgggggctgtccctgggaagacacagtccagaccctgggaaacctgagccagcaggggaggagctggtgggcagagaggcctccctccctgaccaggccacagggaggtagagcccctgcctctcagcctgctaggggttaggcctgcctctggcccctgctgatcgcagctccgccctcctccagggcgacactccccggcagcgggctgagaaggctcaggacaccgagctggccgcctacctggagaaccggcagcactaccagatgatccagcgggaggaccaggagacggctgtgtagcgggccgcccacgggcagcaggagggacaatgcggccaggggacgagcgccttccttgcccacctcactgccacattccagtgggacggccacggggggacctaggccccagggaaagagccccatgccgccccctaaggagccgcccagacctagggctggactcaggagctgggggggcctcacctgttcccctgaggaccccgccggacccggaggctcacagggaacaagacacggctgggttggatatgcctttgccggggttctggggcagggcgctccctggccgcagcagatgccctcccaggagtggaggggctggagagggggaggccttcgggaagaggcttcctgggccccctggtcttcggccgggtccccagcccccgctcctgccccaccccacctcctccgggcttcctcccggaaactcagcgcctgctgcacttgcctgccctgccttgcttggcacccgctccggcgaccctccccgctcccctgtcatttcatcgcggactgtgcggcctgggggtggggggcgggactctcacggtgacatgtttacagctgggtgtgactcagtaaagtggatttttttttcttttctgcttttcttcttttgcgggggaggtctaacaagcagcgggggctgcggggttgtcctcggggtgggggactggacgctgtcgacagcaccttcctggggccccggctcccgtttggtggttggtcccagggcctgcccggttcctgacctctgcccggcggccgcgctcgtcggggccgggggcggggccgatccctccggcttcccgcttcccgcggagaacaacaatgaaagtgaaagaggggtggggcgggggcgagcccgggttctgtggcccatttgccctgtggccttgagcaagcccctcccccaggcctcgggggctctcccggtttgggggaaccgggcgaggcaatgccacaggcccagggttagagggggtgggcacttgcagctgccgatgtggctggatctggaacttctcagacggctcctgtcagcgccaagtttcaccaaatccaggcctgcgggctcctcccccaggacccccactcgcagtccctcaagcctgtgctcccggaaaggcactgggcgaccgcacccgtggctttctctgggcgaccgggtcccagactccccccagcacagcagagcgcttccctgcccacccgcggaaaccgccccaggtgggccgcgccccctccccagcagccagcagggcgccagggctgagccggccgtggaggggagcgggtcccgcgggttatacaggcgccggggctccgcggcaggcaagagaagctgaggcctgagaacggcccgggccttggcgtacggcaggggacgacctgggatgggggcagcgggcggcggcgcagggagtgggccgggggccggtgtgcgcgggcgggacggggcccggggtcgggagaccaccgctcggaagatggggccgggagaggccgccgtcgcagcgcagagggcaccggcggggagacgcgaggacgcggggccgggaacacggacgccggagtagaagcgcggggggcgcgggctggagcgggggcggggacgccggggtcgggggcggtgcgggtttgaggggagggggcggggcgggtccttccctgggggggtggggagagggggcgggggcccatgtgaccggctcagaccggttctggagacaaaaggggccgcggcggccggagcgggacgggcccggcgcgggagggagcgaagcagcgcgggcagcgagcgagtgagcgcgcggcggcccctggtccgcccggccgcggccgatctaggggctgggggctggaggcgggggtgggggtctgagctgcgtcctgggctcgaggcgtcccccggggagtcgcctcttagcggtgcgtccgggctagcggcgaggggccgccccaagtcttcccaccgccgccaccttagcagcccgacttggggcctggaaagtggagcacgcggaggtgggagggccctgcacgcggcccccggtggggaaggggacgggccagggattcagactcgggctctcccctcaggatgcagcaccgaggcttcctcctcctcaccctcctcgccctgctggcgctcacctccgcggtcgccaaaaagaaaggtgatgggggatgatcgaaggagggctggggacgggcaggcgaggcccctccacttctgggctgggccgcctgggttcctagcctggaacccca

SEQ ID NO: 1659 - DNA, 6000 bp, Homo sapiens
cttgctgggtgggtaggagggcctggaagcccagagccatccagggagacacagaagcaaaggcattctggtcaggcgccagctcacctggtaaagtctgggcagtcggaggaggtgtcaggaatgggaaggagtgggagagggacaggcagggccccttgcctggccacctcctttcagtgtttgtgctcatggcagaggcttctccaggtctaccagccttgctgcccctcggcccccaccgtcaggtgccctgacctcccgccctgacctccccccacaggagcacctcaactatgtgactgagatcgcacaggatgagatttatatcctggaccctgagctgctgggggcatcggcccggcctgacctcccaacccccacttcccctctccccacctcaccctgctcacccacgccccggtgagtcctggtgtcccgtccctccagcccctggctttcagccccacctgtaagccgatgacttctgaatccctgcttctagcccctccaccagttaactaaatggtgtcaacctgaacctggccaaagcccacctgacggccttcagccctgtggttctgtggggaagcggcctcacgtccaccctggttccctccctgacttctccctcctctggacctcatccttcagccagtcctggcagcccccggacccaccacctgagcactcctccccacccctactgccaccagcccttcccggctgccacgccctggcccccagctcttatatccctgtggccattcgtgccctcgaacccccatctccataccacggtcaactaaaaatgcagagcataccaggccactccccaacctagaagcttctttctcagcagccctttggacgtggattctccccaggccccccgtcattgcactgggctcccagccccctccctgagttcacctccatggtcctgccccactctcttctcttggttctttgaggcatcaggtgtttgccaccactggacttctgtcatcgctgcctccaactcttcccccatctttccggagctcccccacccccatccccttcgaatctcagcttggctgtttcctccttggagagatcactcccaggaccccctctgcaggggtgccacatcacctgttctgaattcttaagagcacccctgctctcagaactccttatttatttgacttgtttgtatccctgaactagaatgtaagctccatgagggcaaggccttcctctgtctcgtttccctgctgtatccccagtgcctggaatagtgcttggtgtgtagcaggcactcaataaactgtggaaaggatgaagatgcccccagttggggttggggagggcgaccagctggcctgtgccgtagccggtcacagcacatcatgctctgttgcaggtcactgcaaggggatgctgcaccccctcaaggtgaggcctctccctctggggcccctcctttctgcctggttgggggcaggaggctcagtggggtggggatagggcccagacacagccttacacaaacacagcctttgagcttcacgcaccaacggagccctgggcacacatgcctggccggcacagtcctgtccactgaggcaccaacccaagcccaggcctccgactgcagagtaacaggcaggtattccgtgcaggtgaagagctgattgaggctgccaagaggaacgacttctgtaaggtactagctccaggctccagttccttcccccagcagctccctcgggccctggggagcgaggcctctgggttgggccaagagctgacctgctcaggtgctgtcatctgtcatcgtctggccctctgtgggatctccagtgatcgtcccattccacttcactgtatctctgtctaggccacaatagatggctcctagtaggggcttcctagctcagtccacctgtccctggtgcttagaaaggagcaggtcagaggaagcactgctccagggcttggtcaccagtgctgccagagagcccacaggctgtggggtgagaggcccctcctccggtgtgctccagagagacccacagaggcaactcaggagtaagatgtgtgagcgcactcgtttcaggcctgtgctggtgtacccggctgtgggccagcgtgtgagctcagggaaggaggggtggccccaggaggtccagccctgccatgcctcctgccctcagctccaggagctgcaccgagctgggggcgacctcatgcaccgagacgagcagagtcgcacgctcctgcaccacgcagtcagcactggcagcaaggatgtggtccgctacctgctggaccacggtgagccgggcagtggagcccagggcctggggccaaggtgggaggaggaggggctgccaggcctctctgaccaccacctccccttctccagcccccccagagatccttgatgcggtggaggaaaagtaagtatctgggcagtgcagaaccgtggtcaccccggaaaccacccttttccccacccctcccattttgtcaggtcagagcccataaacttcctggtcacatctgtcatcccctgggccacccctattgccccagagccctgaacttcctgccctttctgatggcccttgggagacagatgggtggatcaggggacgggatggggtacacagccagcccctgctcccccagcggggagacctgtttgcaccaagcagcggccctgggccagcgcaccatctgccactacatcgtggaggccggggcctcgctcatgaagacagaccagcaggtgagcagacggcaggcagggagcccacgagggcaccaaccaaacctttcccaaggtcctaggcgggagctggggctgggggctgtccctgggaagacacagtccagaccctgggaaacctgagccagcaggggaggagctggtgggcagagaggcctccctccctgaccaggccacagggaggtagagcccctgcctctcagcctgctaggggttaggcctgcctctggcccctgctgatcgcagctccgccctcctccagggcgacactccccggcagcgggctgagaaggctcaggacaccgagctggccgcctacctggagaaccggcagcactaccagatgatccagcgggaggaccaggagacggctgtgtagcgggccgcccacgggcagcaggagggacaatgcggccaggggacgagcgccttccttgcccacctcactgccacattccagtgggacggccacggggggacctaggccccagggaaagagccccatgccgccccctaaggagccgcccagacctagggctggactcaggagctgggggggcctcacctgttcccctgaggaccccgccggacccggaggctcacagggaacaagacacggctgggttggatatgcctttgccggggttctggggcagggcgctccctggccgcagcagatgccctcccaggagtggaggggctggagagggggaggccttcgggaagaggcttcctgggccccctggtcttcggccgggtccccagcccccgctcctgccccaccccacctcctccgggcttcctcccggaaactcagcgcctgctgcacttgcctgccctgccttgcttggcacccgctccggcgaccctccccgctcccctgtcatttcatcgcggactgtgcggcctgggggtggggggcgggactctcacggtgacatgtttacagctgggtgtgactcagtaaagtggatttttttttcttttctgcttttcttcttttgcgggggaggtctaacaagcagcgggggctgcggggttgtcctcggggtgggggactggacgctgtcgacagcaccttcctggggccccggctcccgtttggtggttggtcccagggcctgcccggttcctgacctctgcccggcggccgcgctcgtcggggccgggggcggggccgatccctccggcttcccgcttcccgcggagaacaacaatgaaagtgaaagaggggtggggcgggggcgagcccgggttctgtggcccatttgccctgtggccttgagcaagcccctcccccaggcctcgggggctctcccggtttgggggaaccgggcgaggcaatgccacaggcccagggttagagggggtgggcacttgcagctgccgatgtggctggatctggaacttctcagacggctcctgtcagcgccaagtttcaccaaatccaggcctgcgggctcctcccccaggacccccactcgcagtccctcaagcctgtgctcccggaaaggcactgggcgaccgcacccgtggctttctctgggcgaccgggtcccagactccccccagcacagcagagcgcttccctgcccacccgcggaaaccgccccaggtgggccgcgccccctccccagcagccagcagggcgccagggctgagccggccgtggaggggagcgggtcccgcgggttatacaggcgccggggctccgcggcaggcaagagaagctgaggcctgagaacggcccgggccttggcgtacggcaggggacgacctgggatgggggcagcgggcggcggcgcagggagtgggccgggggccggtgtgcgcgggcgggacggggcccggggtcgggagaccaccgctcggaagatggggccgggagaggccgccgtcgcagcgcagagggcaccggcggggagacgcgaggacgcggggccgggaacacggacgccggagtagaagcgcggggggcgcgggctggagcgggggcggggacgccggggtcgggggcggtgcgggtttgaggggagggggcggggcgggtccttccctgggggggtggggagagggggcgggggcccatgtgaccggctcagaccggttctggagacaaaaggggccgcggcggccggagcgggacgggcccggcgcgggagggagcgaagcagcgcgggcagcgagcgagtgagcgcgcggcggcccctggtccgcccggccgcggccgatctaggggctgggggctggaggcgggggtgggggtctgagctgcgtcctgggctcgaggcgtcccccggggagtcgcctcttagcggtgcgtccgggctagcggcgaggggccgccccaagtcttcccaccgccgccaccttagcagcccgacttggggcctggaaagtggagcacgcggaggtgggagggccctgcacgcggcccccggtggggaaggggacgggccagggattcagactcgggctctcccctcaggatgcagcaccgaggcttcctcctcctcaccctcctcgccctgctggcgctcacctccgcggtcgccaaaaagaaaggtgatgggggatgatcgaaggagggctggggacgggcaggcgaggcccctccacttctgggctgggccgcctgggttcctagcctggaaccccaggaaggcggctcccgagggagtctccccgtgccccagtcctgaactctgttcctcgcgcgttgtagataaggtgaagaagggcggcccggggagcgagtgcgctgagtgggcctgggggccctgcacccccagcagcaaggattgcggcgtgggtttccgcgagggcacctgcggggcccagacccagcgcatccggtgcagggtgccctgcaactggaagaaggagtttggaggtgaggcggggcgcagtcagagggcaggagacggggggcacagcctcgccgaagcctgggcggacccttggcggagggcggggccgcgggccgcgcagcgctgacctgggccgctctctcgccagccgactgcaagtacaagtttgagaactggggtgcgtgtgatgggggcacaggcaccaaagtccgccaaggcaccctgaagaaggcgcgctacaatgctcagtgccaggagaccatccgcgtcaccaagccctgcacccccaagaccaaagcaaaggccaaaggtcagcgaaaggagaagggggtggggctgtcgcggggggct

SEQ ID NO: 1660 - DNA, 6000 bp, Homo sapiens
tgaccgtgccccctccatttcctccatgaccacatagagacatggggcagttggatgaaatcaatgattcccagtcttggctctatcatggaaccatttgctaacttctttttttctcttatggatcccatatttttaaagatttttactaaatagaaattgacttatacttttccaagctggagtgtggtggcatgatttcagctcactgcaacctccgcctcccgggttcaagtgattctcctgcctcagcctcctgagtagctgggattataggtgctcaccaggcccggctaatttttttgtatttttagtagagacagaatttcaccatgttggccaggctgatttcaaactcctgacctcaagtgatctgctcacctcagcctcccaaagtgctgggattacaggcgtgagtcactatgcccagccgcttactcacattttctagtcaaaatagaaaactgcttaagtcactgtctgcagaagagcaaaaaaaaaaaaagaaataaaaaattgaaaactgctgatcagattgagaaaaacataagattattcaccacctaaagagaaaaaatttcagtcgaaagggaaaaaaattcatttttgtcttaataaggcaaattcacaatttttgaggttttaacaaaatatatgcagaaagacaaggccaccccgtagaacgtgcacacagccctaggcttggaaatggctggatttaataatatctggtctttctttgagccctgaaattctctaacactatgtcttggaacataattttactgttttcagtggttatagagatttgctttacaatttagcattggtctttacccatgattttgtttgacgccaacttgttgggcaggaatgcaccccctgccccccgctttgttatggccttgctcctatagggcaagaatatctgctttaaggccgggtgtggtggctcaggcctgtaatcccagcactttgaggggccaaggcgggcagatcacctgaggtcaggagtttgagaccagcctggccagtatggtgaaatcctgtctctactaaaaataacaaaaattagctgggtgtggtggcacacacctgtaatcccagctatttgggaggccgaaacaagagaaccacttgaacccaggaggcggaggttgcggtgagccgagattatgccactgcactccagcctgggaaacagagcaagattccgtctcacacacaaaaaatatatatatgtctgctttaagtatgcaggccgtgtttgtgctgaacggcaggaatgccaaacttggctgcatggtaccaactagggacctcagagttccaaggagaacaaacagttggttcctggaggctgggggcttgtatcagaccctgaagactaagcatgtgctgggtccattgttgtcctgcacccatggtagtgcactaaacacctaacctatatttaagtgtttttgtttgtccaaaaaatgtcttttttttttgggagtcaagagtcttgctctgttgcccaggctggagtgcagtgacacgatctcagctcactgcagcctccgcctcccgggttcaagctattctcctgtctcagcctcccaaatagctgagactataggcacgcacatccatgcccagctaatttttttatttttagtagagacgaggtgtctccatggtggccaggttggtcttgaactcctgtcctcaagtgatccacctgcctcggcctcccaaagtggtgggattgcaggcatgagacaccgcgcccggcctgccttgtcccttcttaaaatgagttgtccatttgtaagctgctgatttctttgggacattgtctccgtaaacttttcataaagcatcagtgatttcaccattcttccacccaagcttcaccgtaaatttgttgtttgttcttgcttcaatttcagcagaattcatttagctctgataagggctcgcttcaaactgatgtcttatccttcttagtgcctcaaactacatcctgttcactcatgttatagcaagttagtgtgagtttattttggtgcacaaaaatttttttaaatccatgcagtcttttttcataatacgcattttccatgaacttttcgaagaccccttgtagatgtctgttgtttaaaccacccagtttacagtaatttttttttttttttgagatgaagtcttgctctgtcgcccaggctggagtgcattggcacactctcggctcactgcaacctctgcctcctgggttcaagcaatttttctgtctcagtctcccgagtagctgggattacaggtgtgtgccaccatgcctagctaatttatgtgtttttagtagagacggggtttcactatgttggccaggctggtctcgaactcctcaccttgtgatcggcccgcctcggcctcccaaagtattgggattacaggcgtgagccactgcacctggcctacagtaattttatagcagcccaggctaagatagccatttctgggtataagaatgtcatatactgaacaggcctgcaactgtgagtaaaagtctgcaaagaggccgggcagtggctcatacctgtaatcccagcactttggggggccgaggcaggtggatcacctgaggtcagcagttcgagaccagcctgaccaacatggtgaaaccccatctctactaaaaatacaaaattagctgggcgtggtagtgcatgcttgtaatccctagcatgcacttgggagctacttgggaggctgaggcaggagaatcacttgtactcaggaggccgaggttgcagtgagctgagatcacgccactgcactcctttctgggtgacagagtgagactccatctcaaaaaaacaaaacaaaacaaaacaaaaacaaacaaaaaaacccaacaggtaggtagcagtggttcacgcctgtaatccccactttgggaggctaaagtgggcagatcacctgaggtcaggagttcacgtccagcctgggcaacatggtgaaactctgtctctacaaaaatacaaaaattagccaggcatgatggcgggtgcctgtagttccagctattcgggaggctgaggcaggagaatcgcttgaacctaggaggtagaggttgcagtgagccgagttcacgctattgcactccagcctccatctcaaaaacaaaacaacaaaaacccaaaatatatattataattttattttatttattcaattttattttattttattttatttttctaggaacaggtctcattcaggccaggcatggtggctcacgcctgtaatcccagcacttgggaggccgaggtggaggtgggcggatcacctgaggtcaggagttcgagaccatcctggtcaatgtggcgaaaccccatctctactaaaaatacaaaaattagccaggtgtggtggcacacgcctgtaattccagctacttgggatactgagtcaggagaatcacttgaacagggagatggaaattgcagtgagccgagattgttccactgcactccagcctgggtgacagggcgagactccgtctcaaaaaaaaaaaaaaaaaagaaagaaagaaagaaagaaagaaacaggatcttactctgttacccaggctggagtacagtggtgcaatcatagctcactgcagcctggaactcctgggctcaagtgatcctcctgcctcagcctcctcagtagctcagactgcaggcatgcaccaccattcccagctaatttttaatttttttttggtagagatgagggtcttgctatgttgcccaggctggtctcaaactcctggcctcaagcgatcctgccatgtcggcctcccaaagtgttgggattacaagtgtgagccactatgcctggcctaaaaatatatatatgaaaatatataagaaatgggcctcccaggaattaaggtgtttgcgggagtcctggtccccagtttttctgccaacactccctgttcccacacatgacctggtccagaccccaaacagccaggcccaaaggacaggtgaggcgaggcgagaacttgtgcctccccgtgttcctgctctttgtccctctgtcctacttagactaatatttgccttgggtactgcaaacaggaaatgggggagggacaggagtagggcggagggtagggtaggaccagaagcctctctaggcctgccatggggcaggcagccagggagaaggagggcccctcagtggagacccagggatttcagtagcccctgttccgggacaggcgcaggtcctgggaggtgacagaagatagactaaaggcccaagagtccctggacctgactcctcccaggcagctgccacacacaaacacacctccaggcaccctggacaggaaggaggagaaatgggcccctcctccagtggctgagaagctggggcaaatgttggctgttcctatccctggtgcatcccatggcgaggggcaacttccatcaggccacaccttttatctttgtctctatttttgatatctgtgtattatgattatacaaacccccacattggcctatatgtgcagatctgattaagaacttacgatattccatggacattccattcctaatctcctttagtcctcacaacaaagtattattcccattgtatagatgaggaaactgaggcacacagagatgacaagcaaccaccgctatatgttaggattcgaaggagctccaggaaagtctcatagccccactggccagaatgggctaaatctcagagggggagggtgggagatgggggtgacagtgaccttttttgtgactcctcctagaccatccatccctgctcccaggaggacctgtcctcccagatggtggagatggacaggaggactatctacccacccgtccccacggccctgaccctctgacctcaccctctccgctgatttcttcatgttagttcaacattaacccagaggggtcaggacagacaattcctcagtgacccaggagctgacacactatggcgcacgtccgaggcttgcagctgcctggctgcctggccctggctgccctgtgtagccttgtgcacagccagcatggtaagggagtgcttgcaggctggaacaggctggaggactggggtgtgggcccatgggctggggtctcctggctggacagagcacacagagctggcccctaagtaggtctcagccccaggcggccagcttagggaagaagtcaggagctcagggctggaaagagaatggctgcttctctcttccaatatagggagcaggctgggggcaaggggcagtgtaggaggggcacagggggccacatttagcagccttccaggcacttccaccagcccagacagcctctctcagaagccagcaggggagggtgggcttgcttcatgcccccagaatggccaagactgcctgttcctgaggccgctgtcccatgacccccccaccgccttacagtgttcctggctcctcagcaagcacggtcgctgctccagcgggtccggcgagccaacaccttcttggaggaggtgcgcaagggcaacctggagcgagagtgcgtggaggagacgtgcagctacgaggaggccttcgaggctctggagtcctccacggctacggtgagcctgggctgctcggacggtgccggggcctcagaccgggcccaactctagacacttccacagagaagcaagcgaggaacgccacagccccttcgctgctcacagcctcatttcaactctgagcccctcctcacagggctggcaagaggagcggcctcagcctttcctgggggtctctgtgcctggactgtgtccctgtgcagctccatgacatggggaggcctccacagtcttcagacatccacctgccctggagctctgtgtccacatggcctcctcagcggcagactcccacaccacccttgaggggtgggactctggggaggccaccacaagcccccgggctcaagactcagtgttcct

SEQ ID NO: 1661 - DNA, 6000 bp, Homo sapiens
ggtttcactatgttggccaggttggtctcgaactcctgacctcaagtaatccaccagcctcagcctcccaaagtgctgggatcacaggcaagagccactgtgcccagttgggtttttaagtgctggagtaagctaatagaaaagttctggagcatatgaggagggaggttgatcaatgggatgtgtgaattgcattgagttattccacactttgcaaaggtttttctctgtgattaggccatctgtgtttgttaatcagcacccattgaagtgagataggggtccttccagactctgggagataggggtgctatctttcttgatggttatatttcaaagagatggtacccatgtttttttaaaaaaatcttaacttttaggttcagtggtacatgtgcaggtttgttatataagtaaatcgcatgtcataggagtttggtgtacagattatttcatcactcaggtaataagcatagtacctgataggtagttttttgattctctccctcctcccacactccagtctcaagtgggtcctggtatctattgttctcttctttgtgtccatgtgttctcaatgtttagttctcacttataagtaagaacatgcggtatttggttttctgcacctgtgttagttttcttaggataatggtctccagctccatctatattgctacaaagggcacgattttgttcttttttatggcagcatagtattccatggtgtacatgtaccacattttctttacccagtctactgttgatgggcatttaggttgattccaggtttttgctattgtgaatagtgttgtgatgaacatatgggtgcatgcgtctttacagtagaatgatttatattcctttgggtatatacccagcaatggcattgctgggttgacatctcacaccaggcacccatgtttttgagaaagacattcctaggttgtaaaacagacaaaaggcttttaaaattatttacatattgaagcagcacagaaagaatctacagttctttctttataaaagttttttttgttctttttttaacccgtgtctagttctgtcacccaggctggagtgcagtggcgcaatctctgctcacagcaaccttggctcactgcaacctctgcctcttcagctcaagtggttctcccacctcggcctcatgagtagctggtactacagacacatgccaccatgcctggctaattttttgtattttttgtagagagaaggtttcaccatgttgcccatgctggtctgaaattgctgggctcaagtgatccaccctcctcagcctaccaaagtgttgggattacaagcgtgagccattgtgcctgacccatgactataatattgatgggacattctaagtccataggctgtgctggggactctctagcttaaaggtggggtggctccgtggcccacattccaagagtctggttacacattacctacgtattctttctggtcctggaagtctgtatccttcagccaggtgccatagacagtttaaccaagcccagagggaggcggacacaattatatcctggtcttctggtcttacttgggcttatgtgcttgctcagggctattctcggctcagtggtcagacaaaagctttgactgtggtgaacctttgtagcttttaccccagaggccctcaatgcaaggggaatgttgcatacagtccactggtctgcaaatcaagaaatacgtcccccactgggggtagaaagaagactttggggaaaataaaaggagagttttaagggagtcaatttcatattctcttaggtgtgtcctgtatgcactttttcttttctttttttttttttttttttgagatggagtttcactcttatctcccaggctagagtgcaatggcacaatctcggctcactgcaacctccacctcctgagtacaagcaattctcctgcctcagcctcccgagtagctgggattacaggcgcacgccaccacacccatattttttttttttttgtattttcagtagaaatggggtttcatcatgttggccaggctagtctcgaactcctgacctcgagtgatccgcccacctcagcctcccaaagtgctgggattacaggcatgagccaccgcgcccagcctgcactgtacttcttcttttatctgcttgtgaatgtacctgccattagctagttttcctttccctcagcccccctcctttttttctattcttttttatttttttgagatggagtttcactcttgttgcccaggctggagtaaactagttttcctttccctcagcccccctcctttttttcttttcttttttatttttttgagacggagtttcactcttgttgcccaggctggagtaaaatggcacgatatcggctcaccgcaacctccacctttcaggttcaagcgattctcctgcctcagcctcccaagtagctgggatcacaggcatatgccaccatgcccggttaattttgtatttttagtagagacagggtttctctatgttggtcaggctggtcttgaactcctgacctcaggtgatccacccaccttggcctcccaaagtactgggattacaggcgtgagccaccacgcccggccccctcagccccttttatagttgctcttctctctcttgagaaagacggaccttaatccccttggaaacttgctaaagtgcactgcacagggtagaaaactctccgaggtaacaatcaaataaacaatttgagatactcatgtcagaattaataaacagaatgattaacgattgggtaacatatccttttatgattcagctgatttccaattatttacattcttcaaagaataactcagaaatgtttagttaatttgctcacaaattatttactcacatatgatggagtcagttggtaaactgagtaaaataacaaaggcaaaaacagaattgataaagagagggaagaaagggagaggaaaaatactacagacgacctgggaacagggtaaactatctgttggtagctgaccgtggatgtacaaatctcttcaagattgaactgccttattttacaggtaacagcaaccttgactcacagagtaaagtgactttgtctaaagcagtttctcaacagcagcaattctggtatctggggccgggtaattccttgctgtggggactgtcttatgcactagatggcgttcagcagcatccctggcctttacccaccaaataccactaaccccttctcccaaacccaaatgaattcacacactgccaaatgtggggggcggaggtgggataaaacctcctctgcatgagaaccacttctctcaagaaacgtccagtaccagggtaggtgaccaaggattctgtcgcccaagagatgacagaaggctctagataaacgcacactccgttgccattcacaaggcgttttgtttttacttctcaaaagcggcagagattttttttttgagacggagttttttgctttttgtggcccaggctggagtgcaatggcgcgatctcggcccactgcaacctctgcctcccgggttcaagcgattctcctgtctcagcctcccgagtcgctgggattacaggtgcaagccaccacgcccggctaatttttttttgtattttagtagagacagggttccactgtgttgcccaggctggtctcgaactcctgagctcaggcaatccacccgcctcggcctcccaaagtgctaggattgcaggcgtgagccaccgcgcccggccagagattcttttttttttttttttttttttttgagacggagtctcgctctgtcgcccaggctggagtgcagtggcgggatctcgccggccagagattctttataggacatattagtccttgtctttccccccccgcctccatattggaaagatgaactaattgaaatatgacttagtaaaaacattgtgccaacttgaaaccttgatttagtaaaacatctcaatgtttagatcctttgtccaatggtagtatttatcagatgtattcagcttgctcagaaaaccaaaagggcattacaaccacaaaagcaaagaaaaataagaaaacgtcccatgtttggatcttgttctacttgtaaagattaaattgaaatgattaggcttttcgattcatgagccaaataccgtaacaccctggcctttgatgggtttggatttttaacattactcctgagatttcaggaagtggggttacagttacactccttatagctgctaagtgtattaagttgaatgtaaggatgcataatattgtttgaattgagccccactaccaattctttaaaaaatggcatgaattcctatacgtaaatgatttggtggaactattccatcataatttctaaattgtttatataccaaggtagccttaatttgtatatgtttcagtacaatgaaattttactccctctgggatgctgtttggtttgtattttgaggaatgtttttctcatgggaagaggaacctatgacttctgtacctagataatttgttacattaaaaagctggtctttcagcaatgtaagtatatacatacatgtttttatgaggaaaaaaaagcagcagagatcagaagactgccaccgtgcttggagaagaaagaaagccgcgcgtggccttcgcagtgctcgccgggactcgtagttccaggtctgcgggctcctcccaggcggggatctacttcctctctcggccgcggccgcagcacccggaagctgagggggcttaaagtctttcgcttcctttccccgcctcttagtcccgcagattgctagtggatatggccaataggagggctgactggtacttcctgttatttgattggcttaaaattttgcaaccgcccggacaaacttgccgaggattggctgagccttcagttttgaaaatcatagttttcgcccgcgctgcgccgcctggttgctcctcccgtgcggtgagtcccgaaggcccggagccaagtgggtctgggcaagcggggccttacctagggataccaccggacttggatcggagcagccttcaggggacgtggcgcagtcgagtgagtgcgcgtgggcgtggggattggggggtggttcgcgattttttccccggtcctctgctccgtccctgtcgactccggaccagggtcgtgactccccaccccagcccctggctacctgggcatatgagggtcacctcttccaagtggcgaggtcgcctgccttggttctcgggcccgagatgcctcccaccctttccacctaggccctcagcttcctagagcatagccccgttccctccgctcccggctgcttggcaccttgtgcctgtgaggattagtgttgacttggacgcgcaggaagcccgaaaccaacccggttgtttggcggaatgatgccagatggcatttctgtgcagttaaacccctctctcaacgcccccgcccccagctgagcagcattttaaactgaccatttccggaggctgggccgccccttgtcactccccaagcctgttcgctgtcagcggttcagtctcattcagctaacatgggttgctcgcggggttgcccagagccaagactgggcacctgcctttcagaagttgatatctagaaggcggtatagccagtggttaagggcacggtttaaaggcggtatagcccgtggttaagggcacggttctatttatgcccctgatttaccggctgattttgacttctctttgcctcaatttcctcatctgcccatgcgtatcctcaaggttgtggtgagaattaaatgagatgatgtctgactcgggcatggagtatgactcagtaaatgggagcagctgctatgcgctttctgcacagaggtgtggtaggcgcccaacttacagcaccctgaaaaggacaggagtcatagaggaggacgatggggccttcagtctggtgtatggtgtggaagaagtgttggagaggaggaa

SEQ ID NO: 1662 - DNA, 6000 bp, Homo sapiens
aaaacgtcccatgtttggatcttgttctacttgtaaagattaaattgaaatgattaggcttttcgattcatgagccaaataccgtaacaccctggcctttgatgggtttggatttttaacattactcctgagatttcaggaagtggggttacagttacactccttatagctgctaagtgtattaagttgaatgtaaggatgcataatattgtttgaattgagccccactaccaattctttaaaaaatggcatgaattcctatacgtaaatgatttggtggaactattccatcataatttctaaattgtttatataccaaggtagccttaatttgtatatgtttcagtacaatgaaattttactccctctgggatgctgtttggtttgtattttgaggaatgtttttctcatgggaagaggaacctatgacttctgtacctagataatttgttacattaaaaagctggtctttcagcaatgtaagtatatacatacatgtttttatgaggaaaaaaaagcagcagagatcagaagactgccaccgtgcttggagaagaaagaaagccgcgcgtggccttcgcagtgctcgccgggactcgtagttccaggtctgcgggctcctcccaggcggggatctacttcctctctcggccgcggccgcagcacccggaagctgagggggcttaaagtctttcgcttcctttccccgcctcttagtcccgcagattgctagtggatatggccaataggagggctgactggtacttcctgttatttgattggcttaaaattttgcaaccgcccggacaaacttgccgaggattggctgagccttcagttttgaaaatcatagttttcgcccgcgctgcgccgcctggttgctcctcccgtgcggtgagtcccgaaggcccggagccaagtgggtctgggcaagcggggccttacctagggataccaccggacttggatcggagcagccttcaggggacgtggcgcagtcgagtgagtgcgcgtgggcgtggggattggggggtggttcgcgattttttccccggtcctctgctccgtccctgtcgactccggaccagggtcgtgactccccaccccagcccctggctacctgggcatatgagggtcacctcttccaagtggcgaggtcgcctgccttggttctcgggcccgagatgcctcccaccctttccacctaggccctcagcttcctagagcatagccccgttccctccgctcccggctgcttggcaccttgtgcctgtgaggattagtgttgacttggacgcgcaggaagcccgaaaccaacccggttgtttggcggaatgatgccagatggcatttctgtgcagttaaacccctctctcaacgcccccgcccccagctgagcagcattttaaactgaccatttccggaggctgggccgccccttgtcactccccaagcctgttcgctgtcagcggttcagtctcattcagctaacatgggttgctcgcggggttgcccagagccaagactgggcacctgcctttcagaagttgatatctagaaggcggtatagccagtggttaagggcacggtttaaaggcggtatagcccgtggttaagggcacggttctatttatgcccctgatttaccggctgattttgacttctctttgcctcaatttcctcatctgcccatgcgtatcctcaaggttgtggtgagaattaaatgagatgatgtctgactcgggcatggagtatgactcagtaaatgggagcagctgctatgcgctttctgcacagaggtgtggtaggcgcccaacttacagcaccctgaaaaggacaggagtcatagaggaggacgatggggccttcagtctggtgtatggtgtggaagaagtgttggagaggaggaagactggagagtgtcttcctcggtgaggtgttgagtgctctttatctgtgtgcaggtgcttacatgggttgaagaagagatttttgctgctcttccaggagcctgattcttggtacactgattccttctttttcagggtcacctctgttttaacttacggtaaccctttttaaatcgttgcgctaaggtctgctagaagcaaacctccccgtgaaagaagtccaattgctttcatggactttgtgaaagaagctctcatccacgttgcccatttgaacaaatactttttaaaaagttagccagttgttgcttttctctgcaaacctttggcttccttaaacagttttctcttttctggcctgaggtcctgcgctttgccagggctgtggtctgggtgcagaagggttaggggaaggtgagggatgacagtgaaaagggcttgcccatgattggctggctgcagagccgaggtttcagcccaaagcctgtacgatcctgcccatttggccctgccctgattattgctgcccttggcatctgggaacaggggttttgaacatgtgttggtcagttctaacctgtgcagattaagtttatttggtgccctttgtgtggtgggatgagcacctataggatgtttatttctaggtgtagagttgatgggtggattaattcatttaacaaatagtccttgttgccaggcactgctgtgctctgggcattcaacgatgagcaagacagacaggggtttgccctcagagagcaattgtttagtgggcagggacaggcagtaagcaacaggtaaacaagcacgcaagtgctctgcagagaattacaatcaatgaatgggatcatggctggggctactttagattggttttcaggttttcctgaggatctgagatccaagccatgaggagtgagccatacaaaatgtgagacaatgttccagacgcagggcagagcttgttgaggaacaaagactactgtgtccttgaatcaagcctgaggaagtcccatgagactgaaacctgacctggtgctacgccctgtgagggatcaaggggtcagcaatttatcccttccttacaagaccttccattgtaggtgggaggctgagttgtgcatggtttttttttttttgagatagagtctccctctgttgcctgggctggagtgcagtggtgtgatcttggctcattgcagcctctgcctcctaggttcaagcgattctcctgcgtcagcctcctgagtagctgggattataggcgtgcaccaccacacacagctaatttttttgtatctttagtagagactgggtttcaccacgttggccaggctggtcttgaactcctgacctcgtgatctgcccacttcggccttctaaagtgctgggattacaggcgtgagccaccgtgcccggccagttcttggttttaaagaggtaagtcaggatggtggatcactgccattgacttgaggcatgcagtttgttgttatggcttatgaccaccacccattcatttgttctttcactcattcacctgttgggatatttaatgagcccctgttgtgatgtagtagaatatggttgtctcttggaatcctcaggggattggttccaggacctcctttggataccaaaatccacagatgttcaagtccctgatataaaatgacatagtatttgcatataacctacacacatcctcctgtatactttatatctctatattatttataacacctaatatgatgtaaaagctatgcaagtagttgttatactgtattattagggaataatgacaagggaaaagagtctatacatgttcagtacagatgcagctctttttcaaatattttccactggtggttgattgcatccatggatgtggaactcacagatatggagggctgattgtacttcttccttgcttgaagtttttgtaatggctatcaagttttttgttttgtttttttttttttgagacagtctcgctgcgatgcccaggctggggtgcaatggtgtgatcttggctcactgcaacctccacttccttagttcaagtgattctccaggctcagcctcccaagtagctgggattacaggcgcacaccaccatgaccagctaattgtatttctagtagagttggggtttcaccacattggccaggctggttttgaactcctgacctcatgtgatctacctgcctcggcctcccaaagtgctgggattacgggtgtgaaccactgcacccggctggttatcaagttttaaggaggatacctgagctgctagttttataagaaagtgagaaaaaactgtttttgtgttttctcttgctcaatgcttgtaggcaagttttcttaaaagcaagatattgcttactgttcccttcttgttctatttatgctccatttggagggcatttcagctcaagggagagggttgtgggaggccccttgagggcatatctctggatcactactttctcactcattcctttggaacacagaatctcttctgctcactggcctcttaaagaggcagttgggtttgatgttctttggcctgatgtctggagtcagcttgtatgtagtgcagggtggctgtgtcttagccctcacttaaccatgagtagtaagatgagggcctactggagagcgagagcaggactgtgtttgggcagggagtgaggggccctggggtggccaggaagacagatggcagtgccctgtcatcttaagcccagaaaaggccatttataaggaggactgtcaatgtcagaattggttgggaactgtggacttatggggacagtcatgctggcgggggggtggggacagggaggtatttgaagagtgtgagtagaagggcttctctttgtagagatgaggctaggggatgagtgtttggaattctgcagctctggggagtggctgtgagcagagaggggccctggttcgggcactgggtgtttgtggtggttgtgggtcaggtgggtattgcagcttggagaaagccccagacccctaccctgggcccctaacttgtgcctcttgtccctgccttcaccagacagagccaccatggggacgacggccccagggcccattcacctgctggagctatgtgaccagaagctcatggagtttctctgcaacatggataataaggacttggtgtggcttgaggaaatccaagaggaggccgagcgcatgttcaccaggtgaagacgggcacagtgagaggctgggaacaccagggcctgtctgggctgctttggtcttggggacacaacagcccctcgtccccgcctacctggcaaaacagacagcctgtcagggctccctgctgtatactgtgtgtgcagtgtgctgggggcctgacctagtgtcatgggaagaggcagcaggagagatccagtcccttgcctattcgccatcgttgctggctgggcctctcagggtatgtggcaatggacgtgcgcctgggagcttgcttccctgccgtgtctccaggaggaagccctgagtgcccgcaggtgacttgcacatggccttggagagctcacttggtgctggacaccccagcttgacctgtcgctgccaggaaatgggcaggggccaggctgggtgggagaggggaccagtggttcccaggcagcctcgagtgacaccctccttgtgccaaacagagaattcagcaaagagccagagctgatgcccaaaacaccttctcagaagaaccgacggaagaagagacggatttcttatgttcaggatgaaaacagagatcccatcaggagaaggtaggaggggttgggggagagtgagctgagcagtgggctctgcggaggcttggtgccatctgggagtttgattctgaaggtgttgatttggaagtagcagcctgtaggaggggtggtgggtaccaccgcgggtactgcgtgggccatgctgagaggggttgggatgccacagggaactatagcttgacccaagaccctggagtccaaatctgtggctgtgtgttgggggtgggtgtgtttgatctgggccctggagaatgggaaagatttccgtaggt

SEQ ID NO: 1663 - DNA, 6000 bp, Homo sapiens
cactggagtggtaggaatacagagatgaacaagagctggttctactcgtgtgaagtcatatcccagtgcagagaaagagcctgtgttggtcattcattcttcattcatgctttcattcatggaatgcctatggtgtgctaggtttttttttttgagatggagtctcgctgtgtggcccaggctggagtgcagtggtgcaatctcagctcaccgcgacctctgcctcccaggttcaaatgattctcctgcctcagcttcctgagtagcggggatgggattacaggtgcccagcaccatgagtggctaatttttatatttttagtagagatatggtttcactgtgttggccaggctagtctcgatttcctgcgctcaagtgatctgcctgcctcggcttcccaaagtgctgggattccaggtgtgagccaccatgcccagccgatgtgctaggttttgtgcaaggatttggggatatgtgatgacattaagacccaatagttaaaagcactttctgctagatccttgcctttgaatagctttaaatttaatacagttttgtgagccccacctccatcctcttagggtctcagctgggcctaagaactacattgacataagatagatcaacagggccaggtgtggtggctcacacctggaatcccagcattttgagaagctgaggcgggatgattacttgaccccagagttgcagacgaggctgggtgacatagtaaaacactgctgcttaaataaaaaaagaaattagccagttgtgcagtgggcacctgtcatcccagctacttgggaggctaaggtgggagaatcacttgagtgcaggaggtcaaggccatagtggtgagctatgatctcatcactgacttcaccctgggtgacagagcgagacactgtgttattgcactgctataaataaatacctgagactcagtaatttataatgaaaagaggttaagtcggttgcggtcgttcacacctgtaatcccagcactttgggaggccgaagtgggcggatcacctgaggtcaggagtttgagatcagcctagccaacatggcaaaaccccgtctttactaaaaatagaaaaattagctggatatggtggcacatgcctgtagtcccagctactcgggaagctgaagcaggagaattgcttgaacccgggaggcagaggttgcaatgagctgagattgcgccactgcactccagcctgggtgacagagggaaactccctctcaaaaaagaaaaaaaaaagaggtttaattggttcatggttccgcaggctgtacaggaagcctgggggaggcttcaggacatttcagtcatggcagaaggaaaaaggggagtgagcacctcacatggccagagcaagagaaagggagaaaggggagaggtgctacacacttttaaacaaccagatctcccaagcattaactcactatcagagagcagcactgagggggaaattcgcccctgtgatccagtcacctcccactaggccccacctccaacattggggattacaatttgacaacagatttgggtggggacacagatccaaaccatatcaccctgtctcaaaaaaataaaaaagattaacaggagaaaagcatacacatttctttaatacaagttttactggcataggtgaggcagaaatttaaaaataataataagtactgcattcattcactccaagaaaagtaaaagccaaagcccagaatgtggcaaggcaatggttaaaaagaaaagaagagcaagttttcctctgcctagcaagctcacttcaaggacagttataagataatgctgtttgagaagtcaaaaccaaaggaataggctccagatgccccacctccggagtaaaggtgaaagaaaaaaaaaaaaggacaaaatatctggctaaaagaaatttagccagttcttgtttttactttcaatgcagctacaaggccaccagctatgcaaggccacaagttatgccatgtcatcagttatgctatagattatgtgacctgtcattatatgattaactgcctttgctttgctgcttctgtaaatttgcttataaaaatcctgcttggtctttgttcaaggctcagttttttggatgtgaacccactgagctggtgtgcaccttaaaataaatatcctcctgtattcacctatactggtctctcctttttttttttttttagacagagtctcgctgtcgcccaggctgaagtgcagtggcgcgatctcggctcactgcaggctccgccccccggggttcacgccattctcttgcctcagcctcccgagtagctgggactacaggcacccgccacctcgcccggctaattttttgtatttttagtagagacggggtttcactgtgttagccaggatggtctcgatctcctgacctcgtgatccacccgcctcggcctcccaaagtcctgggattacgggcgtgagccaccgcgcccggcctatactggtctctctactcctctgcgtcctgcaacacaggagccctcataaggaaatgaagacccaaagaagtagttggtgtcagttacttctacaccgaattggacaaagaatagtaagttgtaatgaagcaactaagagcggggcccggtagctcacgcctgtaatctcagcactttgggaggccaaggagggaggatcacttgagtccaggagtttgagaccttgtctctatttaaataaaaataaaaattaaaaagatgcaactaaattatgtggggaggcttaccagataacagttattttcctggagaacattacgttcagtgaaataagccaggcacagaaagacacatactttgtgatctcacttatatatggaatctaaaaaaatggaacccacgagtagggagtagaatggcagttacggcggttggggggaacaggggggtgtcagggagatgttggtcaaagggtacaaaatttctgttaggaggaatagaggaataagttcaccagatctattgcacaacatggtgattatagtaaataacaatgtactatgttcttgaaaattacggagaggttttgtgttctcaccacaaaagaagtatgtgaggtaatgcatatgttaattagctcgatttagttattccacaatgtatacatatttcaaaacaacatgttgtacatgacaaatacgtggcaatttttgtcaattaaaaagtaaaaaatgggccgagtggtggctcacgcctgtaatcccagccctttcggaggctgaggcaggtgggtcatttggggccaggagttcgtgaccagcatggtcaacatgctgaaaccctgtctctactaaaaatacaaaaattagctgggcgcggtggtgcacgtctgtaatcccaactactccggaggctgaggcaggagaatcgcttgcccggaaggcagaggttgcagtgagctgagatagagccactgcactccagcctgggtgacagagtgagactgtctcaaaaaaaaaaaaacaaaaaaccccaaaaagtaaaaaatgaaaaaagttatttcaacaaggtctgtacagaattctttccgtctcaacatctcctctttgaggataaggatgttgctttttcttctagtataaggaaggtgtccttcaacatggaaatttcatctgcttttaagacacagaaaaggggtcttcttgcacctgctgagttttaaatgcctttaattcaaaacagccaatatgccatggtggtgtgtatatacacacacacacacacacacacacatatacacacatatatacacatatatatacacacatatatatgcacacatatatatacacacatatatacacacatatatacacacatatatacacacatatatacacacatatatatacacatatatacacatatatacacacatatatatacacacacatatatacacatatatacacatatatacacatatatatacacacatatatacacacatatatatacacacatatacacacatatatacacatatatacacacatatacacatatacatatatacacacatatatacacacatatatacacatatatacacatatatacacacatatatacacacatatatatacacatatatatacatatatatacacacatatatatattttgagactgagtttcgctttgttgcacaggctagagtgcagtggcgcgatcttggctcactgcaacccccacctcccgggctcaagtgattctcctgcctcagcctcccgagtagctgggactacaggcgcatgcctccacgcccggctaattttttgcatttttagtagagacggggtttcatcgtgttagccagcatggtctcgatctcttgacctcgtgatctgcccgcctcggcctcccaaagtgctgagattacaggcgtgagccaccgcgcccggcccttggtggtatatttttaactccttcagtttttaaactataagcccattcttgagtgaaggcgaaagtaaacccatcatggccctgcagtgtgatgtgtgtgcagaggtcgagtgtgtgcgactcctggatgctgggcgcgcagggcatgggtgaggcgggaagaggcggtgccgggggcgcgggcgtcctgcagtcgccgggctcgggaccggggccgggcgctctgcgaggctctcattagccggcggcgcggggaggggccgggtgacctcacgccggcccggccaccgcggccattagacccggtccaattgctggggctgcagcgctgcctccgagaccgcgaggtgggtggatcgggtcttcctggaagggtgcgataaggccgggcgaggtgcctgggatgcttctccccttccgcgaggaagagatctaattgggtagggcgggtgtagactagcctgccgagccgcccgctggcacctgcagcctcctgggcgcccgccgggccccggcgagaaagttgttaaagggagcgaggtggttgttcctggggtccgaggcgcgcctctcacgccctgcccaacagaagccgcagtcccgtggggtctggagacgcagtttcctgttaatgacaataaatccctgctccccctgcctcagacatctacgcagcgaaatcgagcctggccttgagggtccacaccgcgagggaagatgcgtgcgcccattgtaagtgcggggcgaggcggggctgggcggggctgggagccccctgttagtggggactcgttgtctcggagcctgaattactgcttccgagagaggagcctcgaggatgtggggcccgcacctctgtcagctgcgaggcatcggtgtcagctgcgggtcggcgcgcacctgttgggagttgtctcggcgcgtccttccgggggccggtgtgggggcgccctgcctgaaacgcgcccagcggaaggcgggaccctcaggagggaggtggccagggcaggtctgtccgcagaaatctggcgctgccctccggagccacacccggacagcgggacaggccttgggggctatgtcagctgactcatcccatgaccagccctgccagcggagtcccagcgttaactgtgcttggcgactgccccccttccgcctggccggaccgcagcagagggattcagaggatgggatttggaggtggaccctcctagtgttgagcatctggttgtgagactctcatcaagttcaaatccactgtttcccagagtgaaggttttgttttatttatttatttttatttttatttttattttttgagacggagtctcgctctgtcacccaggctggagtgcagtggcatgatctcggctcactgcgacctccgcctctcgggttcaagcgattctcctgcctcagcctaccgagtagctgggagtacaggcgcccgccactacgcctggctaattttttgtatttttagtggagacggggtttcaccgtgttagccaggatggtctcgacttcctgacctcgtg

SEQ ID NO: 1664 - DNA, 6000 bp, Homo sapiens
cgttgtctccccacagaacgtgcagagattgctcgagacggagatgtgggctgaactctgcccctcggccaaaggcgccatcatcctctacaaccgggttcagggaagtcccactggagcggccctagggtccccagccctactcccgccgctctgaaaataataaacgactttattcttggattccgttggcatctgctatttctgtaacagagaggagcaatgggccctgagtgtgtaaggcaggacaagtgacttgggaaaaaaaaaaaaaaaaacccgcccagcctgtgtccccctctgcaagcaggggataagaactgtgcctccctttctttgctggctccagagaggctccggggcggaagcagctccgtaagatatacctcgctgcagaggggagcaacagcggaacggagacacggtggccgggccgaaaacgtcacaaagccgcagagagcgggctctgtcccgcccgctccccaggtgggcgcccgcgcctgtccagcgagtccgcaggctgggggaccggaggcaccaaaggccaatagacatgtaggggcggggtctccaccgatttttttttttttcctgacaggtggacgtggtcttggcatccacgccaatgagaatgtgagggcggggcctgaatagacgcaggaaatggcgacggccgcgggtctgtgagcagcgggggcggggcctggttgtggcccctccttctcccgtccccaagttccctgggtgggaacggggtcttggggtccctggctgggtggccagaccccgaagccagcgctgggaagggctgcggatgcccgggtcagaggaaggggcaggtccaaggacacgcgggtctggtcctgggcaagaaccgccccctctccgggcctgcttcagtcttcctttgcagaacaacgggccaggccccttccctctgcccccgggtgcttgaagtctagccccatcctggtccaatgcgctcttggtagcctcctttcccagctgcccgcccgccgccatgccgcccttactgcccctgcgcctgtgccggctgtggccccgcaaccctccctcccggctcctcggagcggccgccgggcagcggtgagttgggcgcggggggccggcccggttgttcaatgggtttctgtttgccctacgtgctgagttagttgtggtctctactccgtgtcaggaggctcccaggtttgtctcaggtaaccctcgccttccctgctgaggatcagagatagagaagacccccaaggtcatacaccgatttaagcggcagaggaggaagtttgagtccaggtcaaacccaacgctcttaccacagctctagtggtttccaagcatcgctgtatcactgtgcataaccctctgtggggggtgggagatggggaggtgtcgggtacaaaatccagattcctgggctctgctctggagattctgaactggaggaatcaattgggtgggggtcaggaatcagtttctttctctttttccttttttttttttttttttgagatggagtttcgctcgttgcccaggctggagtgcaatggagcaatctcggctcaccacaacctccgcctcccgggttcaagcgattctcctgcctcagcctcccgagtagctgggattacgggcatgcaccaccacgcccggctaattttgtatttttaggagagacagggtttctccatgttagtcaggctggtcttgaactcccgacctcaggtgatccgccctcctcggcctcccaaaatgctggattacaggcgtgagccaccgcgcctgtccaggaatcagttttttccaacaagtttttggactccactttgagaaatcctgacctgcactatgcctgaaacactccaaagggggtgctgatctggagacagatctgtcctgggacctgtttcagccctgtcagctcctggtggctgagttgaagggtgtggcccagaaggcagggcagagctagcttctgggttccttcagcccctgcaaggtttgggactctgtccacaggtccagacccagtacttattatgaactgttgggggtgcatcctggtgccagcactgaggaagttaaacgagctttcttctccaagtccaaagaggtacccgtacccctgaggtggggagggggagcaggaactttgagccagtgggggtgtgcttcaaattcccaggagtagaccagcatctctggcgggtgccacattttttcagccctcatagggagtggcaggtgctcaatggtaggggaaaggctgtgggcaggagccaggggtcctgtctgatgggctgggcttggttttcttgacctgcctgcctgctcttgagaaacctggaccagggcatatggtgaatgcagggggctggcaggtggggagggcttgaacacaggaggaagcaggagtccatgctctctggccttctgaggagtgggcaggcctgagtgagggtcactgaccaggcagggcctctgggtatgactggagccctggtgggtggatgtcatcagcatgggtcctggggagggacaggcaaagggagataaggggagtcctgccccaccccagctgcacccagaccgggaccctgggaacccaagcctgcacagccgctttgtggagctgagcgaggcataccgtgtgctcagccgtgagcagagccgccgcagctatgatgaccagctccgctcaggtagtcccccaaagtctccacgaaccacagtccatgacaagtctgcccaccaaacacacaggtacagtaatcctgccctcagcttgccccacccccaggtctcttgggtagtctcatttccacaatgtcccttcctctgcctcccagcagctcctggacaccccccaacgcacagtactggtcccagtttcacagcgtgaggccacaggggccccagttgaggcagcagcaacacaaacaaaacaaacaagtgctggggtactgcctcctcctcatgctggcgggcatgggcctgcactacattgccttcaggtgatgcctgttctccccggggtgatgggcagagggcaggagggtgggtgaattccagtgtggtcagccagtcctccacagcacctcgtggcccgtactcttgtgtctctcaagctaagagctgcttgaagttggtctctggagcctctccttacttattaaaggcagcgctgcaccaagagctaacgttgtcatttacagtttttcatatttcgaatgtaaatctttcatgctggctgccaggaagggattgagccaaacaaaatcaagcacaagcagcaaatgcagcacagctcattcatttggcagtaggcatctccctgccactctcacgcgtgccacggagctgattctctttattctctttttttcttttttttttctttgagatggagtctcactctgttgcccaggctgcagtgcagtggcgcaatctcggctcactgcaaccccacctctgcctcccaggttcaagcaattcttctgtctcagcctcccgagtagctgggactacaggcgtccaccaccacacccggctagttgttttgtatttttagtagagatggggtttcaccatattggccaggctggtctcaaactcctgacctcaggtgatccacccgcctcagcctcccaaagtactgggattacaggtgagagctaccgcgcctggccacaaagccgattttctatagcagatacctaaaggccagtgcccactgctagcagcctgcctagttcagtgatggagttagacgcataccctttctagtcttctgggaggagcacccccatgtccacagctgctgtcacacctcaaagtgaccagggacttcggatgccattggaccctagacaagccagggccactctgagccctccctatctatcacaggaagggttagactgaggttcctaaccctgtgtaagggtaaaaagctgtgaggcccctagagtggggtggaagggggcaggacttcagggacagcaggaattggattcccagggttaattgtgacccattgcaggaaggtgaagcagatgcaccttaacttcatggatgaaaaggatcggatcatcacagccttctacaacgaagcccgggcacgggccaggtctgtccctgctctattctgctccctgctccctgtccaggaaccacacttcgggatccctatcccaaccacccaggtgccctctcctccagggccaacagaggcatccttcagcaggagcgacaacggctagggcagcggcagccgccaccatccgagccaacccaaggccccgagatcgtgccccggggcgccggcccctgaggggctcacctggatggggcctgcagtgcgttcccgctttgcttccttccctggacggcccgctccccgaaacgcgcgcaataaagtgattcgcagagctcgtgtccggctccctccttaaggcccgacgcccccggccccggcctcgccaaggggcagcgccccgccctccgggtagtggcggcggcgactggggagcccagcctcctgggcggtgcgtcccctttcccctgccgcggcgggaggcgggagggggtgtgtggaggaggcgggccccgccgacggcctcgcccccccaccccgccgccccgcccccgccccacgggccggtggggagcgcgtgtctgggtcacatgagccgcctgcccgccagcccgggcccagccccccgccgcccccgccgtccccgccgccgctgcccgccgccaccggccgcccgcccgcccggctcctccggccgcctccgctgcgctgcgctgcgctgcctgcacccagggctcgggagggggccgcggaggagtcgccccccgcgcccggcccccgcccgccgcgcccgggcccgcgccatggggctctggctgtcgccgccccccgcgccgccgggctagggcgatgcgggcgcccccggcgggcggccccggcgggcaccatgagccctctgctccgccgcctgctgctcgccgcactcctgcagctggcccccgcccaggtacgtgcggcccgacagcgcgcccgcccgcccgccgtgccctctctcaaggttggcggaagtgaggaggcgacccgcggcctcggccgaggggatctgcggggtccggccttggacgcgggcgtctcgggggcccggcgcgtgcatcccctgggaggtgcccctccccgctggcccgccagccccagtctggggccactcctccgccccaccccgtcccctgggcaccgccgggggcggggctccctcggtgcctgcaggacctgcttcggtgggcactgtgcgcgctcctgatctgcatgcagcccccaaacatgctcggctccgcggcctggagatttggcgcggccaccagagcacctgttgcgttttgggccagggcaggtcccgggtggccaggagaggacaggtaaagctagagcagtggccgcaggaacagagcaatctggaaagatgtcagagaggtggtgaagcctactgatgcaagggcaaagccccagggacggtgacagggccacaccctcctaaagtgtaccttgggtacaggtcttttctctcccacaggcccctgtctcccagcctgatgcccctggccaccagaggaaaggtaatacttacaaaaactcggcactagccagcactaagagggtttgtcatgggccctgattccaggtgtccatcatcttgtgtaactcccctagaagattcaaactattattctacccatttcacagaggaggaaattgaggcagtggggttactgggatctggataaacagggcaggggaagacaggttgtgagggcagagtggggagggctagtggagggtggctgtgacttggggactggggaggacagatgctgggagcagctgcaggaaaaccagtgaggacttaacccctaccggtctgctcccagtggtgtcatggatagatgtgt

SEQ ID NO: 1665 - DNA, 6000 bp, Homo sapiens
tgggcatcttcatcagagacgtgcacaacttctgcatcacctaccactatgaccacatgagctttcactacacggtcgtcctgatggtaggctcagggcagggacgcaagggctggctgtgggagacccgaggggctgatggaaaccccactgttgtgcgagggggccactctcccactggatgggcctacagttctcccaggtgatcagcatctgctgggctgccatggggtcactctatgctgagatgacagaaaacaagtacgtctgcttctccgccctgaccatcctgagtgagtggcaggagtgggagggtgcaagagggagcggggagctttggaaccctgagatgtggcaaggagtagccagggaagggtactggggctcatggggggctctgtcccccgcccagtgctcaacggagccatgttcttcaaccgcctgtccttggagtttctggccatcgagtaccgggaggagcaccactgaggcctggggagtcggaacagggctaaggagggggaagcaaaaggctgcctcgggtgttttaataaagttgttgtttatttccacctgccagctccttcatggggcgaggggtcggaggctggagacccgggaggaaagcaagtcaagacaaatgcttgacccacggggactccaggcctggcctgcagccactctggtggacttggctttgggtctggggtcttagtgtcttaggcttgagggagaggggcagtgaagaggtgccctcagcctccccattaccccgcctctcctccacagaacccacatcctaggctggcctagccacaagcaagggggctcaggaggggcccacgcggatgtgagggttcatgagtgggtccaggttgggatcgctgtcagctgcggcccggcctaggcgagacatgagggcaaggagggccaggaagcccagcagtcccaagagtagcagcagccccgcccgctggagcagggtcagcggccgcttccgagacccagcccggctcctggggggatgaggggaaaatcaggtcaggccccagtccctggtggcccccgcggctggagagaagccctggtcaccacccattcctgagcctccatctcctcgtctgtgcctcagggatgatcactcctgcacctgccaccatagggcgttattgtgcagctcaaaccagctgaggcgcacgactgtattctggaaaccacagtgtgtcagacgtcggggagaattacaaagattagggggtgtcagatcgggaaggggcctcaaagagcctgagttcaaacctcctgtgtaggaggcatagagacagtcccagagagaagcaaaacacagcttctgctgcacagccaaggcctctctgcacagccccagcaccaggtactgttactccccagaacaagccccttttgtcatgaaaccatcccttccaggacctctggctcccattccctctccaccccttcctggcattccgccctgcctgaccctgtgtaccttagcagccgggccagccaacccaaggccggccgacgtcggtacttgtcatcgtcacagtctccatggaggcctggtgtccggtcatcatcccgcgtatcatacaccttcctaggggctacagggtggagccactagcatcaatagactcaggaaaactggccgctttggggagggctagggggatcacctgctctcctcagtctgacagaacatctcagaattgtgaggaggtaatggctgtgcctggattaaggaaaggttcctccgggtgggtctctggatcctcaagctccccctatacaaaccattccaccctcttcctatccttctgcggcctggataactcccaggctcaccgtgagtcaagggctcaggattgcccatgtggatcactgtgtgctgctcgggccggcctggggaagctgggggccggggggcctggctgtagaaggctggggcagcagaggcgctgtctacctcctctggtccaggggtactgctggctgtgggtggaaagagagccgtcagcagaagcagtgcatagagctcaggggtagagcatgtgactgcagaccaagggagctgtcagcagagcagggaggctaaagcccaaacagtcggtggaagccaccacttaccattaaaactagaccagtcagagaagtcagacgtgttgaggggctcgggctctgggctcaccacctcatcgatctggaggaaggaatctgggtcaccaggctgcctagtattgtccccacccacccatctgactcaggtggggcccagggcagatagatggtcagacagacgagggactctcaccagagggaggcccagtcctgcccgggcccagttgactgtggccagcttctctctcagtgcggaggccacggggccagccaggttggttggggggaagatggggccattgcagctggggcactgatagccggcaggtgccgtgtttcggggtagctgggcagcacgttcattgaggcaggcccagtgaaagagatcttagggcccatgagacaggggagaagagacatgaggaagaagacacttagggctcctagcctagcaatagtccccagaccattgcaggacatatggacacatgtgtgtgtgccagagccttctcctccccgtcctgttccctaaaatgtcagtcttcttggctaccaccatctaagtccaggcaggtgctaccaagctgtccagctcacaggggtaagtttgggtaggaagaaaacgccacctcccctttcagtcctttcaatgagtcctctctgggcctgcactcatcatattctttgggctaatggctaataatgaacagtttcagaaaaggttcctcgatacacacacaggcacacatatacatgtacacatccctgggcacaaatgtacatgtccttataagcacataatcaaacacaagtggcattccctatatctacactatgggtacaggagccctcacacatacacatctatacactcacaggtttgctaacaggcaccctcaaccatgcattctcttgcactcccacaacacacctgtgttcatatgttcacatacatacatttacccattcattcaccccaagtacagatcaacacactaacactcatttaaacacacaatgtacattaagtgcctgcaagtacacacatgcactcacaaggagaaacacatatggagctgactcttgcatgagctccttcaaaaactggagctaaggctcttaccccagattcaggtcaaagtcatgacacatatgtctgctgacttcttttagctaactttaatgtgggaaactcacttcctctctgtttagccttggaatcagtggtggatcctgaatatctgaaagcaacatgccggtctggctagctaatagtcacggccaccagcatacccgtaagcttgactggttctcgctgaaacctccagattggcagggcttaatttttaggaaagaggaactaggagctttaatttttaggaaagacagtgaggcctagaaaggaagaataacttgcctgaacttacacagcaggtaaggaactttaacaggactagaatctgggctctgagactcgggggactcactgtcctgctgcttgaggagggcctggaaaccagtcaccaagctggcccctgaggctggcctgatccccccgaggtgccaaggcctcaccatagcagacaaggcgggtcgtctctcggctggccaggggtatgttgcacaggcggcaattggggttgtagtcgctatcttggagccattgcaggtaggactggacgatgcactggagtgggagagagatgtcacaactggtgctggggctgctcggcctatcaccccaaggtccgactgtctctttttctctagccacagaggagactcatcctttcgtttgtttaatcaataaatatttattgagcacatactgtgcaccagactctctcttgggaacgggggatatatcagtgaacaaaataaatcaagtccttgcccttgtggggcttacattctagcgcggggcccctcatggatttggaggaagccaataccgccttgcccacccagtgccctgctcagtcgctcccctgaaggccccaccttggcgtgattggctaccaggcagtgctcgcagacgttgacccgatgttcgaagcagaacaggttggtcacctttctcttggggcacttacaaagccccatgatcgatcctgggaaaggggcatgagttggtaggaagtcaggttctggtggccaccactacgctctcaccagcccagtttccactcttaactcccccagacacctctcatattcgccccgatctcagattcctgcccactgtccctccttatgcggagaaacaccccctgcataaatcccgcctccggcgacccctcaatccttctggatcccgcccccggccaggcccctccatcagaggctccccgatactaccggccccgcccccaagacctctcctgagccccaccccctccaagtcccgccccttctctacagaccccagtctctgtgtttactgatcggccgctgcactggttccgaagggcggtagcgatggctcgaggcgcggaagggcagggaccactctccccagggctcctgcgcctctcccttcagccccggccgccccgattatccctccgctgccacgtctcttccgggtgcggcgcgcgctgatgacgccatcgcgcccctgggccacgcctccgctgccgctagaggtgaagacgggtggaaaagactcggggttccgagggccgcagaccgctagccctacgtcacttccgcttcctttcccgcagggcgggtaattcgaacgttttttgcagcgagtggccttcccggttggcgcgcgcccggggcggcggcgctggaggagctcgagacggagcctaagttatgtctgggaggcgaacgcggtccggaggagccgctcagcgctccggtgagcggagggcgcgcgggagacgtgaggtcgagccgtttgggggacgcagtccggtgaaagatggcctcttccctcccgctgccgccgccggaggaggcgcccttaaaagggcttgtttgggaatcttctcgctgtctctagaacctgttctctggactctaaggtctagagtcctcctctaccacttaacttttttctctttccagggccaagggccccatctcctactaagcctctgcggaggtcccagcggaaatcaggctctgaactcccgagcatcctccctgaaatctggccgaaggtgagccccagatttctcacttcctccccttgtggcccctcacctaatgttgagctcacgttcatccctcttctccagacacccagtgcggctgcagtcagaaagcccatcgtcttaaagaggatcgtggcccatgctgtagaggtaaaggctaaggagagtgttgtgggtggttaggcgggcaaaactggggaccagctatgtgatcaattggtattgtcccccgcaggtcccagctgtccaatcacctcgcaggagccctagggtgagttcactttcatctacttaattaagtagaatctgggtcactctagagctggacagcacacattggctcctcacatctgcccagggagctgttttgcagtactgcaaaaacagtttgcctgtgggcacctgcatgcattgccagtcttgattactccctgaagacttaatacacttaactttttatgccttgtgtatttctaccattttcctggaacttcctttaaaagctgagctatgtcttaactccacgtactgcctttctaatccattatgccttcagctttcatgtatgggtgttctgagataagtcatgtgtatgacatttttacagttttagcagaagttattatcaaaggatgtttcattaatagacaatctgaagacatactgactgagaaatgtgaactcctttgaa

SEQ ID NO: 1666 - DNA, 6000 bp, Homo sapiens
tctctggcattttcttcttcttacgtttctgtttctcgggtggtggggagattccagggagagtcatgtctggggcccagggctttgcacaaaccctggggacctcggtgagtttggagcacaccactggcgagactccggacaagtcttctgcccccagcagcccctcgaagccaaagcaggaccggcggcctggggtggaggtagaggcagagcccagggtctccagccggctgtaggaacgcctgactttcttagacatttccaagtctctggcgtccagctctccttccttggagctggactcggcctcagggttcggcacaggagtgctggtgggggtggcagggacgctgtgtgtcttgaaaaggtcctccttagtaagctccctgccagggggctcgttttctttctccaagaaaaaggaaatctgcaccaggacagaagaggggatgccctcaatacttagctggactgcttacttccagaaaagcccgagaagattcagggtggaaagacccacaggacacacactttttttttttttttttgagacggagtcttgctctctcgcccaggctggagtgcagtggcatgatctcggctcactgcaagctccgcctcccgggttcacgccattctcctgcctcagccttccgagtagctgggactacaggcgcccgccacctcgcccggctaattttttgtatttttagtagagacggggtttcaccgtgttagccaggagggtctcgatttcctgacctcgtgatccgcccgcctcggcctcccaaagtgctgggattacaggcgtgagccaccatgcccggccaacacacactttttttaaggaagggacaaatcagaccctgaaagagacatggagagaagaaaacaacccaccattgcttccaaggagtctgcttttgtgacacaaatggacttgcccccatctgctggtgctgtcgcttgtttccaaaatgtgcccagcatccagcctctcctctgaccaactcaagccctcattaggtgtcttctagaccagctcagcaacgttttttgttttgtttccagataaacggtctcaactctgttgcccaggctggagtgcagtggcacgatcatggctcactgaagcctcagcctccagggctcacgcaatcctcctacctcagcctctgagtagccgggactacaggcatgtgacactctgtctggctgatttttttttagtttctttgtagagtaggggaggtctccctttgttgcccaggctggtcccagcgaccttctgatttctctccctgtttccacccttgcctgctgtggtccatctgccacacagctgatgaggattgtcctaaatgtccactcagtccataagtatttatcagtcacctgtcctgtgccaggcactgggaacacagcagggaataaaacagagaaaacccctgccccattctaagagaaaaacaggtaagaaaattcagtattatgttagcagtatcaagcactacaggaaaacagaacaggagagagtgcttggggcaggttagaattgcaaaaagataaaggtcaatacatccctcactgaggtgacattcaagctacaacttgaaggaggtgtgggagtgactcatggccaagttctaggcagtgggaacagaaggtgcaacaaccctgaggccacagtgtactagtcagggtcaaacaacaaggaggccagtgtggctgaagtgaaggcaagaggaagaaactgaagatgaagttcaagagataatgggtggccagatatggtggttcacacctataatcccagcactttgggaggctgaggtgggtggatcacctgaggtcaggagtttgagaccagcctggccaacatagtgaaaccccatctctactgaaaatacaaaaaaaattagccaggtgtggtagcaggtgcctgtaagcccagctacttgggaggctgaggcaggagaatcggttgaacctgggaggcggaggttgcagtgagccgagattgcgccactgcactccagcctgggtgacagtgcgagactccatctcaaaaaaaaaaaacacagggaagctgaacaaattggtggtcactgctgactacgacttcctcattctctatagccaagcagtcacccaggtcctggcaactttatcctgctcgatgtaccatgaatctcagtcaatcaacaagaatgagtggctactaggaaaggcagaagtccctaccctcaaggtgcctgtgttcttagaggggggagagaaagacatcaaacatgcaagaaaatacactataagaactgataaggaccaggcacagtggctcatgcctgtaatcccaacactttaggaggccaaggtgggaggatcacttgagcccaggagttcaagaccggcctgggcaacatagtgaaccctcatctctataaaaaaaattagagaaaacatcaaaaaattagccaggcatggtggcatgtgactatagtcccagctacttgagaggctgaggagggaagatctgcagtgagccgaaatctcgccactgcactccagcctgggtggcagaacaagaccctatctttagaactggtaaggcctaagagaattacatagagaaatgtgacagcaatagggtaagggtggtcagggaaggccactggggggcaattccctctgaacccagtactgtatatcatcctggctttagctcacgcccttggcttcatgcttcagaattcctggacttcacgtcattccactggtcttggagccccagggtagcccttctcaaaaccattctccccacagcccccagaggggtctttcttaaaacactcaaacttgactcggtcactaccttacccagaactctccaaaggctgcccacagacccaagaatgatgcccaagccatgagtgtggcttttgtgcctcatcaggatctgctctgccttagggtgcttcctcccctgctgaggtctgctgcagacactaaacaaattgctattccccgaaccttgatttttctttaaattcccaatctctgcaaacatggcttctttgacctggaacaaacctacttgtctttttttttttttttttttttgagatggagtctcgctttgtcacccaggctggagtgcaggggcgtgatctcggcccactgcaacctccgcctcctgggtttaagcgattctcctgcctcagcctcctgagtagctgggactataggcacgtgccaccatgcctggctaattttgtatttttagtagacacagggtttcaccacgttggccaggctggtcttaaactcttgaccacaagtgatctgcccgcctcagcctcccaaaatgctaggatcacaagcgtgagccactgcacccggcctctacttgtctttaaagactcagttcaaatgtttcttcttccacgaaacattccctgagccacatggtctgggttagctaccatcatagcatctagtattccttattgcagtcccagtacacaacgttgctatcacttgtcattggtctttctccccagttgactctaagccctatcagctcttcaaaggagttcacatttctcagtcagtatgtcttcagattgtctattaatgaaacatcctttgataataacttctgctaaaactgtaaaaatgtcatacacatgacttatctcagaacacccatacatgaaagctgaaggcataatggattagaaaggcagtacgtggagttaagacatagctcagcttttaaaggaagttccaggaaaatggtagaaatacacaaggcataaaaagttaagtgtattaagtcttcagggagtaatcaagactggcaatgcatgcaggtgcccacaggcaaactgtttttgcagtactgcaaaacagctccctgggcagatgtgaggagccaatgtgtgctgtccagctctagagtgacccagattctacttaattaagtagatgaaagtgaactcaccctagggctcctgcgaggtgattggacagctgggacctgcgggggacaataccaattgatcacatagctggtccccagttttgcccgcctaaccacccacaacactctccttagcctttacctctacagcatgggccacgatcctctttaagacgatgggctttctgactgcagccgcactgggtgtctggagaagagggatgaacgtgagctcaacattaggtgaggggccacaaggggaggaagtgagaaatctggggctcaccttcggccagatttcagggaggatgctcgggagttcagagcctgatttccgctgggacctccgcagaggcttagtaggagatggggcccttggccctggaaagagaaaaaagttaagtggtagaggaggactctagaccttagagtccagagaacaggttctagagacagcgagaagattcccaaacaagcccttttaagggcgcctcctccggcggcggcagcgggagggaagaggccatctttcaccggactgcgtcccccaaacggctcgacctcacgtctcccgcgcgccctccgctcaccggagcgctgagcggctcctccggaccgcgttcgcctcccagacataacttaggctccgtctcgagctcctccagcgccgccgccccgggcgcgcgccaaccgggaaggccactcgctgcaaaaaacgttcgaattacccgccctgcgggaaaggaagcggaagtgacgtagggctagcggtctgcggccctcggaaccccgagtcttttccacccgtcttcacctctagcggcagcggaggcgtggcccaggggcgcgatggcgtcatcagcgcgcgccgcacccggaagagacgtggcagcggagggataatcggggcggccggggctgaagggagaggcgcaggagccctggggagagtggtccctgcccttccgcgcctcgagccatcgctaccgcccttcggaaccagtgcagcggccgatcagtaaacacagagactggggtctgtagagaaggggcgggacttggagggggtggggctcaggagaggtcttgggggcggggccggtagtatcggggagcctctgatggaggggcctggccgggggcgggatccagaaggattgaggggtcgccggaggcgggatttatgcagggggtgtttctccgcataaggagggacagtgggcaggaatctgagatcggggcgaatatgagaggtgtctgggggagttaagagtggaaactgggctggtgagagcgtagtggtggccaccagaacctgacttcctaccaactcatgcccctttcccaggatcgatcatggggctttgtaagtgccccaagagaaaggtgaccaacctgttctgcttcgaacatcgggtcaacgtctgcgagcactgcctggtagccaatcacgccaaggtggggccttcaggggagcgactgagcagggcactgggtgggcaaggcggtattggcttcctccaaatccatgaggggccccgcgctagaatgtaagccccacaagggcaaggacttgatttattttgttcactgatatatcccccgttcccaagagagagtctggtgcacagtatgtgctcaataaatatttattgattaaacaaacgaaaggatgagtctcctctgtggctagagaaaaagagacagtcggaccttggggtgataggccgagcagccccagcaccagttgtgacatctctctcccactccagtgcatcgtccagtcctacctgcaatggctccaagatagcgactacaaccccaattgccgcctgtgcaacatacccctggccagccgagagacgacccgccttgtctgctatggtgaggccttggcacctcggggggatcaggccagcctcaggggccagcttggtgactggtttccaggccctcctcaagcagcaggacagtgagtcccccgagtctcagagcccagattctagtcctgttaa

SEQ ID NO: 1667 - DNA, 6000 bp, Homo sapiens
ggaaagcctgcctggagcgttagcagctgtgaacccctagattagagcccttatcgcctacccacccgccctgcatggtaatgagcctctgcaggtgtcagctgccctggggcaataggtcagtttgttccttcccgctgctctgcaaggtgtgtaaatggacaggagcccggtgcgtgactgctacttggtttaacgggatgtctgagtgccaggactgccatctgggctgcatctccaggaggcaaatggctgcagcagggcgcggggatgtgctgttcgtccgcacacctcggtgtgcggcttcacctcttttcaggaggttgtgaggtgtcgtgtgcgcgtgtagggggctgagtacccactgtctccgaacgtgctggcttcttccggtgggcttgacaactgggtttggttctcagtcccagcggtgtgggtccccggtttcctaagaaaccttccacagataactgtaaagaccgctagtgctgtggggagagccggcggtcttcacagactgagcggggaatacgggtccctggaaccccaatcaaacttcaccgccgcggagtctcatgcttggcctccgggaaggcccgaggtgccgcgacttcactcccctcggcctctgccacccctccctcccacccgcggggcgtgaggtcccaggccgttcccggaggcgcctcccccgcccccgccggggccccttgctccggcgactccggccacccatttcctgcgccgcctcaaccccgccccgcgcggggtggaaagtttccctcctcaaggtgggcggctccttctccttccttcccggcaggcagggaaagcccgaagcgaactgggaggagggagcgggggactcggaggtcgcgggcgagagaggggaagtgactcgaccgcagtcacccggcggctgagccaggctcggccagcaggcagcgcccccagccccgccccggcgggacggcagggccttcactcggcgcggggcggggggggagggggtctcgggcgccacctgctggcagagcgcggggccgcacctgccacaaacaccgcggtcttcccgccccagagccagccaggcagagcacaacgacgctgagtgtatttatttatctacgcgccctggagaccggcccctaaatttaaatatccagcacggggccttggccctcctggccgtgggtggttattgggacgggtcctggagcccttccagggcagaggaacccagagcccggaggtgggatgcccctgagccagcagctgccgatagcaacaaaaggtgaggaggagatgggagccaggcactcatcccaatcccagagacgccaagcggaagggaagatgcttcgggccccaccgcaaggctgagggttggccaagctgggggtgcacacatgtggaagaactggaggcccagtgccatgagcagaggctgtaccctagatgcccgccccagtgccagccaacccaagacaggagaaagagtttggcagtttcgcctctgaggaatacatgcctggccctcctgtgaggtgaggcggtaggggggaaggcgcaggctccgaagtctgagggcttgccggagggggagtttctgagccttttgcatgggtgcatgccccctgccccccagcccttcagaggctgatgtggaaggcatcctgcagccactggtcacgggcattgtgcgtctggggcacagtaaggggtggcgggtcaggaggcaggctggcatcgggaggctcctcgtcgtcagacaggcccgcatccggtgggtaggagctgtccgaatggagggaggatgacaggtcctggcagaagctcaggtcttggcacaggtgtttgtagtcctggattgactcgtacaggccccacagctggcacaacaaggacatgtccaactgccgcagccccacctgcagacaactgagggtgggctggagttggggtccaggccaccccagcccagccccgccccctggaatagtgggccccagcccatcttccccgcaccttcctaaacgaagtttttgtggacatcaggcaccacctgcaagctatgcaactttagtcatgaccctcacccaaaaaatggggttatccatttagccggatgaaatgaagtaacgtcagcaaaacatttgaaaatatatggtaactactgccataattggtaactatcactaattattgttaccataacccttgcaacccaactggtgcctgcaagtcctctgagacccaggccgcctgtcccagtcccctgcgttcctccgcgtcagccccccgcccagctggcccggcgcccacccactcaccatctccttgcgcagcgcggccagcgctgagtcgaggttgacaggacgacgcgggccggctgcgggtcccgcgttggcggcgccggcggcgtggcggggcccgtccggggcgcgggcggcgcggctcagctcgtcgtggatgcggctgcgctggctgtagacgcgctccagctcccgccacgagcccccgctcgcattaaggaggccgctgaggccgcgcggcagcggtgggagcccggccaaagcgcagcccgccccgcccggcgcctctgccgagggcagcccgttcatggccggggccggcgcggacggcgatgccacctccttccctccaacgctccgcccgggccgccgcccgcaggccccgcaccccgcggccccgccggagcccagccgccgcccgcaggcctcgctttgttccttccccagctcctcagactccgcctctgccccaccccctctggatgggccgggcctctcttaaaaaggcaacggttgtgggaccacgtcgcgcaaagctgagaaaaggcaacgggacatccactcactcaaggggagatggaaaaatgcggcggaggggggaaaaggctgaagggggcaggcgtggtttcttcacggttctttttgctaccccgtctccccgccgcgccccgccccgcccccacacccaaggaaaatgatctaacagtggagtcaggagactggcaagtccacacttggtgcctaacgtgccacctgacgctggggtcaccacaaactcctgtcggtgtctgagtacctggggtgggcatgagatgggataggctgatagggtcaggatgctcaggggaaggaggggaatctatcaaggggatcggaacacaaaacctcacttccaggtggggaatggacaccagatggcggaagaggctgcagaggtgctgccagagacaaggctagggtccacccctctggctgctacctttgaaaaggctatggcttcttccttagaaaaggggcatcacatagtcctctacctactccctcatcctgactggggaaactgagaagaaacaagctcaactcatctcagggcgtcaaggagagcagagtggagaggtgaagaggccaaaagctggaaaaaggtgagtggagctggggctggcatgcacacttggaaccaggaaaaaaacaaaccacacagaggaacagctgtttttctagagggtttttctcaggggcttctcttagtgctgtagctgctgcaggctgcgcagggcctccgcacatgcgcggataaggccacacagctggatgctagtctccagggaggtgctagagcccagttcagcagaggcccaggtcagcttctgcaagagggctgtctgtgtgcaggccatgacatctgtatttggaggcacagcaggagcaggtggcccctgggctgccttgagtcctgctgcagctccctcacagtgctccggacgaggtactgggggctggggcgcaggtcgagagcccagggggagctctgaggctgaggccagctggtgctcccgagcttgggagagggcagcctgggcattcagagctaaaaagaggagaaagtgggtggaatggtcaggatgcctggcccacctcagccctgagccatctccttttctgctctgctctttctgtgcttgaggtgttttccctgtccctctataaggcaactcatccactttctactttgtatcacatttatgccctagcttcaattctccatcagtactgggcctggttgagctcagactctcgcgcagtggctggcacacaggaggtgcttggtgctcttattgagttaagggtcctctttagagcctaaaggagaaataattttacttctaccccacccagagactccactgtcacctctcagccctactgttctcgggcctctatcaccacttaaccacgcttcccccctaagcatatccggcccctctcccggattattttttactcttaccgggattatctttatccacgtctgagtcgagttcctgacaagccacgcagtagattttccgctgtttgtcttggaggaggatcgtctacggaccaaaaagcacacggggccggaatgagacgccggcaatggggtccagaggggagggccggggaagggctgagtggcctggcccgcggacccatccccggtcactcgcccgagtctcgcctcaccccgcagtccgcacacgtctcgcccagcatgcggtaaccgcgcagcagatagtcgcccatgagccgggagatgcgatcttgccgctcccgtcgcgcctgcagcaccttcgtctccgcctcagtcgggggctcccaggagaagtcgtcgacttctggggaagagaggcatagggactgggggtcttgccggagtgggctgcctcccgtacctcacagccacaaacccctgccgcccaggtcctcaccagctccgttcagggccatgttgccgttgtcaccgccgggctcacaggaagtgacgtcaaagcggagcgccctccgctgcggctccgcccgttccatagctgccgcggatcagggcggacgtgacgccttagcgtggtcctcagacctcgctgtgcccggggtggggcgtgtcggctgctaccgagaacctgctcgggggacgcgtccgtcaaccggaatccaggggacagaagcttccgacgcgcgaggcctcgggaggagcgtctccttggtaactctcctccggtcgcaagacctggaagtggcctcagggggtcgcccttcctgtccgtcgtggatgaaggggaccacttggcttcagaaatccccgctggcctccgcctcccctggggtttccctttcggcgcaggcggggcagcggcgtcatcacaaccatcgccaccccagtaatcacagcgagcggccctttgcgcacgcgtggagccttctcaggcctcagtacttctcacttcgcccggcaaggctggccaggaggggtgcattctccctttccgcgtatttcaagaccactccccttctgcatgctcggtgtcccagtctgtctcctcgctgcctcccgaggcctggaactgaagcaaagttcgccccgaagccgaccgttctttgaagttgaaatcctcaaaaagcctgcagactgaatagcgctgtactgggcacgcgcattgcgcttccagccgcccttgggtgctgcgtgctgggccgggtcgggttggggccttcctacatactcttgcgaccattaggctcttcttgggtgagttgcaagttaaaattaccagggctctctgaacatggaccttggtgctttttttctctctccctcttccgtgttctttttcaaacgcatcttctcccttattagattcagagaagccagacagggcaggcaggggtcctcagatgtgcagtctgcagggcctgaggttgtacaccagggcagtggaaaagcagctaggacttggactttcacagttacatcgacattctcctcttccggatggcacatgccccctcaatctgacctgaagtcccttcctcctggccccctcttccttccacgtagaacccctggaactgtcattcttgctgcctcctgcttacgtggagagccctgtgtccctttcacatctccatctaccagtcaggctcttgggca

SEQ ID NO: 1668 - DNA, 6000 bp, Homo sapiens
ccgcctcggcctcccaaagtgtgggattacaggcatgaaccactgcgcccggccttgctcatcagctttaaagatgagggatggaagtgatgaaggcctggaggggacaaggttgccctaaagcatttctctccaaagacactttactgaaagtggctattaaacccctctaatgtgccacttactgtgggtagtaaaacgatggacactgagagttgggattggaaatgagatgaaactaccttcacgcttgataaatcagggggcccttctgccctgccactcttccccgccttttgagcacgggagaaatctactggtaagagctcaggctcaagaggtacactggctgccagccgggagccccagccctgccactcccaactgggtgactgtggatacatctctcactactccaggcctcagcctcctcatttgcaaattgggaatgatgataagacctagctgccagtgttgtcctaaggaataagcgaaatacttcataaagagctcttaacacagtgcctggcccaaagaaaacacacacaccaagttgagtgtgattatttttattgttgtatcatccagccacttcctgtttcacagaaatgtcaaggtgattcacattgcagtgaaaaccaaaaaaaaaaaaaaaaaaaaaagaatagctgaccccttttcagtgcctgtgtgaaaatacaaatgataagttacgtttttcagaggccaggcaacatggcataggccacttgttgccatgtgaaccatccccaccaaatcagccagcccagggggagctgtaattgagctgtgcatgactgagctgctgtggggtgctctatcacccagaaaagagcctaactacagccatgtcatcagtgccacaaggagggaccaatttggactggctcacatgaaactgtgattcccttccctccccctccccctcctcctttccctcctttctcttccctgactccatgctctgttgcccaggctggagtgcagtggcaggatctccactcactgcaacctccgcctcccagttcaagcaattcccgtctcagcctcatgagtagctggaactacaggctcgcaccaccatgcccagctagtttttgtatttttagtagagatggggtttcactatgttggccaggctggtctcgaactcctgacctcaagtgatctgccagtcttgacctcccaaagtgctgggattaaagttgtgagccaccatgcctggctgaaggtgtgatatattgtcggcaagggaagggtgtgaaagagcccaagcccattgctccacagacactggcctgtccactgtgactgctgcgaataggttttaccaccaacacctgtgagcaccttctatgtcaaggactgtgaagcatctgagatcttacccacttgcaagctaccaaggtagcccgtcaggttcaagaatgctggcagaatacaggagagtcctgggtcagagacaaaggacttgatcgctgtgcagcaaacagcatgagcaccagcatatttccgttagttccttttgaccctaagtcccatgggggtgatgctgatgggctcaggcaagtgtgggcacacagagcgaattacattgtgggagaggaccctaagcttaggaaactcaaagccagtaagcatggctgtcctttgctctggagggagacactatctccatcttccatagctgttccctagataaacatctttgaagctggcgcggtggctcaggcctgtaatcctaccactttgggaggctgaggtgggcagatcacctgaagtcgggagcttgagactagtctggccaacatggtgaaacaccgtctctactagaaataaaaatttaaaaaattggctgggcgcggtggctcatgcctataatcccagcactttgggaggccgagacgggcagatcacgaggtcaggagatcgagaccatcgtggctaacacagtgaaatcctgtctctactaaaaatgcaaaaaaaattaatcgggcgtggtggcaggtgcctgtagtcccagctacttgggaggctgaggcaggagaatggcgtgaatccaggaggcagagcttgcagtgagccgagatcgcaccattgcactccagcctgggcaacagagcaagatgccgtctcaaaaaaaaaaaaaaaattagccagctgtggtggcgcatgcctgtaatcccactccagtgggtgaggcacaagaattgcttgaacctggaaggtggaggtggcagtgagccgagaattgcgccacttcactccaggttgggtgacagagactccatctcaaaaaacaaacaagcaacaaataggcataagtggccccatttttattttgagtcagggtctcgctctgtcacccaggttgcaatgcagaagcctgatcatggcccactgcagcctggatctcctgggctgggagcaatcctcccactcagcctcctgagtagctgggactacaagtgcatgctactgcaccagctaatttaaaaaatacatatatttcttagagatgggttcttactatgctgtccaggctggtctcaagcaatcctcctgcatgtcctcccagagtgctgagattataggtgtgagccacagcacctggtctactggccctgttttacagatgagaaattgaagtccacagcgatgaagtaaactactccaggtgatacagtaaatagatccaggatcaaacccaggcctgcctcattccagttctgcgtcttgtccaccctacagtggaacttaagatggtgagaggccctgagaggagaaaagggacaagagtcctcttgagcagtgggagaagagggatgcaggaaggatgggagatgtgtgtgcatctctctatgtgttgtctggatttggggggtcaaggaccagatttataggaccttggagaccataacaaggactttggatttttgtctaagtgtgatgggagatgccaaatggctttttttttttttagatagagtctcactctgttgcccaggctggagtgcagtggtgtgatctcggctcactgcaacttctgcctcccggttcaagcaattctcctggttcagcctcccgagtagctgggattacgggcgcccgccaccacacctggctaatttttgtatttttagtagagaaggggtttcactatgttggccaggctggtcttgaactcctgatctcaagacatctgcccgcctcggcctcccaatgtgctggggttacaggcgtgagccacagtatcgggcagccagatggtttttagtacaagaacgacactgtattttaaaataattattcagtttcctgcttatgtggggatatgtaaggttgtcatgaggagtaaattggagagattaagtgagaggactcatgtaaggctctttgtaggtgcgaggcagaatagacagttgagtggatattggccatgatggtgacatagtcggcgcactgaggaattcagggtagggctgggagctggagacggtaataacctgggggtctgtgcatacaggctggagtccaagagatggttcagagacagttcctctagtcagcctcaggctaggtgctgtggctcttcgctgtaatcccagcactttgggaggctgaggtgtgaggatcacttgagtccaggagttggagaccagcctgggcaacatgacgaaaccccatctctacaaaaaatacaaaccaaaccaaacaaacacacaaaaaacggtggctctattcagcctgatagaaacgacttgtggtacaggccctaagtcaggtacgctgctgcccaagagcctgactggtagatggagatgtgaaagggacacagggctctccacgtaagcaggaggcagcaagaatgacagttccaggggttctacgtggaaggaagagggggccaggaggaagggacttcaggtcagattgagggggcatgtgccatccggaagaggagaatgtcgatgtaactgtgaaagtccaagtcctagctgcttttccactgccctggtgtacaacctcaggccctgcagactgcacatctgaggacccctgcctgccctgtctggcttctctgaatctaataagggagaagatgcgtttgaaaaagaacacggaagagggagagagaaaaaaagcaccaaggtccatgttcagagagccctggtaattttaacttgcaactcacccaagaagagcctaatggtcgcaagagtatgtaggaaggccccaacccgacccggcccagcacgcagcacccaagggcggctggaagcgcaatgcgcgtgcccagtacagcgctattcagtctgcaggctttttgaggatttcaacttcaaagaacggtcggcttcggggcgaactttgcttcagttccaggcctcgggaggcagcgaggagacagactgggacaccgagcatgcagaaggggagtggtcttgaaatacgcggaaagggagaatgcacccctcctggccagccttgccgggcgaagtgagaagtactgaggcctgagaaggctccacgcgtgcgcaaagggccgctcgctgtgattactggggtggcgatggttgtgatgacgccgctgccccgcctgcgccgaaagggaaaccccaggggaggcggaggccagcggggatttctgaagccaagtggtccccttcatccacgacggacaggaagggcgaccccctgaggccacttccaggtcttgcgaccggaggagagttaccaaggagacgctcctcccgaggcctcgcgcgtcggaagcttctgtcccctggattccggttgacggacgcgtcccccgagcaggttctcggtagcagccgacacgccccaccccgggcacagcgaggtctgaggaccacgctaaggcgtcacgtccgccctgatccgcggcagctatggaacgggcggagccgcagcggagggcgctccgctttgacgtcacttcctgtgagcccggcggtgacaacggcaacatggccctgaacggagctggtgaggacctgggcggcaggggtttgtggctgtgaggtacgggaggcagcccactccggcaagacccccagtccctatgcctctcttccccagaagtcgacgacttctcctgggagcccccgactgaggcggagacgaaggtgctgcaggcgcgacgggagcggcaagatcgcatctcccggctcatgggcgactatctgctgcgcggttaccgcatgctgggcgagacgtgtgcggactgcggggtgaggcgagactcgggcgagtgaccggggatgggtccgcgggccaggccactcagcccttccccggccctcccctctggaccccattgccggcgtctcattccggccccgtgtgctttttggtccgtagacgatcctcctccaagacaaacagcggaaaatctactgcgtggcttgtcaggaactcgactcagacgtggataaagataatcccggtaagagtaaaaaataatccgggagaggggccggatatgcttaggggggaagcgtggttaagtggtgatagaggcccgagaacagtagggctgagaggtgacagtggagtctctgggtggggtagaagtaaaattatttctcctttaggctctaaagaggacccttaactcaataagagcaccaagcacctcctgtgtgccagccactgcgcgagagtctgagctcaaccaggcccagtactgatggagaattgaagctagggcataaatgtgatacaaagtagaaagtggatgagttgccttatagagggacagggaaaacacctcaagcacagaaagagcagagcagaaaaggagatggctcagggctgaggtgggccaggcatcctgaccattccacccactttctcctctttttagctctgaatgcccaggctgccctctcccaagctcgggagcaccagctggcctcagcctcagagctccccctgggctctcgacctgcgccc

SEQ ID NO: 1669 - DNA, 6000 bp, Homo sapiens
ccagcttccaggagctgcggctggaggaggtgatcggcattggaggctttggcaaggtgtacaggggcagctggcgaggtgagctggtggctgtgaaggcagctcgccaggaccccgatgaggacatcagtgtgacagccgagagcgttcgccaggaggcccggctcttcgccatgctggcacaccccaacatcattgccctcaaggctgtgtgcctggaggagcccaacctgtgcctggtgatggagtatgcagccggtgggcccctcagccgagctctggccgggcggcgcgtgcctccccatgtgctggtcaactgggctgtgcagattgcccgtgggatgcactacctgcactgcgaggccctggtgcccgtcatccaccgtgatctcaagtccaacaacagtgagtttctgggggcatggttgggggtggcatggctctggtacacacctgctcccaaccttccactgagcctagcttagggtctactgcaggtaggagctcccaccctagggggtcccagctgaccaggggtgcccatgggctcaagctagcccccaaacagagccccaggcacccagcagagtcttcctgcgccagcttcagaagtccttgaccccagcctgcagctgcggtttggacaagttaagaaattggtatctctcaggtgggccataagcatcctgcccagccatggctcccacctcaaggaagtcctctggaagctcgtgctcctcatcttctcctcccctaaattcatgttcgtggagttggtgctctgtcctcccctcccgtcgtcatgggcagctcctccagaacagatatctcagagagggaagccctccttggcagtcaaggctaaggccagggctggaattctggcctagccctccctggcttcatgacctctagctggttactccaactcggagcctcaatttcagaatctgtaaaaagggagagtgaaacagctcaacagcttgggcaagcccgacctgcgatccccaacccacagcgggtcctcagccatggagatggacatttgagggctggatcgccaagagggcctagcctgaaatcagtgcttgggatgggagtgctgggctaagggagactccatctcccatcatttcaagcccccgacacgctgcccatcatggcccaagagaagtgagtgacagcttcagagggtttcctggtgcacgcagcatttagagagagaaggcatggaagcaggacccagcacacagcagggaccaggagcaggggcctcctagagcccagagtgcaggctggagagcagcagtaggaaatgcaggaggggccaggctcagtgtggtcactggaaaagcatgagacattcttagaggggggtcaacgtggatattttgagcctcctggcctgggctgaccatggacaaggggcttgcaggaaacagagtgctgagccccagatatccaagttcttgccaggactgggggagccaggagaggcctgccaaccatcctacccactcttctcatccctggtagggtgcggttcccacctctcagcctcaaccctgggctctaactatctagggacccccgctacctgccccaatctgagggggattccccgaaggcacagggggaggggactcccatcttctgtttttcctccgttttctttccagaaaaaatggaacaatagcccaggcccctgctccccaccctccccactgcttcctgcgtttcctgctgcccctgagccggcttcctgtccctgctccagcccctgctccctccctagcccagctgcctgcaggggaggaaagagcttggggtggaggacttgcgggaggaaggagcctggaactgctcccctactcccctctagttcccctgcttccctctcagagtctgggaggtggtggtaaagggcaggcaaggtgccctcagcctccctgagcctggcatttaacctcggagaccccagtcctaggcccaagttgctgtctgcaggattggggtggggggagtccctgggctggtggggggcacaggcaggaaacaatggcatgattttcctggacaatgggggccttgtgaggaagcctggcggggagaggagggggaattctccaggcccacgagtcacaggactgaccagccagcccggcctgggcctgacctcccccagttctccccaaaaggactccccctcccaagtgggagacctggcccaggcctcccagaaaggagaagtagggaccacgggaggaaagcggaagaggtgtgagctgcccaggccactcccaagccccacagaggccagcccagggagggagctggtggccaggtccctatcagaggccagggagccctaaaggggcactgagagcttcccccagtttcggggtctctggcccattctcctctgggtgacccctgacctcccatgcctgggatctacatcagacaccagaacagcagttcgagttgggacagttgaaagcacagagaggagcttggagagaaagcagaggatggggcttagcagctggcagagccaggagcggggaggtagcagaaagaccacaagtacaaagaagtcctgaaactttgggtgagttgttgcccctctctgggcctcagattccccacctgaaaaaggtggagagtggccacccggcctgagatactggaacagcactttgccagtctggggtgccacaagtggctagagacaggccaagaagcagcaagtgttggtcttcaaaggggaaggtgggccctggcaccaggggaggtgcccatttccactccacccactgccccagcctgctgtgtttcccctttggaatgagcttgtcgtcgggggcttgctaaatgctcaggtccccgcctccagcagccagaccagaggctgttttgaagttggcagtaaggagtgacagaggagggagaggagggcggagatacgataagtgctttaggacaactggcctttaggatgcttctgccaggtggcagcccccatgcaaaaactttaaaagtgtggtcttgtttcatgctcgtgacagccatctgaggagggttttgttgtcatcctcagcttgatgaagtgttcaggactcagctccaaggtctggctcagaggagtgggtagattttgagaccattctctggattaggaaaaattgcaggaaaatctactgggcatgccgggatagtaaaggtggtcatggagggcacctggacatcaggtagagctgctgaaccaatttgtctggcctggagttgcaaatgtggaagatgccagtggggagagggagctggtacctggaagaggctgagtcagccaggggcagtgggcagaggttgaggagaggtcatgctctgagaagcaccagcgccgaaatggctgaaggtggaggacacagaaacagagccaagcagccaggggctgtgggggctgaggacggtggggcagcggggacagctggcagcagtgccagatgcctcctcaaggcccaggtggcctggccagcagcaggatcagggcttgttgctttaagccctgaaaaatgagcaccctggttctgccacctcctctgggaagtcttccctgactcaccaggctgtattaggtgcccttcccatctgccccaccccctgtgccctatgctgcccccatgacagccgtgtcacacagggcaggagagctgagaggtgtgccctgacatgggtccagaaacatggttgacttgatattgcttctcttccacagtgcagttggctgtaacctgaaaagtagaggggcccttcagacccttcatgactctatgactttgtcctctttctattcctcgaaaacttctctcatttgagccattcctgtcctggtgagagatatgcaagttgctgcttctcctctttgtaccaagtacggtggccccatttgggttaaagccatgagcccctgccaagtctgaccatccacgcctacatttaccccaagctcctcctttgtggccaagaaccatcactttcttggaccccaccctttctcttcccttccagctgcattggtaggtatcttttggagtctttgctttgggagtggctgcacttgccacagtgtgatgtgggcactaggggcctgtggtacctgctgggcttcttttctcaccaagagcttccctcttgctccccactctaaggggggttctgattcacgctcctgcctcaacaaaatgacaggagactcacagatctctcttgaaatcaaagccataaatgtccagagctgccaccttgccagttttgcttcagtgtaatattagggaaaagctagaacactggtttcagagccacacagaccaggttgtaatctctgctgtatttgttgtatgacctctgccaagtcatttccctgcttggtttcctcatctgtgaaacatgaaaaatattatttagctcataaatggttttgagtgctggggttgagtgtgaaatgtttggcctcggccaggtgcagtggcctgtaatcccagcactttgggaggccgaggcgggcagatcacctgaggttgggagttcgagaccagcctgaccaacatggagaaaccctgtctctactaaaaatgcaaaattagtcgggcgtggtggcacatgcccataatcccactactcgggaggctggggcaggacaatcgcttgaacccaggaggtggaggttgcagtgagccaagatcacgccattgcactccagcctgggcaacaagagcaaaactctatcttaagaaaaaaaaaaaaggaaaagaaaagaaatgtctgacctcaagtaggtcctcaagatctagaccaagtcacctctgtgcccccaggacccagccaggatgtccgtcagatgagtttgctcccagctcttaccctgtccccaccacctgatcctggagcatccacaatctggcccctcttctctagttttgctgctgcagcccattgagagtgacgacatggagcacaagaccctgaagatcaccgactttggcctggcccgagagtggcacaaaaccacacaaatgagtgccgcgggcacctacgcctggatggctcctgaggttatcaaggcctccaccttctctaagggcagtgacgtctggaggtgcggcccttggtggggctggacgggctgctacggggctgcagagggcagaggtggctgcctaaatctagggctgggccaagtccagggacagggacccaaaccacttggctcctagttgcttttgggtgaagtggcagtaagggggtgggggttgggagagaaaagggaacacagacctgttgtctcgcccacagttttggggtgctgctgtgggaactgctgaccggggaggtgccataccgtggcattgactgccttgctgtggcctatggcgtagctgttaacaagctcacactgcccatcccatccacctgccccgagcccttcgcacagcttatggccggtaagaggacggggagggcaggtgaggtacagagctccctggcccaggacacatccacccacggaccccttcttattctgtccccgctgcacgccgtgcccctagactgctgggcgcaggacccccaccgcaggcccgacttcgcctccatcctgcagcagttggaggcgctggaggcacaggtcctacgggaaatgccgcgggactccttccattccatgcaggaaggctggaagcgcgagatccagggtctcttcgacgagctgcgagccaaggaaaaggtgcgaggaatcaagggacccagcgttggaacgagtgtctccccgatctccctggggcagagtcggggcgggcgctgccgggattggtgccaggctgacctctccaccatcgctgtctcgggcgcaggaactactgagccgcgaggaggagctgacgcgagcggcgcgcgagcagcggtcacaggcggagcagctgcggcggcgcgagcacctgctgg

SEQ ID NO: 1670 - DNA, 6000 bp, Homo sapiens
tgcctctagagcaagcactcacctccccccacagcaccttcctcctgcagctccccccgccagccgggctggttggcagcgggtccccttcgcgcctcagcaggcagcacaacaggctcactagcagcctgctccaccccaacctgggcctccagctctgccttgcagccagccagtgggggcctcagaacatcacccccagccccatccatgctcagcacacgggcatgtgttttagcgctggcggtactaggcgtccgctgggtcccatatggccgcttggggggcacagcagttccctcctcagccccatggggggccctccgcttccggggtccccctgctgcaccccgggagctctcaggggagtagcaggaagtagaagaggagctgtcagtactgtagcggcgctgcgatcggagactggaggccgggctcagttcactgccctcactagtgtcttcatcctcaaagaagcccccaccttcaagcaggggccgtcgaggggcacggccaggtggagagtgtcttcgcaggggtggctgccgtttgctaggccgtagcagggccaagtccttgggccgcacgaccaggagcggctcagccaggcccggtggcgtccctgctccaatgaccgtgtcaaaggaacgcagcgtgtcatctgaggggaccccggcgtctggtgaggcaggcagctcagcctcagagggtgggtctgtgtcgctgccctcaggggctggcccccctggggggctgtccagatgggtggagttggtcttctcactcttgaagctgctcaatgtctccctgtcagtgccgctgaagcaggagtctgaggagccggctttctggggcgtgggctcccctgagccccgccggtcaaggggctgatagccacctgcccccctgcgttgttcccgtcgactgctggtcctcaccagggcccggtcaggctgggtcagggtcaggaagctcttgctcagctcctggctgaggctccccttcagcagggggctcatgggagtgtcagccatgctgctcccactccagggcgctccatctccagccaggggagaaggctctgaagagtctgtactggcaagagaggggtctgggacagcccctggaggcgtctggggaaggtctccaactgccaaaataaagggaaacagaaaatgaaaaaagggttttctgcaaaacaaactagtggttaagggaggtcttatgccctgtactttccctgagagcccagccacagcagcacactggggaggtcccacagaggaatacagaggagacccaggatggagccaaagttgaggggattcaacaacgaaacagctggtctagcccacaagcctcggccccataaggcccacgcactcagtttctcctgcgagctgagcttcagcatctctcggtcggcagaagtcacgatcacattgttgctgccctgctcccgcaccagctccttgatgtctgcaaccatggccccagaggtgtcagcaggaccccctggcacagcacgccagcccctgttccacagcactatgctccaaccctgaagagcagccacctacctctaaggggcccagagtcctccattcggggcagcagctcctgagtagacagagagccatgaaggaacaaacaaggcaagaagtaggctcaggatgcacccacagtagggactggctcgcagagggacaggaggacaagctgaggtccaggcccactcaccgagacctggttgaagccaaacacagagtgctgggagctgcagcgcaccgggggtgtggaactgactttccggaacactgtcatctccactccggggtccctggcggtgaaaaagagcagcagctttgagctaacctctcctctgtgtatgctacttcctcccatctttgtcactgcttctttttcagaagtcactttacaattccagggctaacacaggacaagtgttcacaatcactcagagagccaatgttccctaagcccctactccaccctgcaaggttccggcccaggcaccaaaaaccctcaatccccagcacagcccctaccccacccacctgggtggattgctgtccccctgggcaggctcttcctccagctcccccatggtagagctgcgcttctccacgatctcgccctggtcaaacatggcatgaagccgataattgacagtcttgatagtagcaaagatgacagccaccacgaggcagtacacgccggccaccatcaagctgggaggcaggacctgaagatgaaagtaagccaggtcccttttcacaaagcctcgcccccacaggatgtacctgccatcaacatcatagctgggattcacagactcacaagaaaatttcatcacctctccacacaaccagtacacagacctcgacaaagggctctgtattctgcttagctggatgagattaagtgtagggttcaaggtcactcgatccaagaaaggaagactttggcccctcttccacacagacccaaactctgcagtgattcctctctctccacgtcccagagcccagggcactgccctgaatccctgccaggctgccctccctctcccggctggagttacaggtggccgtggcgtctcaccatgtacagtaagaagggaaagatgagcaggaagatccacacatagaggtggaagcagttggagaaggtgctctggtgcgggtcgaagaaccaaccgccggtgagcgaggcccacaccccctggcgcaggatctgcaacacctgcgaccccatggccccgccgctgctgcccgcgccccccctcccgggaccctcatgggggcggcccccggcccatgccccgtctggcgcctgagggccccggggcccggcctcacgctcacgccatggcctcccccagcgggggaggggggctcggccgcgcgagggtgcgagcagggggcggggccggccgggacagtcagtggtgcaaggcccggacgcgggggtggggctgcatcaggggcggggtccgggtccccactcctggcccagaattgctccgaggggccgagccggcaggcaggcgcggggcacgggccgggtacccgtcggcggcatccagaggtggtcgtggggtgggtgctcccggggtgcaggcgacagctccctagtctccggaccagggagaaccccaggatctggggtccactttcggggtcgcaggtcacttgcttggggctccgcgctcgcccggcttctgctggtgccggcctaaggaggaggccggaagaaggagccgcgaaccgccagcctgcagtggcgcatgcgcccaacgattccaattgggacccggaaaaggaaaacttgacggcatgaatgcgcaagcgcagaaaggtgatggcgcggtaggacgcgaggggtgccctttgggcgtgcgcagactccaggactaaagcaagttcgagcgtaaaagcgtttgggcgcatgcgtagacccaggcgttgccaacccagggtagacgactgggcggaaccaaagagacagttgagtagccattgggtaacggcaaagtaattggcgcacagctcttccaatgagttacaggaggcggggaaaaggtggaggcgtggactcccctagtagcagcgagagttctgcactaccgaagcacgcccctctcggcccgccccctttaatgctggacctcgtacgtcacgaccgatttcgctcccagcggcgtctacttccgggtcagagctcagacctagggtgtagagaacaaccttccgtaacaggcaggaatagtcgaaataggatagcgtcgtctttcttaaagtgacaggctcaaagcaattggggcagccctatccagaagttgtgagggcgactcagctattctgaatccaatcctgggcaaagttctggacaagtctcaggtttctgccaatggggaagggatatgaagaagcggattgtttcccaggtgaggagaagaagagagccttaggcaatccactccaagagcttgaggtgcagccagttccgtctgtcctccagtcttccccaccccatccaactagctctacgaggcagagctttctcgtcctcatatcatatatgaaaagaatggccgggcgcggtggctcacgcctgtaatcccaacactttgggaggccgaggcgggaggatcacgaggtcaggggtttgagaccagcatggccaacatggtgaaacccgtctccactaaaaatacaaaaattagccggccgtggtgccacgcgccggtagtcccagctactcgggaggctgaggcaggagaatctcttgaacccgggaggcggaggttgcagtgagcttagactgcgccattgcataccagcctgggcgacagagcaagactccgtctcaaaagaagaaaaaagaaagaaaataatgaggctcagaatcgatggatcgcacagtcccacaacttcgcagccaagaccagactcgggttcacccccttcccaagtgtggttctgtaaccccgttttgctgccgccgatgcggatgcagagggcagagatggcccatccttagcagagaccaacctccaccctaggcagcagagcacgcagctgggggcttttctttctagatctcaaaagcctgctgtgatgggggatctggttctgccctttccctctctgcctctcctggcccgcctacccgggaactccccgcctggagcctctgggaggggagcggtgcaggccgcccgcgtcatctgatgctgtttcctgcaggagggagaagagcggaaaaaagtgaaactccaccctccacctctgcctcccgcccccggggccaaagtacaaagggaggaggaagaagggagcggggtcggagccgtcggggccaaaggagacggggccaggaacaggcagtctcggcccaactgcggacgctccctccaccccctgcgcaaaaagacccaaccggagttgaggcgctgcccctgaaggccccaccttacacttggcgggggccggagccaggctcccaggactgctccagaaccgagggaagctcgggtccctccaagctagccatggtgaggcgccggaggccccggggccccacccccccggcctgaccacactgccctgggtgccctcctccagaagcccgagatgcggggggccgggagacaacactcctggctccccagagaggcgtgggtctggggctgagggccagggcccggatgcccaggttccgggactagggccttggcagccagcgggggtggggaccacgggcacccagagaaggtcctccacacatcccagcgccggctcccggccatggagcccttgaagagcctcttcctcaagagccctctagggtcatggaatggcagtggcagcgggggtggtgggggcggtggaggaggccggcctgaggggtctccaaaggcagcgggttatgccaacccggtgtggacagccctgttcgactacgagcccagtgggcaggatgagctggccctgaggaagggtgaccgtgtggaggtgctgtcccgggacgcagccatctcaggagacgagggctggtgggcgggccaggtgggtggccaggtgggcatcttcccgtccaactatgtgtctcggggtggcggcccgcccccctgcgaggtggccagcttccaggagctgcggctggaggaggtgatcggcattggaggctttggcaaggtgtacaggggcagctggcgaggtgagctggtggctgtgaaggcagctcgccaggaccccgatgaggacatcagtgtgacagccgagagcgttcgccaggaggcccggctcttcgccatgctggcacaccccaacatcattgccctcaaggctgtgtgcctggaggagcccaacctgtgcctggtgatggagtatgcagccggtgggcccctcagccgagctctggccgggcggcgcgtgcctccccatgtgctggtcaactgggctgtgcagattg

SEQ ID NO: 1671 - DNA, 6000 bp, Homo sapiens
cagcattagcagtgtacctgccacagggccgagcgagcaccactgctaggaggactcaggctgttgggggaaggcggggaggcactgggccaccgggcttgggaaaggctcaccgctctcatcgtagaaatagtgcacagcaccctcagaagtgtcatcaaaggtgcaggcctcatgcacattggcaccggcccgggtgagcaacagtgaagaggcgaaatgcagcgcagagggcagcgtcagcgcccgggagtgggaggcagcccggccccgctgagcttcctgcaggctgctggagagggtcagccccaggtcagcgccagctagagcttgcgggccctccccggcccccggtgcccctcggcacagctggcaaggtgctcacctgggcggcgagcccatgacagaggctggaggggtggggttgctgcctgcattgtggcgtctccgaatggcctgggtccgcctcacactgcttgagcggtcccgcctgccagtctcctcggccgctgcccagagagaggcccccaagtgtaagtgacagatgctcagacaaggctgggggagtaaggttggggacggtgttccgccagggagctaaaggcctagtacaaccacgccccggctctgaggcccagccaggtcacacagccccatgctcagtttccttacttgcaaacaaggatgacactgatcggccctgccccaccccactggtggtgggaggatgagtgtggatgatgagagtcctcaggggacagagactcaggtgctaatcaaggatgtggagccaggtggctgagccccatgtctaagaggtttggcagacaatgtcaatcaccaccaggcccacgtccatctgctgcctacaaccgaggctgagctgacactgaccaggtccattcttacctgccctttgcccaaccccaagcccgtagctcacgtcccccagcccctgcctctagagcaagcactcacctccccccacagcaccttcctcctgcagctccccccgccagccgggctggttggcagcgggtccccttcgcgcctcagcaggcagcacaacaggctcactagcagcctgctccaccccaacctgggcctccagctctgccttgcagccagccagtgggggcctcagaacatcacccccagccccatccatgctcagcacacgggcatgtgttttagcgctggcggtactaggcgtccgctgggtcccatatggccgcttggggggcacagcagttccctcctcagccccatggggggccctccgcttccggggtccccctgctgcaccccgggagctctcaggggagtagcaggaagtagaagaggagctgtcagtactgtagcggcgctgcgatcggagactggaggccgggctcagttcactgccctcactagtgtcttcatcctcaaagaagcccccaccttcaagcaggggccgtcgaggggcacggccaggtggagagtgtcttcgcaggggtggctgccgtttgctaggccgtagcagggccaagtccttgggccgcacgaccaggagcggctcagccaggcccggtggcgtccctgctccaatgaccgtgtcaaaggaacgcagcgtgtcatctgaggggaccccggcgtctggtgaggcaggcagctcagcctcagagggtgggtctgtgtcgctgccctcaggggctggcccccctggggggctgtccagatgggtggagttggtcttctcactcttgaagctgctcaatgtctccctgtcagtgccgctgaagcaggagtctgaggagccggctttctggggcgtgggctcccctgagccccgccggtcaaggggctgatagccacctgcccccctgcgttgttcccgtcgactgctggtcctcaccagggcccggtcaggctgggtcagggtcaggaagctcttgctcagctcctggctgaggctccccttcagcagggggctcatgggagtgtcagccatgctgctcccactccagggcgctccatctccagccaggggagaaggctctgaagagtctgtactggcaagagaggggtctgggacagcccctggaggcgtctggggaaggtctccaactgccaaaataaagggaaacagaaaatgaaaaaagggttttctgcaaaacaaactagtggttaagggaggtcttatgccctgtactttccctgagagcccagccacagcagcacactggggaggtcccacagaggaatacagaggagacccaggatggagccaaagttgaggggattcaacaacgaaacagctggtctagcccacaagcctcggccccataaggcccacgcactcagtttctcctgcgagctgagcttcagcatctctcggtcggcagaagtcacgatcacattgttgctgccctgctcccgcaccagctccttgatgtctgcaaccatggccccagaggtgtcagcaggaccccctggcacagcacgccagcccctgttccacagcactatgctccaaccctgaagagcagccacctacctctaaggggcccagagtcctccattcggggcagcagctcctgagtagacagagagccatgaaggaacaaacaaggcaagaagtaggctcaggatgcacccacagtagggactggctcgcagagggacaggaggacaagctgaggtccaggcccactcaccgagacctggttgaagccaaacacagagtgctgggagctgcagcgcaccgggggtgtggaactgactttccggaacactgtcatctccactccggggtccctggcggtgaaaaagagcagcagctttgagctaacctctcctctgtgtatgctacttcctcccatctttgtcactgcttctttttcagaagtcactttacaattccagggctaacacaggacaagtgttcacaatcactcagagagccaatgttccctaagcccctactccaccctgcaaggttccggcccaggcaccaaaaaccctcaatccccagcacagcccctaccccacccacctgggtggattgctgtccccctgggcaggctcttcctccagctcccccatggtagagctgcgcttctccacgatctcgccctggtcaaacatggcatgaagccgataattgacagtcttgatagtagcaaagatgacagccaccacgaggcagtacacgccggccaccatcaagctgggaggcaggacctgaagatgaaagtaagccaggtcccttttcacaaagcctcgcccccacaggatgtacctgccatcaacatcatagctgggattcacagactcacaagaaaatttcatcacctctccacacaaccagtacacagacctcgacaaagggctctgtattctgcttagctggatgagattaagtgtagggttcaaggtcactcgatccaagaaaggaagactttggcccctcttccacacagacccaaactctgcagtgattcctctctctccacgtcccagagcccagggcactgccctgaatccctgccaggctgccctccctctcccggctggagttacaggtggccgtggcgtctcaccatgtacagtaagaagggaaagatgagcaggaagatccacacatagaggtggaagcagttggagaaggtgctctggtgcgggtcgaagaaccaaccgccggtgagcgaggcccacaccccctggcgcaggatctgcaacacctgcgaccccatggccccgccgctgctgcccgcgccccccctcccgggaccctcatgggggcggcccccggcccatgccccgtctggcgcctgagggccccggggcccggcctcacgctcacgccatggcctcccccagcgggggaggggggctcggccgcgcgagggtgcgagcagggggcggggccggccgggacagtcagtggtgcaaggcccggacgcgggggtggggctgcatcaggggcggggtccgggtccccactcctggcccagaattgctccgaggggccgagccggcaggcaggcgcggggcacgggccgggtacccgtcggcggcatccagaggtggtcgtggggtgggtgctcccggggtgcaggcgacagctccctagtctccggaccagggagaaccccaggatctggggtccactttcggggtcgcaggtcacttgcttggggctccgcgctcgcccggcttctgctggtgccggcctaaggaggaggccggaagaaggagccgcgaaccgccagcctgcagtggcgcatgcgcccaacgattccaattgggacccggaaaaggaaaacttgacggcatgaatgcgcaagcgcagaaaggtgatggcgcggtaggacgcgaggggtgccctttgggcgtgcgcagactccaggactaaagcaagttcgagcgtaaaagcgtttgggcgcatgcgtagacccaggcgttgccaacccagggtagacgactgggcggaaccaaagagacagttgagtagccattgggtaacggcaaagtaattggcgcacagctcttccaatgagttacaggaggcggggaaaaggtggaggcgtggactcccctagtagcagcgagagttctgcactaccgaagcacgcccctctcggcccgccccctttaatgctggacctcgtacgtcacgaccgatttcgctcccagcggcgtctacttccgggtcagagctcagacctagggtgtagagaacaaccttccgtaacaggcaggaatagtcgaaataggatagcgtcgtctttcttaaagtgacaggctcaaagcaattggggcagccctatccagaagttgtgagggcgactcagctattctgaatccaatcctgggcaaagttctggacaagtctcaggtttctgccaatggggaagggatatgaagaagcggattgtttcccaggtgaggagaagaagagagccttaggcaatccactccaagagcttgaggtgcagccagttccgtctgtcctccagtcttccccaccccatccaactagctctacgaggcagagctttctcgtcctcatatcatatatgaaaagaatggccgggcgcggtggctcacgcctgtaatcccaacactttgggaggccgaggcgggaggatcacgaggtcaggggtttgagaccagcatggccaacatggtgaaacccgtctccactaaaaatacaaaaattagccggccgtggtgccacgcgccggtagtcccagctactcgggaggctgaggcaggagaatctcttgaacccgggaggcggaggttgcagtgagcttagactgcgccattgcataccagcctgggcgacagagcaagactccgtctcaaaagaagaaaaaagaaagaaaataatgaggctcagaatcgatggatcgcacagtcccacaacttcgcagccaagaccagactcgggttcacccccttcccaagtgtggttctgtaaccccgttttgctgccgccgatgcggatgcagagggcagagatggcccatccttagcagagaccaacctccaccctaggcagcagagcacgcagctgggggcttttctttctagatctcaaaagcctgctgtgatgggggatctggttctgccctttccctctctgcctctcctggcccgcctacccgggaactccccgcctggagcctctgggaggggagcggtgcaggccgcccgcgtcatctgatgctgtttcctgcaggagggagaagagcggaaaaaagtgaaactccaccctccacctctgcctcccgcccccggggccaaagtacaaagggaggaggaagaagggagcggggtcggagccgtcggggccaaaggagacggggccaggaacaggcagtctcggcccaactgcggacgctccctccaccccctgcgcaaaaagacccaaccggagttgaggcgctgcccctgaaggccccaccttacacttggcgggggccggagccaggctcccaggactgctccaga

SEQ ID NO: 1672 - DNA, 6000 bp, Homo sapiens
tttgtacttgtggtctttctgctacctccccgctcctggctctgccagctgctaagccccatcctctgctttctctccaagctcctctctgtgctttcaactgtcccaactcgaactgctgttctggtgtctgatgtagatcccaggcatgggaggtcaggggtcacccagaggagaatgggccagagaccccgaaactgggggaagctctcagtgcccctttagggctccctggcctctgatagggacctggccaccagctccctccctgggctggcctctgtggggcttgggagtggcctgggcagctcacacctcttccgctttcctcccgtggtccctacttctcctttctgggaggcctgggccaggtctcccacttgggagggggagtccttttggggagaactgggggaggtcaggcccaggccgggctggctggtcagtcctgtgactcgtgggcctggagaattccccctcctctccccgccaggcttcctcacaaggcccccattgtccaggaaaatcatgccattgtttcctgcctgtgccccccaccagcccagggactccccccaccccaatcctgcagacagcaacttgggcctaggactggggtctccgaggttaaatgccaggctcagggaggctgagggcaccttgcctgccctttaccaccacctcccagactctgagagggaagcaggggaactagaggggagtaggggagcagttccaggctccttcctcccgcaagtcctccaccccaagctctttcctcccctgcaggcagctgggctagggagggagcaggggctggagcagggacaggaagccggctcaggggcagcaggaaacgcaggaagcagtggggagggtggggagcaggggcctgggctattgttccattttttctggaaagaaaacggaggaaaaacagaagatgggagtcccctccccctgtgccttcggggaatccccctcagattggggcaggtagcgggggtccctagatagttagagcccagggttgaggctgagaggtgggaaccgcaccctaccagggatgagaagagtgggtaggatggttggcaggcctctcctggctcccccagtcctggcaagaacttggatatctggggctcagcactctgtttcctgcaagccccttgtccatggtcagcccaggccaggaggctcaaaatatccacgttgacccccctctaagaatgtctcatgcttttccagtgaccacactgagcctggcccctcctgcatttcctactgctgctctccagcctgcactctgggctctaggaggcccctgctcctggtccctgctgtgtgctgggtcctgcttccatgccttctctctctaaatgctgcgtgcaccaggaaaccctctgaagctgtcactcacttctcttgggccatgatgggcagcgtgtcgggggcttgaaatgatgggagatggagtctcccttagcccagcactcccatcccaagcactgatttcaggctaggccctcttggcgatccagccctcaaatgtccatctccatggctgaggacccgctgtgggttggggatcgcaggtcgggcttgcccaagctgttgagctgtttcactctccctttttacagattctgaaattgaggctccgagttggagtaaccagctagaggtcatgaagccagggagggctaggccagaattccagccctggccttagccttgactgccaaggagggcttccctctctgagatatctgttctggaggagctgcccatgacgacgggaggggaggacagagcaccaactccacgaacatgaatttaggggaggagaagatgaggagcacgagcttccagaggacttccttgaggtgggagccatggctgggcaggatgcttatggcccacctgagagataccaatttcttaacttgtccaaaccgcagctgcaggctggggtcaaggacttctgaagctggcgcaggaagactctgctgggtgcctggggctctgtttgggggctagcttgagcccatgggcacccctggtcagctgggaccccctagggtgggagctcctacctgcagtagaccctaagctaggctcagtggaaggttgggagcaggtgtgtaccagagccatgccacccccaaccatgcccccagaaactcactgttgttggacttgagatcacggtggatgacgggcaccagggcctcgcagtgcaggtagtgcatcccacgggcaatctgcacagcccagttgaccagcacatggggaggcacgcgccgcccggccagagctcggctgaggggcccaccggctgcatactccatcaccaggcacaggttgggctcctccaggcacacagccttgagggcaatgatgttggggtgtgccagcatggcgaagagccgggcctcctggcgaacgctctcggctgtcacactgatgtcctcatcggggtcctggcgagctgccttcacagccaccagctcacctcgccagctgcccctgtacaccttgccaaagcctccaatgccgatcacctcctccagccgcagctcctggaagctggccacctcgcaggggggcgggccgccaccccgagacacatagttggacgggaagatgcccacctggccacccacctggcccgcccaccagccctcgtctcctgagatggctgcgtcccgggacagcacctccacacggtcacccttcctcagggccagctcatcctgcccactgggctcgtagtcgaacagggctgtccacaccgggttggcataacccgctgcctttggagacccctcaggccggcctcctccaccgcccccaccacccccgctgccactgccattccatgaccctagagggctcttgaggaagaggctcttcaagggctccatggccgggagccggcgctgggatgtgtggaggaccttctctgggtgcccgtggtccccacccccgctggctgccaaggccctagtcccggaacctgggcatccgggccctggccctcagccccagacccacgcctctctggggagccaggagtgttgtctcccggccccccgcatctcgggcttctggaggagggcacccagggcagtgtggtcaggccgggggggtggggccccggggcctccggcgcctcaccatggctagcttggagggacccgagcttccctcggttctggagcagtcctgggagcctggctccggcccccgccaagtgtaaggtggggccttcaggggcagcgcctcaactccggttgggtctttttgcgcagggggtggagggagcgtccgcagttgggccgagactgcctgttcctggccccgtctcctttggccccgacggctccgaccccgctcccttcttcctcctccctttgtactttggccccgggggcgggaggcagaggtggagggtggagtttcacttttttccgctcttctccctcctgcaggaaacagcatcagatgacgcgggcggcctgcaccgctcccctcccagaggctccaggcggggagttcccgggtaggcgggccaggagaggcagagagggaaagggcagaaccagatcccccatcacagcaggcttttgagatctagaaagaaaagcccccagctgcgtgctctgctgcctagggtggaggttggtctctgctaaggatgggccatctctgccctctgcatccgcatcggcggcagcaaaacggggttacagaaccacacttgggaagggggtgaacccgagtctggtcttggctgcgaagttgtgggactgtgcgatccatcgattctgagcctcattattttctttcttttttcttcttttgagacggagtcttgctctgtcgcccaggctggtatgcaatggcgcagtctaagctcactgcaacctccgcctcccgggttcaagagattctcctgcctcagcctcccgagtagctgggactaccggcgcgtggcaccacggccggctaatttttgtatttttagtggagacgggtttcaccatgttggccatgctggtctcaaacccctgacctcgtgatcctcccgcctcggcctcccaaagtgttgggattacaggcgtgagccaccgcgcccggccattcttttcatatatgatatgaggacgagaaagctctgcctcgtagagctagttggatggggtggggaagactggaggacagacggaactggctgcacctcaagctcttggagtggattgcctaaggctctcttcttctcctcacctgggaaacaatccgcttcttcatatcccttccccattggcagaaacctgagacttgtccagaactttgcccaggattggattcagaatagctgagtcgccctcacaacttctggatagggctgccccaattgctttgagcctgtcactttaagaaagacgacgctatcctatttcgactattcctgcctgttacggaaggttgttctctacaccctaggtctgagctctgacccggaagtagacgccgctgggagcgaaatcggtcgtgacgtacgaggtccagcattaaagggggcgggccgagaggggcgtgcttcggtagtgcagaactctcgctgctactaggggagtccacgcctccaccttttccccgcctcctgtaactcattggaagagctgtgcgccaattactttgccgttacccaatggctactcaactgtctctttggttccgcccagtcgtctaccctgggttggcaacgcctgggtctacgcatgcgcccaaacgcttttacgctcgaacttgctttagtcctggagtctgcgcacgcccaaagggcacccctcgcgtcctaccgcgccatcacctttctgcgcttgcgcattcatgccgtcaagttttccttttccgggtcccaattggaatcgttgggcgcatgcgccactgcaggctggcggttcgcggctccttcttccggcctcctccttaggccggcaccagcagaagccgggcgagcgcggagccccaagcaagtgacctgcgaccccgaaagtggaccccagatcctggggttctccctggtccggagactagggagctgtcgcctgcaccccgggagcacccaccccacgaccacctctggatgccgccgacgggtacccggcccgtgccccgcgcctgcctgccggctcggcccctcggagcaattctgggccaggagtggggacccggaccccgcccctgatgcagccccacccccgcgtccgggccttgcaccactgactgtcccggccggccccgccccctgctcgcaccctcgcgcggccgagcccccctcccccgctgggggaggccatggcgtgagcgtgaggccgggccccggggccctcaggcgccagacggggcatgggccgggggccgcccccatgagggtcccgggagggggggcgcgggcagcagcggcggggccatggggtcgcaggtgttgcagatcctgcgccagggggtgtgggcctcgctcaccggcggttggttcttcgacccgcaccagagcaccttctccaactgcttccacctctatgtgtggatcttcctgctcatctttcccttcttactgtacatggtgagacgccacggccacctgtaactccagccgggagagggagggcagcctggcagggattcagggcagtgccctgggctctgggacgtggagagagaggaatcactgcagagtttgggtctgtgtggaagaggggccaaagtcttcctttcttggatcgagtgaccttgaaccctacacttaatctcatccagctaagcagaatacagagccctttgtcgaggtctgtgtactggttgtgtggagaggtgatgaaattttcttgtgagtctgtgaatcccagctatgatgttgatggcaggtacatcctgtgggggcgaggctttgtgaaaagggacctggcttactttcatcttcaggtcctg

SEQ ID NO: 1673 - DNA, 6000 bp, Homo sapiens
ctgccccattagctccatcttagggtggcacatggaatccccatcacctcactggctgccctgccggccttaacccgcccgtgcatcctggccatgccagctacctgtcttccaaagctcctgtacttttgcccaacagggccttttaacaagaggtccaggagcccccagctttgggtaccacatgtgcccgtggcttttttctgaggcgaggcctgatggctgtcatgcttcagctgcctaaagggacctgtgacccaggcactctgaggcaggcccactacttcagcctgcccttccggccccgagatctggatcccacaatgtcatgatggggaaggtccggggttcaggcggcagttcagtctgttctgccccactcgctccccgccccctgcccatgtgacatctggatgctcccgcgctcggggttatgtttgtgcaggaacaccagctcctgctgctacctggcccacgtgctgcacaggcactgaaggttcacctgagggccacaccatagtgtcggggccagccagaggcgggtgggggacagggttcagggcaggtggggccagctccaccttgatgacttggaagctgaggtggtaaatgttgagtgtgatgatcttgttctcgttgggggctgccatttgtttgagcctcaatttctcatacaaacggggcatattctagggcagaggcaggcagatgctgcttgtgagtgctagccccagcacaggacttcctgctctgtaagtgggtgcttcctggcggctttgtcactcctccctggtctaggggaaggagccaacttgcttggttgctcttgagagctgagatggctctaggagcggggcatcccagaaagcggacttcagctcagtcttggggaggagcctctgaacctccatgctttctcctccagtggccagggccgggaccccggcctgacgcctgcccctcctctcccagagcatcatctactacgtgagccgctcaccaaagctggaggtgtggctcagccatgagggcatcacggcagccctgaggcctgtgcgggtgcccggctatgccgactcggatcccaccttctcgctgagtgtggatgaggactatgacctccgcctgtctggcctctcgctgccctccttttgtgctgtgcacctcgagtggatccagtactgcgcctcccggcgcagccaggtcaggctccactacctgaggctgccacctggggctgtgggacctgggcttccctgctccccttctccccatttggtttcctctcactctgagcctcccttagcctgagccccagcccccactccaaggtccctgtcccaggtctgagctgggctctgggatgggggtccttatgccacagcccgtggaccaggattggaactccccgctggtcacgctgtgttttggcctgtgtgtgctgggccgccgggccctggggacagcctctcacagcatgtctgcaaggtgagtgctcgggtgtcccgcggggcctactgccgtccccaccccacctcttccacgaagagcactgtggtctctggccacagtggccacagaaactgcagtggcccttcctgttggggtacctcttctcccacgggcagggcacttcctggtcatgaccttgcctgctcctcagtgctctgtgagagacatgggcagagattggcctctttgtcaagatggggaaactgaggctcagcgtgaggaaaggcctctgcttggatcactctgaagccttacccctgggtcctcgacacccctctctcccctccctgtttttcctcccacttagcctggagcccttcctctacggcctgcacgccctgttcaagggggattttcgcatcacctccccacgtgacgagtgggtctttgccgacatggacctgcttcaccgcgttgtggcgcctggggttcgcatggccctcaagcttcaccaggttggggaggggtgtgcccagcagcatgggcaggtgggggatgaagcctctctccagggcaggggccactgacccctgttcccgtcttctctaccaggaccacttcacgtccccagatgaatatgaggagccagcagccctatacgatgccattgcggccaacgaggagcggctggtcatctcacatgagggtgacccagcatggcgcagcgccatcctcagcaacacgccctccctgctggcgctgcgccatgtcctggatgatgcctccgacgagtacaagatcatcatgctcaaccggcgccacctcagcttccgagtcatcaaggttgggccggccccacctgccctaagccctgccccaaacccccttgggccggccccctgaccctggcgtgtggctctcaggtgaaccgggagtgcgtgcgcggcctgtgggccgggcagcagcaggagctggtgttcctgcgcaaccgcaaccccgagcgtggcagcatccagaacgccaagcaggcgcttcgcaacatgatcaactcctcctgtgaccagccgctgggctaccccatctacgtgtcgcctctcaccacctcgctggctggcagccacccccagctacgggcactgtggggtggccccatcagcctgggtgccattgcccactggctcctgcgcacctgggagaggtgaggcctcgggaaggggtgacgtgtggcgcgggaggaagctgaggtgcagtacgtccctcctgggtctcagagggaggacgtgctggagccagggcttgaatcccgagagatgaccccctcccagagctgacctgcccctcctagatgtcaccttacccccagagctgacagtggcctttagtcatcaagcactgttgacaacgcaccctcaaaagactctgcaaagtaggtggcagcttcttagaggggaggatcctggggctcagaggtgttagatgacttgtcctggggctgaggactcatgcttgtgaggcctctggcctcagccgtgtccctcctgatcccttttctacctctccacccccaggcttcacaagggctgtggcgccggctgcaatagtggcgggaacgtggatgattcagactgtagtgggggcggtggcctgacctccctcagcaataacccccccgtggcacaccccacacctgagaacacggcaggtgagcaggcgaggctgggctgaacccgtgggtgaggagtgcagcccagctgaggcctctgctgtcttatctgtctcctacaggcaatggtgaccaacccctcccaccaggccctggctgggggccgcggtcctccctgagtggctctggtgatgggcggcccccacctctgctgcagtggcctccccctcggctccctggaccaccccctgcatcgcctatccccacagagggtccccggacctcacggccccctggcccgggtctcctcagttctgagggccccagtggaaagtggagcctggggggccggaaggggctgggaggatctgacggggagccagcctcagggagccccaaaggaggtacccccaaatctcaggtaaggcacctgtgggagggttgggtcccagaaggctaaggcctgctcacccgccaacctctcccccctcccccaggcgcctctagacctcagcctcagcctcagcctcagcctcagccccgatgtcagcactgaggcctcaccccccagagcttcccaggacattccttgcttggacagcagtgcccctgagagtggcacacctatgggtgccctgggcgactggcctgcccctattgaggagcgtgagagcccggcagcccagcccctgctggaacaccagtactgagctacctggcgcccactggaccacctcctaggattcagtaacggacctgctctgctgcctctctgctggaccacagaactgagtggctttggcctacatgtctgaaccctgacctttggctgccttggccagagtaccaaaactgagtgacccagacctctgaccttgacccctgatctctctcatccccagtccagggcctgggctccccagatggaggcagtcagcctcccagccaggccctaagagccaaaccatgggctggtcccacttggagcctgtggccaggaccacctcagcccctgggcctgcactgcctgcaggtgtggcccccttggcctggacctggggcctgaattgtgggaagggtggtttctttctttccttttttttcttttcttttttttttttttttttgtgcttcggagacatcagaattaataacactatttttgattttggttggcagtttctttttctacctgggaatgggtacatgatagtacaggcggctaagttgggatggacaagcacgcagaggggtgaaggatgtggggctgaagtctagtagagatcaagggcagaccaaggtggggttcaggtagaaccgggtcctcttcaccgcatggctgctcccttttcaagcctttatctgaagggtattgtctgccatttcccaccatatggtcagacttccaggtctggtggctcctacatttatcaggcttgttcttggccaaagcctttctctgcacctcagctgctccagggcgtaaagagatgacacctatctaaggtgtttttagaataaatgagagcgcgctagtggaatggttgcccagggcccagtgcttagcaagtgctccataaaatagtggcagactcttgagcacctgctggccgggagctggacgctaggtggcctccgctagccctcccggttggtctggaaggcaggcacaagtttctcaggagaggaaatggccttagaatgagcactgctcggtgctgacctccgccaggcctggaatccccgctgctgcgcttcccgccgcagacagctcccggccggccccgcctcccggcatggccccgcctcccagcatggccccgcccccaggcggagccggcgccgggagcggtagcgggagagcggcagcgggaccccagcgcgggcggcggcggctgggcgggagccccagaggtactggcgggagcaggggacgggaggcactactgtcgggcccgacaggggagaggtggcctagccgtgggcccgggtgatgtgtatgggagtggggtcctcgccacgttcgccgccagcaccctcccaacttccctccgggctccagctcagtcccgagtcaatatgtccagccccctgtctctgaccagccgttcctactctctctgtgtgacggcttagcctggccagccagccggtgagtggaagcggcggctcctgactcctggtggcggcactgtgaccccctccccctcaacactgcaagtgtgtgcggggctcccccttattctgaggctcctcttcttcttaggcggcctccaccccagtccctggcctggcctgggaggaaacatctgtcgcgccccctggcagccgaaatggggtcatgacctccagatgtgctgggaagtggccagctcctcctcctggggcagccaggccttccggatctgtgggggcggggccggccctttccccccacccctagtgacacaggcccggaggaatgtcctagcctcaatggaccctgtgtgaagcttcagggtggggggcagagcccgagaacacccctcaaggcagcgccagagcctggcactgggccacagcaagaggcagcgcacaggctgggtgcacacatgcacagatctcacttccaagcgtgcagagctcagcccacaaggagcggggcttgcacagaccccctccctcatgccctcctactccttcacacactatagcccaggcccgagcgctgaatgtgcccagagcttggctcatggagccaggggctacacccgtcacacacacacatagctagcgacactcacctcattcttctcagtctctcagcagccttgggaggggacagaaataattaaacccaatttttttctttgtttttttggagacagtctcactctgtcccgcag

SEQ ID NO: 1674 - DNA, 6000 bp, Homo sapiens
gttggggaggggtgtgcccagcagcatgggcaggtgggggatgaagcctctctccagggcaggggccactgacccctgttcccgtcttctctaccaggaccacttcacgtccccagatgaatatgaggagccagcagccctatacgatgccattgcggccaacgaggagcggctggtcatctcacatgagggtgacccagcatggcgcagcgccatcctcagcaacacgccctccctgctggcgctgcgccatgtcctggatgatgcctccgacgagtacaagatcatcatgctcaaccggcgccacctcagcttccgagtcatcaaggttgggccggccccacctgccctaagccctgccccaaacccccttgggccggccccctgaccctggcgtgtggctctcaggtgaaccgggagtgcgtgcgcggcctgtgggccgggcagcagcaggagctggtgttcctgcgcaaccgcaaccccgagcgtggcagcatccagaacgccaagcaggcgcttcgcaacatgatcaactcctcctgtgaccagccgctgggctaccccatctacgtgtcgcctctcaccacctcgctggctggcagccacccccagctacgggcactgtggggtggccccatcagcctgggtgccattgcccactggctcctgcgcacctgggagaggtgaggcctcgggaaggggtgacgtgtggcgcgggaggaagctgaggtgcagtacgtccctcctgggtctcagagggaggacgtgctggagccagggcttgaatcccgagagatgaccccctcccagagctgacctgcccctcctagatgtcaccttacccccagagctgacagtggcctttagtcatcaagcactgttgacaacgcaccctcaaaagactctgcaaagtaggtggcagcttcttagaggggaggatcctggggctcagaggtgttagatgacttgtcctggggctgaggactcatgcttgtgaggcctctggcctcagccgtgtccctcctgatcccttttctacctctccacccccaggcttcacaagggctgtggcgccggctgcaatagtggcgggaacgtggatgattcagactgtagtgggggcggtggcctgacctccctcagcaataacccccccgtggcacaccccacacctgagaacacggcaggtgagcaggcgaggctgggctgaacccgtgggtgaggagtgcagcccagctgaggcctctgctgtcttatctgtctcctacaggcaatggtgaccaacccctcccaccaggccctggctgggggccgcggtcctccctgagtggctctggtgatgggcggcccccacctctgctgcagtggcctccccctcggctccctggaccaccccctgcatcgcctatccccacagagggtccccggacctcacggccccctggcccgggtctcctcagttctgagggccccagtggaaagtggagcctggggggccggaaggggctgggaggatctgacggggagccagcctcagggagccccaaaggaggtacccccaaatctcaggtaaggcacctgtgggagggttgggtcccagaaggctaaggcctgctcacccgccaacctctcccccctcccccaggcgcctctagacctcagcctcagcctcagcctcagcctcagccccgatgtcagcactgaggcctcaccccccagagcttcccaggacattccttgcttggacagcagtgcccctgagagtggcacacctatgggtgccctgggcgactggcctgcccctattgaggagcgtgagagcccggcagcccagcccctgctggaacaccagtactgagctacctggcgcccactggaccacctcctaggattcagtaacggacctgctctgctgcctctctgctggaccacagaactgagtggctttggcctacatgtctgaaccctgacctttggctgccttggccagagtaccaaaactgagtgacccagacctctgaccttgacccctgatctctctcatccccagtccagggcctgggctccccagatggaggcagtcagcctcccagccaggccctaagagccaaaccatgggctggtcccacttggagcctgtggccaggaccacctcagcccctgggcctgcactgcctgcaggtgtggcccccttggcctggacctggggcctgaattgtgggaagggtggtttctttctttccttttttttcttttcttttttttttttttttttgtgcttcggagacatcagaattaataacactatttttgattttggttggcagtttctttttctacctgggaatgggtacatgatagtacaggcggctaagttgggatggacaagcacgcagaggggtgaaggatgtggggctgaagtctagtagagatcaagggcagaccaaggtggggttcaggtagaaccgggtcctcttcaccgcatggctgctcccttttcaagcctttatctgaagggtattgtctgccatttcccaccatatggtcagacttccaggtctggtggctcctacatttatcaggcttgttcttggccaaagcctttctctgcacctcagctgctccagggcgtaaagagatgacacctatctaaggtgtttttagaataaatgagagcgcgctagtggaatggttgcccagggcccagtgcttagcaagtgctccataaaatagtggcagactcttgagcacctgctggccgggagctggacgctaggtggcctccgctagccctcccggttggtctggaaggcaggcacaagtttctcaggagaggaaatggccttagaatgagcactgctcggtgctgacctccgccaggcctggaatccccgctgctgcgcttcccgccgcagacagctcccggccggccccgcctcccggcatggccccgcctcccagcatggccccgcccccaggcggagccggcgccgggagcggtagcgggagagcggcagcgggaccccagcgcgggcggcggcggctgggcgggagccccagaggtactggcgggagcaggggacgggaggcactactgtcgggcccgacaggggagaggtggcctagccgtgggcccgggtgatgtgtatgggagtggggtcctcgccacgttcgccgccagcaccctcccaacttccctccgggctccagctcagtcccgagtcaatatgtccagccccctgtctctgaccagccgttcctactctctctgtgtgacggcttagcctggccagccagccggtgagtggaagcggcggctcctgactcctggtggcggcactgtgaccccctccccctcaacactgcaagtgtgtgcggggctcccccttattctgaggctcctcttcttcttaggcggcctccaccccagtccctggcctggcctgggaggaaacatctgtcgcgccccctggcagccgaaatggggtcatgacctccagatgtgctgggaagtggccagctcctcctcctggggcagccaggccttccggatctgtgggggcggggccggccctttccccccacccctagtgacacaggcccggaggaatgtcctagcctcaatggaccctgtgtgaagcttcagggtggggggcagagcccgagaacacccctcaaggcagcgccagagcctggcactgggccacagcaagaggcagcgcacaggctgggtgcacacatgcacagatctcacttccaagcgtgcagagctcagcccacaaggagcggggcttgcacagaccccctccctcatgccctcctactccttcacacactatagcccaggcccgagcgctgaatgtgcccagagcttggctcatggagccaggggctacacccgtcacacacacacatagctagcgacactcacctcattcttctcagtctctcagcagccttgggaggggacagaaataattaaacccaatttttttctttgtttttttggagacagtctcactctgtcccgcaggctggagttcagtggcgcgatctcggctcactgcaacctctgcctcccaggtttaagcgattctcctgcctcagcctcctgagtggctgggactacaggtgcgcaccaccacacccggctaatttttatgtttttagtagagacagggtttcaccatgttagctaggctggtcttgaactcctgacctcaggtgatccccccgccttggcctcccaaagtgctgggattacaggccacagccaccgcacccggccagttaaccccattttagagatgagaaaacagaggctcaaggtcagcatgggagtttattcaggagaaatcaaggtagaagcacctgggctggggagccgactcttgcttggttctggaggccccagacgaagggtgtgtggagcccctcctccacccccctccggcccagccccgcatgatgttgctggatgctgcatgaagacccaccattagatgcctgtacccccagtggaggttccccagctccctgtcctcactgcctactccatccagggcttgcctgggtgtggcttccctcaagttctcacaccaccatttgcacctgcctctggcgtcacgtttccgcacttagcaggtccctggggctttgggtgtctcaatcttgcatcctgtgagaccttgaacctcagcccaacacccaccccccaaaacctacgcacacagacagcagtgggcaggtgcagccctgcttagggcctggagatgggcagacccaggctcacatcctagctctgacacggaattgcttcaggcaagagcatctcctctggacctcatctgaccatctgtcacatggggttcagacctccctgtctgcatcagtgagaccaggtaggcagaggtccctatgggtccctgtcattgtgactcctcttgcccccaagcctgggcacagtagcctgcaagaaggtgagttggcctgtccttcagggcagggtgactggggtcccatgacagctgctgtgaccccagcaccttcctcaggatgtgggggcctggcagagggctgggcccacagttggggctacttcctgtgctgaaggaagtcctcttgccattcctgctgccctgccgctgcctccctgggaacccatgtgtccttgtggtattgaggccttgaggtccagggcactgagatcagacctctctgggtgatcagctctccagggaccctgaaggaagtgggaggggcaaggaggaaggtctctggggacaggacgtcctccctttgttaagtgggcaggacccagacaccagtggcccctgggtttcccgtcccagccaatacaagtcatctgtccggttgggctaggtcctggtgggacccttactctgggcccaggccaaagctaaggtgtgtgggtggcgactgggggaccctggcagtcccagggctgcccaggctccaggaccctcaggaccaagacccaacagcccagcctctagccttgcccagctaagctggggagggggctggaaactttagccctaggcagacaaggaagtggcctggaaagcggaagcagctttgatggtctcggagggggccggaagccaacacgggtggtggaggaccaggctgggggcctgggttcctgttttctgcccaggcccctctgagcagccccctcctccttcagggcaggaactgctgccacaacctcaggctgggcaccaaacacccgtgcccgccaatgcggcccagcccccggagagtcaggcccacagagcatgcccatgtgggccggcggtgtggggagccctcggcggggcatggcccctgcgtccacagatgacctctttgcccgcaagctgcgccagccagcaaggcccccgctgacaccgcacaccttcgagccgaggccagtccggggcccactcctgcgcagcggcagcgatgcaggcgaggccaggccccccacgccagcca

SEQ ID NO: 1675 - DNA, 6000 bp, Homo sapiens
cgcccagccaagtgttttgttttcacagtgaggcaggaagtgtaaggttcagaactccaagtggcaggtgcagcaaaaagagtgattcaacctcactccttttactttctatttgagagggctaaggcataagtaggtatctcccatgcagtctctcagccattacagcctatgaacttcgctgtctgagcggaacaggagactctgtcctgcctaggaagggcaggcacaaaagaggttgtcctgtgggagggagggatgtgtctccttccattctgagatgatggacggggctgacacccataggcaccacttccctttctgctcagggctcctgtcattgtttttttgagacaaagtctcgctctgtcgccaggctggagtacagtggtgcaatctcgcctcaccataacctccaactccccagttcagacgattctcctgcctcagcctcccaagtagctgggattacaggcgcacgccaccactcccagctaacttttgtatttttagtagagacagggtttcaccatgttggccaggatggtctcgatctcctgacctcgagatctgcccgcctcggccagctcctgtcacttctaacagaaatagcataaagtatccagcaggaaaagtgcacacaatatcacagaaaagatagggactgccagctcatttcccacctccccttgtaactgccataaattccttcctaaatggtgaaagccgtttttgcagtaacttgtgttccgggccatgggttttcaagtccatgtctttttctcaatgaaggatggttccttccctggcacagggccacagcaagggtggcatggcccagcaaggctgagtttttccaccgggcccagcacaatcgctgaggtcccagtacaggtcttggggtcttgtctgtgtctcccctcccctcctgtcctcttgtctgcgtcttccctcccctcctgtccatgggtgctgcctccacacctcaaggcctctcttacatgcttcacagatggatgcctggtcccatgtgggtgtggctcgaaggtccctcttgctgctagagtgctctcttcatgagtggcagtgatactcaagtttgtcaaacagacacatttctgacaagtgcacaaactgggttttgggttttttgagacagggtcttgctctgttgcccaggctggagtgcagtggcacaatctcagctcactgtagcctagacctccgaggctcaagcgatcctcccaccttggcctcccaactacccaggactacaggtgcataccaccatgtctggctaatttttgtagagacaggatttcaccatgttgcccagtctggtctcaaactcttgggctcaagtgatccaccctccttggccttccaaagtgctgggattacaggtgcgagccaccacgcctggccaaattgggtttttataaatgaaaattgtgcttccccagtggaaccctgatctctcaggggtgtgttttttaaatttgaaacatatttttttttagtttctctgtcccattttccaagctgtctgcttacaagaaccacagagaatgctggcaagcttgtccgatccctactatagcacagtgaaataaactgagcccagagccaagagcccagagagaggcctcacccaaagtcacacaaccaacaaccacagctccccctcaagggaaagaggatggggaggggaagctatgtaagcacgtgtctggaagctcagaagccagcactggcccctttcccatggggctggcacaggaggatgggcaagccccagctgcacagggctcggcccctcacttcccagctgcacaactttgaacaagtccctcaaccctcccgatccatccgtaaattgggtgaataatttccaccttggctgacttcacaaggaatccaggcaagaatgggaatgaaatagctttgtaaaggtgagggtgaggacatgaatatcaagtccttagtgaagataagcgggctcaggaatggagatcaacagttgtgtccatggttagctgcacaaaggcctgtctcccctgcaggcgccaggagcgacagcgctttgctgagtaccaggcggagctgcaaggcatccagcacagggtgcaggcccggcccttcctgttccagcaggctatgcaggtgaggctggcacctgggcaagcacatagctgccccctgtgaagagctggctgagtgggtagggaagcaggatgcgagtaggtccctgcagataggatcccagggctgctgccctctggaatccctgggaccccctcagtaacccgatccccaccttgccctcggcagccctggtgcagagcaggaagccgtcttctctctcctcaggccaatgcccggctcaccgtcactcggcgcttctcccaggtgctgtcagcactggggctggatgaggagcagctgctgtctgaggcaggaaaggtggacagagagggcacccccaggaaacccaggtgagtctccccgtcaggtcaagaactgactctgccatgctgctgcgggaaggggcgcccacaccagcactctgggctctggagggcctcccccaggacaggcagagagcccagaggaaggcaaggccagggttgtcattcctacttctcaatgaggaaactaaggacctgaggggaagggccttctttaaggacgcaggagcgaacaagcagcagaaccagtctgggactctgcaaccatctgagcggccacacaccaagtccctcattaggggctggcaccaccacgctggtcaccccatgccttagaataacctggtacagagcagcgattatgaagcccacttgacaataaggaaagtgagactcgagaagagtcactttgcccaggatcacacagcaagccggcactgaagcagggtttgaagccacattgtcagtggtttccttgggcatgggggtgggagctgcagagtcaggggcctctatctgtgtcttgaaggagccacaggtcaatgggggtgagaatggagcactctcctcagaggcccccaaggacagaacccaccggcagccagcctgacaggcactacaaccccagcctggacccggagtgcagtccctgagataaaattaaaggctttatggcaaacacagtatgagatttctggtggtgggggtggtggaagctacgggttggaagttggaggtggcaggtgggtgggcagcaggcttagctctgtccccgcaccccctccccaccaggagctttggctcttttggttccccccacccagtacacacagccccttctctgctcctgaggagtggggacatctcaaagagcaagagctgtgacttctccaccccatctccaatgtatatgttgggtcctataaattcaagcatgaataagatgaaatgactcctgcctctgaggacgcccagtgagtgggagagggggtggatccttaaaggggcgcatacaacatagcctaacacatgctgagttgtgccacacagggagccacagactgagcaaccactgggtgaggggaggggtttcaggagagattgggattgtgtgcactgcgctttttttttttttttttaagacagagtctcgctctgtcaccaggccggagtgcaatggtgtgatctcaactcactgcaacctctgcctcccaggttcaagcgattctcctgcctcagcctcctgagtagctgggactacaggtgtgcgccaccacacccagctaatttttgtatttttagtagagacggggttttaccatgtaggccaggatggtctcgatctcttgacctcgtgattcgcctgccttggcctcccaaagtgctgggattacaggcgtgagccaccgcgcccggcctgcactggggttttaagtcccaatagttttaagttagggctggtctcctcaagaaaaaaactcatacacacagatgtgccacattttgcattcaatttcaggggttccagggatacactgacgcccatgtggagctcctaaacaatcttaacagttcacggggccaggttttaaaaatccaatccagggccaggcgcagtggcgcatgcctgtaatctcagcactttgggaggccaaggcgggtgtatagcctgagctcaggagttcgagaccagcctggccaacatagtgaccccaccccctacccccgctccccaccaaccatctacaaaaaaatacaaaaattaaaggggcgtggtagcgtactctcgtagtcccagctactgggaaggctgaggtgggaggatcacttgagcccaggaggtcgaggctgcagtgcgctgtgatcacgccactgcactccagcctgagcaacagagtgagatcctatctcaagggaaaaaacaaaacaaaacaaaacagggaacgtgggaaggaagcgttccctgacgatactggttatagcgggtctgaagctgggctgtggaattggagatctcgggaaaacaacacccgttggagccacgaccctaggagtccactaagcgagcgcccattgtaggagggaggtgtctacggaaagaccgtgaggtagtgaacaccccgttgccggtgaagtgcaagcgcagggaggccggggaggaacttaaagccacgaagacactgacttaatgggctctaagtccttccagttctgggatcccacctccgggttaattccgcttcccttgaggagcgcatgcgcaatgggaccactcgctcaaagaacccacccgacccgagacggcgcgaatgtgcagtcgagcgctgatcccggccttcccatgagcctctggggcaggctccaaggcgagcgacggaagcagccgctcttagtttccggcaacacgacagcggctgccgagcgacccggaagtattcccattttgcgttgtctgggctcggcggcagccgggctcggagtggacgtgccactatggggtcgtccaagaagcatcgcggagagaaggaggcggccgggacgacggcggcggccggcaccgggggtgccaccgagcagccgccgcggcaccgggaacacaaaaaacacaagcaccggagtggcggcagtggcggtagcggtggcgaacgacggaagcggagccgggaacgtgggggcgagcgcgggagcgggcggcgcggggccgaagctgaggcccggagcagcacgcacgggcgggagcgcagccaggcagagccctccgagcggcgcgtgaagcgggagaagcgcgatgacggctacgaggccggtgaggaggcggggcctgcgcagggggcgggtcgggcgggggtcccggaacgcgtgggtctgggtgtgcgcgcagtgtcagcgaagctcttcaggccaggaaacccccaagctgtttaccagctctattaaatagtctttctacgggatcccttgagcccaggagttagaggctgcagtgagctgcggtcccgccagtgtactccagcctgggcaacaaagcgagactctgtctcaaaaagaaaaaagtctttctacggttgtttaggattagaggttgactttctccactcagctgcttgaggacagagggcttctgttttcctcagttgtctggtacaatcagattctcaataaatatgttgaatgagtgaatgaagtagtgtcagcatatacagaggcaagaaaaacctggtattggacgaatcgtgtagggcgcatggtagagaaatgagggagtaagatagacagggatgtgaacacaaaggaccctgtactgtagtctctgttaagaactgtagattgtcttgaggatagtagggagccatggatgtgagttgaggagtgagttgctcagatccgtattttgtaaacatcactggattgagaatttagtcaaaggtagtcaggactggagaccaggaaaccaggagggctataggccaggggagggctgatggtggcctgcaccaaggcagcagcagtgggattgagagaagtggacagg

SEQ ID NO: 1676 - DNA, 6000 bp, Homo sapiens
aaattagctgggcatggtggtacatgcctgtaatcccagctactccggaggctgaggcaggagaatcacttgaacccaggaggcagaggttgcagtgagccgagattgagccattgcactccagcctgggcaacaagagcgaaactctgtctcaaaataataataataataatagggctgggcgcagtggctcacacctgtaatcccaacactttgggaggccaaggtgagtggatcacctgaagttaggagttcgagaccagcctggctaacatgatgaaaccccatctctactaaaaaataatacaaaaaattagccaggcatggtggtgcactcctgtaatcccagctactcaggaggctgaggcaggagaatcacttgaacctaggaggcaaggttgcagtgagccaagatcgcgtcattgcactccagcctgagcaagaagaacaaaattctgtctcaaataataataataataataaataaaaaataaaacactgaggaggtcaaagaaaatccacatggcagcatgtctgacttctgagcctccagtctataaggcctgtgctgaaaggatctgcacttacttttctcctctttacagccaaggtcaccagtggaaactctcaaggacaatacctgtgtctcctccaaggcccatccctcgtgcctaacacagttcctggcagagaccaggtactcagtgtgtgtttttgctctgggctgcaaaataaaggttttctgatcactcttcaactcaacaaccttggcaccctactgcctgtggaatagtgggacaaacactttatccttatttgaagccctgcccagtctgtcctgacatcccaagattcagagcactctgccctataggggcctccctggctcagcctaaaaagttgagtaatatacggtaattgatttagcagtggcagtgtctgcccttcccacggcctctcctgttctaaagagtccacagatgaattaatccacaaatacttattaagagtatagtggcctgatattggaatgttcaaagccttctgcttaagagtttgtgtgcggccgggcgcggtggctcacacctgtaatcccagcactttgggaggccgaggtgggcggatcaggaggtcaggagatccgagaccatcctggctaacacggtgaaactccgtctctgctaaaaatacaaaaaattagccgggcgtgctgcatgcgctagtagtcccagctactcggggctgaggcaggagaatcgcttgaacctggaaggcagaggttgcagtgagccgagatcgcgccactgcgctccagcctgggcgacagagcgagaatccgcctcaaaaaaaaaaaaaaaaaaaaaaaaagagattgtgtgtgttggggagcagggcatgtggacacaaggtctccgccctaggagaagtgctggagagtaggacaagtaccactacttcggacggggagggcgatgcctccaatggggggcttccctgattcctgcagatcatacgttggcccccaacttcacactggccagaatcccggttctagtcttttccgtgccaccaacccctgggccctctttctagaaggaaagaaaacacctttggcctctgcccagagctacagacacctgaagtaggagcaggcaggagatgcgtggtggataaagaccagagagacttgggatcgaattccactctcacccccagttcagttttcttcagcttgctgctccacaggcaggatgtgaaaatttagatgcctcacccctcgcacctccagcttgctgctccaaataggcaggatgtgaaaatgtagatgcttcccccccaacctctataaaacagggccgacgaggatgggattcgaacccacgcgtgcaaagcacaatggattagcagtccatcgccttaaccactcggccacctcgtcctacgtgacaggtttgtccacattcacttatctctcatctactccgcaccttccaagcactaccacgtaagtcgcaacgcagacctcttcggacacagggaaagaagaagccgcggaaggaagggagcgttttgatttcctttctgctgagcccgcgccatcctttaccacgctgcagccgagctctgccgcggtttccctccgagtccggccgagcgcgccgcgcgttcagggcgcgcccggtccagggtgcgcgcgccggcggggagggagaggagtgcgtcccgggaagccggcggggcccgggcgggcgggcgtctgcacggcgcgcggccgagcggcggggccgtggctcctcctccctcgtagggggcgagccggcgcgccgggggctgggggcggtggcgggcggcgggcggcgggcggcgggcggcgggcggggcggcgctcggggctcggctggcctcggctcgcctcggctgcgctcggcaggctgcggtaaatccgggcttgcggccgctggcgtagtctgtggccgggtggtcgttgctgcgcgccccgagccccgagagccatgcagatgtcctacgccatccggtgcgccttctaccagctgctgctggccgcgctcatgctggtggcgatgctgcagctgctctacctgtcgctgctgtccggactgcacgggcaggaggagcaagaccaatattttgagttctttcccccgtccccacggtccgtggaccaggtcaaggcgcagctccgcaccgcgctggcctctggaggcgtcctggacgctagcggcgattaccgcgtctacaggggcctgctgaagaccaccatggaccccaacgatgtgatcctggccacgcacgccagcgtggacaacctgctgcacctgtcgggtctgctggagcgctgggagggcccgctgtccgtgtcggtgttcgcggccaccaaggaggaggcgcagctggccacggtgctggcctacgcgctgagcagccactgccccgacatgcgcgccagggtcgccatgcacctcgtgtgcccctcgcgttacgaggcagccgtgcccgacccccgggagccgggggagtttgccctgctgcggtcctgccaggaggtctttgacaagctagccagggtggcccagcccgggattaattatgcgctgggcaccaatgtctcctaccccaataacctgctgaggaatctggctcgtgagggggccaactatgccctggtgatcgatgtggacatggtgcccagcgaggggctgtggagaggcctgcgggaaatgctggatcagagcaaccagtggggaggcaccgcgctggtggtgcctgccttcgaaatccgaagagcccgccgcatgcccatgaacaaaaacgagctggtgcagctctaccaggttggcgaggtgcggcccttctattatgggttgtgcaccccctgccaggcacccaccaactattcccgctgggtcaacctgccggaagagagcttgctgcggcccgcctacgtggtaccttggcaggacccctgggagccattctacgtggcaggaggcaaggtgcccaccttcgacgagcgctttcggcagtacggcttcaaccgaatcagccaggtgctcataagggagagggcaggggtaatggggcaggaggggtggtgggatcagggagttatgaggagtggccctggatggaaaggaggcaatgaagcaggagggatcatagttcaggaggtgggtggatggtgtggaagatccaggatacttccagaggggtgaggacgctggactgtggctttagggaagtcagtctcaggcctgtcaatgtcatcaaactttgctaacctgtctttcctcctgcaggcctgcgagctgcatgtggcggggtttgattttgaggtcctgaacgaaggtttcttggttcataagggcttcaaagaagcgttgaagttccatccccaaaaggaggctgaaaatcagcacaataagatcctatatcgccagttcaaacaggagttgaaggccaagtaccccaactctccccgacgctgctgagcccttccctcccctaatctgagaagtcagcctcttggctcctcaggccaccatttaggcctgactggggtaagaaatgtcgctccactttacagaggtagctgtggtgttgaaacactggacttggatatggggtgctgggatcgattcctagctttaccactaactagctgtgtggccttgagtaaatcccgttacctctctgagcctcggttaccctgtctgtaaaaagggaggtgagaatacctacctcacggaactgttgggaggctcagatgagatgctatatgtgaaaacattctgtaagcttcgtacaaatgtgaagtattaatattatcgcagtattattgttgttattattattgttattattaacaatcttgggtgggtagtaggagagcaaaaagtatgaatgggatggagctaagaagtctgaatacttaatgaaatggactttttggaaagaaatcagatgaaggcataaaatttagttcttagctcttgaacagaagcctaaaattcctggttctctcagggcttcgccttcaagggttctggaggagggaagggtctgcaggttccatgggtgacagcctgagatctgtcccttcaacgggctgggctgggtatgtgcctaccgatgacaatgtgtaaataaatgcgtgttcacacccacagctggctccgttactctcctgagctgggggtggggggatcggggccggcttctccccttgcacgccgtggggagatggccgcggacgaagggcaccgtctgcaaagcactgaaccatcagggccttccctgcaggccgaaggcctgcgcgaatgtcggccagttactatggagaccggcccgcggtatcccagcatgcctcgggaccaaactgtccaactgtgagcatccccgacggtcgcctcctgatgacgcacacggaagcaccgataggctctgcctcccgaagaaaagggagccgcgcagcgcctacgggagtccggcggcagcagccggtaccggcaaccacgggcagctctcagggaatctccgtcgtgaggccagaggctccagtccccgcggtgcgtatcgtcatgcatggcttttggttcgccctctccggttagtcgagcagggccggcacaacctcctcctccgaggccgaagcagagatttaaccggcctgacgcgtgctgggctgcgggcgagccagtgatattccggcccgctccggcgcatctagaagggagcgggaggccccctgggcgctgcggagaagctggattgacctctgcgagagtggggagggtctgccttccctaggggcctgccccggaggagctgccattctgaaaagataaattgcctgtgtacagcgctttacagtgtgcttttccatcccttaccacctgtgagctcctcaacactcagagcaggaatggttatccgctttttgcacccggggtaaggtgggaaggttgtgacttaactcactcataatcagaaccagggggaggaaagaaaggcttctggaagagatagacttaagctgcatcttacaaagtgaatatactaacagtgaagaggcattgcaaatgttgggaactgaggcttgataacgggaagatgaagctggtttagagaaccgagcctttcaagtcaggtgcaggtcattagtgaaattgttgaggaatatgactaaacactcacctaggccaggcttactatacacaacttgaactggtgtcaaggaaagcttgctaccattacagggacctgggactaccgaaaagtaaaaactaatgtctgtctcacaaaaaatttttttgttaaatttgtatttgcaaatcctccagtcatcaagtgaaccagcactgtgctaggtaaataagttacatgtgcagcccctgccctagtgaggctcatagactgattgcggggacagatatgagaacaggcaaatagatataaacaaagcttcctggagggagtggt

SEQ ID NO: 1677 - DNA, 6000 bp, Homo sapiens
cccaggctcaacctccctcagtccccagacccccacccactcaccgggcccctgcccctccttcctccagcccccatgtcagcctctcaccatgtggggcccgtagtacccagggaggtagacctcacagatctgcaccaggcaccagaaggcctcctggggaaggggcagggcacaggcctgtaagtgctcaccaaggaagggaccgtggaggagaaggcaggacaggggaaaggagtgaaggggagggcctgggcaccacaggggcctgcactcagggccactcctaacctgcgcagttcctggaagcccttcccaaaagccccctcctctgcccaagacagggtctgctgaggggtttagggtgttggaaatcacagggctcatggtgttagatttgaaggtcacagggttggggttcactggccaagggttgggagtgtcccaaagttcaagtcctgggtttctgggtctttggggttggggtcgcagtccccaagttcagaatcaggagtcgtggggtcaaggtgataacatccagattcctagatgactggggtcaaggctggggtcaagggtcccaggttcctggagtcaaggtcattaggcttgaaggtcactgaggctggcagtcatgaggacctgggtcactaggacagggtccaggaatcaaggattgcaggtttctgaggccacagttcctggggatggggttccctgggcctaggtcactagggttcccagagcagggtcaaggtcactcacctctgggggcaggtgcatgagcagcacagcagccacgggcccctgggcctggcagtagccctgctccggtcgatacagggtgtaggccttgagcacctgcaggagcccctgctgcctgtgccggaagaccccataaggggccagtcctgcaggcacccccttctccaccctctgggggcctctgcccaggcctcagcctccctgggccttcctgggtcccctgagatgcaagactgtagagctgggctagggaaagtgggctggagcacctggggcttgtggggctgggggtccctgggcatcaccggcctcgtacccgtggccctgaggcgacacaaacatctcgtgcagagggaattgacggtgcaggtccctgccaatggtctccatccactgtgggtctccaggggcctctgccagctcctgtgggtagccaggaaggtgggtgtgagggttcagtgtggtgaggggctctgggtaggggaattggggcccctgcccactccctcacctgataggtgccagggctgttcttctggcacacatgggccccacacaacaggggccagcatcgggcgcgcagggcagacgggatgcctttccggcactgcatctttacctgtgggtgaggccaagggctccactaggcagcctccatagctcctgctggcaggccccaggcacagctcatcagcaggcaggggcccactttgggtggcagggagcaaaggccggaggtgctgggacacagggtgggtacattttgccaagatgtgggctgaggcagagaggaatgagccatggaagccaagtggggcccctgcccccctcaccttcttgtaccgccgggacatggttttctcccagtgcgaggtcatctccacccacttcatctcccgttggcggatgaggtctgcaggtgggtggcccggcctgggggtgcatggcacaggtatccagacgctgggcagctgttacccaaggcccacactgccaccctccaggctacccaggtgaacccagctcctggccctagggatctctgggagccctgtggggtgacctgtgacccaggagctgccaatgcttgtcacggggacaggaaaggatgtggctccgacgtgggcagaagcaggagactgaaggggtgagtgggtgtgtattgggggagggactggttggctgtcacccaggacagggacacagacaattcataggggaagctggctggagagagccctggactggaagcccagagtcctgagtttgagtctgggtctgtgtctgatctgtgtgacctggggcaagtttctgtctatatctggacttgtgtttctgtctgtagcttggggaaagggggaaggaggaggtatgggttctgtgatttggatctgggattcctgagccagaggttcaaaggggaaggatgttctgccccagtagtgggtgcaaaccctcggaggctgggggtaagagacgtacagaggcctccccggacccttcccaccttagggttccacctggcacctgcagaggggtgctactggctgagtccccctcccaatccctaccaccagaccctcccggcctccctccagaattcagccctcagccccctgtcctctgtcccagcattccgccagccctcaccctgcccccttaccctggctctgctgagctgcccccaatgaatccatagcggtcggcctggcgatatgggccaggcccgctgagctctgagtcggaccccaaggagctggagtcatcctgcagctcgggaggctgcaccaggtcctcccccagggcctgggccatggtgcccggggccttcgatgccacaggcagagaaagtggggagaaccagtgtgaggggccactcccggccagcctggggcctggctgcggggtcagaggggggaggtttcagggtatctcaccaagccccctatgtctcctcttttatgggggcaggggctaggccctgccctgacagaaaagccaggcctctgtccggagacccagccccaagccctgcccctgtccccaccagcccagctcacctcccgcagcacctcacctcctcctctcacttcctcctcctcctcacacagctttggcaaccgctgggggcccctcccaagggtggggggtgtcaccccttcctctctgaggctcttcctgcctgccccagtgcccctgagctgtgggctcctcccaccttccccatggccccagtgactgcaggcttgagttcctgtgctggtgtggagggcccaggactgttagacgcaggggccgggccacctccagttcttttgtttgtttcttttgagacagagtctcgctctgttgcccaggctggagtgcagtggcgcggtctcagctcactgcaacctccacctcccggattcaagtgattctcctgcctcagccccccaagtagcagggactacagacaagcaccaccatgcccggctaatttttgtatttttagtagagacagggtttttgccacattggtcaaactcttgacctcaggtgatccatccacctcagcctcccaaagtgctgggattgcaggcatgagccactgcgcctggacttcatgtttgtttcttgagacagggtcttgctctgtcacccaggctggagtgtaatggcacgatctgggctcactgcaacctccacctcctggtctcaagagatcctcctgcgtcagcctccacagtagctgggactgcaggcgcgcaccaccatgcccagctaatttttgtattttttgttgagacagggtttcgctgtgttgcccaggctggacgcaagagaccatcccgccttagcctcccaaagtgctggaattacaggcctgagccaccacggcaggcccacttccagttctgaggttactggcatgtaaagcaccaactcagggttccaacaagaattaaggttcatttatcgtctgctcttcttttttttttttttttttttgagacagtctcgcactgtcgcctgggctccacttcccaggttcaagcgattctcctgcctcagcctcccaagtagctgggattacaggaggctcccatcatgcccagctaactttttgtatttttagagagatggggtttcaccatgttggccaggctggtctcgaactcctgacctcaaatgatccgcccgcctaggcctcccaaagtcctgggattacaggcgtgagccactgtgcccagccacgtctgctcataaagtaattatttttatgtgcacaccctgcaatattactgtgctactcaaaagctaattatggggccaggcttgttggctcacgcctgtaatcctagcactttgggaggtcaaggggggtggatcacttgaggttaggagttcaaggccacctggccaacatggcgaaaccccacctctgctaaaaatacaaaaattagctgggcacagtggcgcacgcctgtaatcccagctactccagaggctgaggcaggagaatcgcttgaacccgggaagtgaatgttgcagtgagccaaagtcgcgccactgcactccagcctgggggacagagcaaaactctgtctcaaaaaaaaaaagcgaattatgggacttataagaaaatattaatttagcatgccccaaggaccaaagtgcgctgggaattcagccgtagctgtctttgagtgtggtcagccgcctgggcgccacagagacccacgaagaagtggggggtcctccgtgaatgcgaggtccaggctgtttttatctcttgagcctcagtttcctttcctgcacttggagcagttaaccctcagtgcctagcagccggttattaacatgttcacaacaccttccacccagggaaggggtgggaaagtctgttgggcttttgaaagagaaaaacaacttccacagtccttccggccccacatcctctgaacagggctgggcgcctcctctggggcgtaaccagcttggtcacgcccccgacagaccccgcccccagcccgccgccgaggccccgccccccgggccgccgcgcctcacgtccagcgggggcgctagagggcgggggactgggcggggcgggcccgggaggcctggaggcggggccgcgggccgggggcggactggggcgggcggaaggagagccaggccggaaggaggctgccggagggcgggaggcaggagcgggccaggagctgctgggctggagcggcggcgccgccatgtccgacagcgagaagctcaacctggactcgatcatcgggcgcctgctggaaggttggtcggggcgggggaggcccgcgtccgccgcgccctggccccctgcccggcccggaagtggcgcgcgggcgggcccccggggccagcttagactgggcggggacgggcagcgaggttccgtggccgcagctgcccccccgcggacgcgcctgagaggtccggggccagctccgacgcgcggagcagctccccccctctcccgggctgggggcgcacgggttgcctgggctcttggggcgagggagaaacccgggaagcccggtccaggaaggggtcctgcgctgtgaggtttttggtggcagccccctgcgcacgacagtcgcctcccgaggcgctgagggtagctgggggcttcccctgggaggcttgaggccgcggtcccgggaggctcagcagcaacagctgcctgtgggcaaggaggggccgaggaggcctaggcgcccccggaggtatccatggggccacccgtgtcgcccaccctcctcctgtcagggtccagggtcctgacaccccattgcgccccagtgcagggctcgcggcctggcaagaatgtacagctgacagagaacgagatccgcggtctgtgcctgaaatcccgggagatttttctgagccagcccattcttctggagctggaggcacccctcaagatctgcggtgagcccccggcccaggtccccttgccttcctaaaagtggcactggaccccacagagttcctggagccctcctcccttgagcgcagtcctggccctgggttcaggtctagaccttgcatctagcttacccggttccctgggtcacaggtgacatacacggccagtactacgaccttctgcgactatttgagtatggcggtttccctcccgagagcaactacctctttctgggggactatgtggacaggggcaagcagtccttggagaccatctgcctgctgctg

SEQ ID NO: 1678 - DNA, 6000 bp, Homo sapiens
ggaaggccaggcagggacttggctgccctgactccttcgtctctctgtccctctgtctctgccatcagtctctcagccactccacccacgagatggtgagtcttctgtggtccctcccccacaaggcccaagtccctgggcagagagtgggcccagaggacagcaggcagcacctaggacctaagcctgggagttgccccctgcagacagcttagacccacgaccagctcccccacccccaccctgcggctgcatcctgggaggtgggcactcttagtgccctgtgacattcattcattccatggcccctcagggagctcaccttctaggagacggcacagaggctctggccctggcaaactgggattcgagcccaggcatgaggcccagtcctctgccgtctgggccacagcacaccatctcccaacaaccaagagattctcttcgtcccagcctcatcagcccccaggggatgggagagggcaggcaccaggcaacaaggtccaaagagacctcacgacttgctcaaggtggccgagcctgtcccctggaggacagactcagctgccaggcctgtccaggcctggggactgcaaagaacaagaattccattcacacgaagcctcccagcagccccatattgggggggcgccagcctcagagaggggagggacgttaggtttcatccaaagaaagcatttccgtgactcaaaatatctgcaggggggatactgtctagcctcctaatgtttagcccagggctgggcacacagtagggcttcaagacctacgtggggatgacagtggaatcacatttaggtgtcagcacactccatgccgggtcatgagacagaaataagccacctcagagtgatggctgggttcgttcattcatctactcttcagtcaacaaacacttactgagaagtggctgtgtgccaggcacgctttaggtgctggggttgcctccatgaacaaaacaagcagaaaactctgctgctgtgaagcaagctaaggcggagcccagcatggcaggggcgggaggggctggctggcaagacattgcttcctgccctccccccaggggcaccacacagaacagtttacaaagcactcccacggttgcgttcccattaacaagccttcgcccccaacacaagcctttcctctcctagtccccgggacggtgtcagccctgaacatagcccaggctgggagagtggggggcttacacccttgggtgacttaatgtgcccactggcccaccctgcccaagacctaccacttctgccctctcagctctccctggatccatcgggtcccgagtgggattgcccactgggctccaaggacctggaggaagagggcccctggggagggggctctggcctgccgcccacaggctgcttccctggctcctggcgccaggacgtgggcctggactgcaagggatcccccgagggggccgaggcccgggcttggactgtctactactacagcctcctgcagagctgtctgcagcaagctggccttccggagactcaggaccgcggccaggtgccccgcacaggtgcccaagggctccctggagggaggcacctctgggggcagggaggggccctcagcccagtctgcttgctcatccctgtcaaggtcggccccttcccctaggctctggttccatctgaaggcagggaaggcacagccagttggcctagggtaggcggacattgtttgcaagggcatctggcaccagtgaggtcaaggattgggctccctgccctcaccccctccccaaaaagacccagccctgggattgggaaaccacgttgtgtggcaccgaagcttctagagaaaggtcttgggagctgtggtggaggcagctcagcagctgagaccccccagactcctccccttctgcccctccacgcctgttacatatatcagactttgtgtggacagagggttcacaggcagaatacctgagaatcacagacttggtcccattgtacaaacttggaaactgaggcttggaggaacactgactcctccaaggttacacagaaagtcagagctcgggctagaactcaggtctccagtcacctagcccacagcacctctggaacagctgcagaaaggggaaaccagcttcacggggcaggactggcgggcacctccattccctgcctgtcccctgtctcatccgattcctgggaaaactctgggggctcagggtggggccgtgggtgtggaggtggtggaaggtgggcagagagacagcaagggcgcccctggtgagctgggccatgttctctttcccgaggctgtcctggggcggaggtgaccttgtgcgttctgggctcccccagcacctttctgcctgtgctgctggagggtggggtccagagcccgggtgagtgtatgctcaagtttccccatccccttctacagaaagggcagccctgccctggcccagccacatcccaaaatacccgccaaccctggcaactgcctgcattccaccggagcagctgccatgctgaatggggatgggttctgggatcagctgcttccactccgctacccgggggcccgggcatagggcatcaagccttccctggccagccacttgccttctctgcccacaggaaacatgctcctttgcctgtcccctgcttggctgatgaaggtgccagcacccgggcagccgggtgaggcagccctgctagtctccaaggctgtgagcttccaccctgggggcctgacattcctggatgactttgtccccccgcgccgtgccacctactttttggcaggcctgggcctggggcctggccggggccgagaggcagcagaactcgcccgtgacctgacctgccccacaggagcttcggctgagctggcccggctgctggaggaccggctgctgacaaggcagttgctggcccagcagggtggtgtggctgtgccagcaaccctggctttcacctacaagccgccggggctgctgcggggaggggatgccagcctagggctacggctggtggagctgagtggcaaagagggccaggagacgctggtgaaagaggaagtggaggcttttctgcgctccgaggccctgggtgatatcctgcaggtaacagactctcgcccaccctgaggtctgtacagatgccagcaggatgggacccaggcacggttaccaagtctggctggaaaggtgtccctacctcttagccctgccgctgccctgccccatctctggggcaatcccctgcccttttgcctcagtttactcaccggctcctgtggcggaagtgccccaccctgcagtacctggggtggtgtccaggaggcccctttcccctccttgctgcaggtagctgtgaagctcagtggctggcgctggcgggggcggcaggcatggcgtctgcacccgcgggcagagctgggtgcagtggtggacacagtgctggcgctgctggagaagctggaggaggaggagagtgtcctggtggaggctgtgtacccacctgcccagctgccctgctcaggtgagagccacctgggctgaccagggatgggagtttggtgtggccttctggccactctgtgctggccttagacctccccgtcttcccccagatggtccttcacccggccccggcctggccgtgcgaatctgtgctgtggtgtgtcggacacagggtgataggccactgctgagcaaggtgagcgtggcccaggcccaggctgtgaccctgcctgccacacgccagcccagtcccagtagtggtttgccaagggcccctgagccgtctctgggcagagaggacaaaatccttaggggggtcgtagttgcctctggggaaactactgggtctgaccgtcttccctctcctgcaacccttccagaatccctcccacaccaagagcccctgcccctgtgctcagccccacgctgggtagtaccagggcccagggggctgaattgtcttcccagagagctcttgcccacgtagaggctgacccagggcctcctgataaacctctagtgcctggacgccttcaggaggggcctctaagctggagagtcaggaaggcttacggaccctcctgagtaccccgctctaggctacactgagagggagagattcgaccctgccctcagggagctccagtggggtagggaaaggtgcgccccagggagatgctagggtggggcacaccagggtggcccaggcccccagggctgcaggagccatcctggagggggaccccagctgggcctggaagcctgggtaggtagaatccctggagaggtctggggaccagatggggagtggcagggagagctcgtgtgcaatttaagacacgttggaggacggggcttcttgaatgtccagtgaggggtctggtctgaattttggcacaaggcggtgggggtgtgcgtggggggcagggagtgtgtgggcctccccctgagtctccccctgcccaggtggtgtgcggcgtgggccgcggggaccgccctctacggcaccacaactccctgccgaggacgctggaggtggcgctggcccagtgcggcctgggcgaggaggcgcaggtggcggctgtgcggcagcgcgtcaaggcggcggccgaggccgcgctggccgccgtgctggctctggaggccggcctgagtgccgagcagcgcggcgggcgccgggcgcacacggacttcctgggtgagtgagggcggccggggccggggccgggagccgagggccaggggctggagggcggtggctgccgtagctgagctcgcgcctcccgcccggcgcaggcgtggatttcgcgctgacagcggccggcggcgtgctgaccccagtggccctggagctgaacggcggcctgtgtctggaggcgtgcggcgcgctggaggggctgtgggccgcgccgcggctggggccggcggccgacgaggcggtggcggcgccgctggtggagaccatgcttcggcggtcggcgcgctgcctcatggagggaaaacagctgctggtggtcggcgctggcggcgtcagcaagaagttcgtgtgggaggcggcgcgcgactacgggctccaggtgggcggggcgcggggcggggctgggccccaggtcctggcccgagtggtggaggcgggaccccggggcggggcctggagcaaaggggcgtccttggggcgggaccagccgcgctagaggcggtgcttgggcggggcatcctggccaggtacaagtaagcccaggagtaagggcggagtccgccgcccggtgagggtgaggggactccgctagttctggagtgagaggccctggggagggcagggagtcctccacagaaagaggagaggagcccgggtagatgggctgggcgagggacagcgttagcgccagagtgggggccttgaatgccaggctaaggagcctggctctgtcttggggaaagggcgggccctttgaggttgaattcctgacacttggcacccaggacccgcagagggtgctggggaaccgcatacagatcctgaatcaagttcatagcagggcatcactttacagaatctggagcgagccaggcaggtagacttgtttttgttttttcttttttgagacagggtctcaatctgttgaccagactggagtgcggtggtgcgatcacagctcactgcagcctcgacttcctgggctgaagcgatcctcccacctcagcctccctagtagctgagactacaggcacgtgccaccatgcccagctaattttttttttttgaaacggagtcttgctctgtcgcccaggctgggtgcagtggcgtgatctcggctcactgcaacctcccgggttcacgccattctcctgcctcaggctcccgagtacctgggactacaggcgcccgccaccacgcctggctaacttttagtagagatggggtttcaccatgttagccaggatggtctcgatctcctgacctc

SEQ ID NO: 1679 - DNA, 6000 bp, Homo sapiens
aaacccgggaggcagaggtttcagtgagccgtgactgtgccattgcactccagcctgggcagcaagagtgaaactgtctcaaaaaaaaaaaaaaagattgggtatggattcttattggatggggatgtgtgggtgtgaatttgggtcagaccaggccttgggtgtgagttctgattgttggaggctgtctaggtgtgccttccatgtgcataggggaggttgggtatgaactgaggtggacagaattcaggggtctccaggcatgcagagggttatctcgttgaatgtggccctctggttgtaattccaccaaaggagatccccaggttcgggtcttgatgtgggtgtagggcaggcccctagcaacccagggcaactcagacaccaggccagtggggtggttttcccttagctccagatgctacaagtatcccctacccgtctcttgatcccccttccccaccccctatctagctgatcctgggaggagttgtccagtcaagagaacctatctagacacttcaccagtacataagcctttatttggggagggatgcctggggagctgcctccagctcctctgctgcacagaggcaggatttcttaaagcatcttccctgaatgaggaagagagtgtagactctcctctgccaatgctagttaggtgtgccagaggccaaagcaccaaagctcggtggagaaggtttgtgatgcataggagggaggtgttcacgtgtctcagggccacttgtgaatgagggcagggaggtgaggggggcctagaagctgaatgggcatgtaagacttgatcaaaacagaaacctggaccctgcatcatgtcctgtgacccgctctccactgtggtataatcctggagcagtcatttttcttctctcagcctgtttcctctcatcgggggaacataggcagttgtgtctgcctggggtgagcagaaagaggattacttctgtccacaggccacctgcctctaccggtcaggccgaatgaggcaggttggatgccaccaagtttccagcaggcttcagagctatcctagaatttgggtaagaggaagacaagggttctagtctcaggttttcccaggatttgtccaaggcttggggcccagccaggtcctctcctcttgtagatggcaggaagagagtgagacctggagaggtggacaggaggggctgggtttgggcccactcccacctggggagctggcgtcagaggtgtgtgtgtgtgtgtgtgtgtgtgtgtgtggccattgtcatttctccaaggctagaatgctggggaagctgtaggctggactggggccttcgggagggcaagaggcccttgagtccaggatgccttggtgtctaaattgccctgctgctctggaacagacctaggcattgcagcgggccaggctggggctggggcatggtgatggggagagaagcaggaagagctccagggagcagagggcaccacagtgcctccacccagcactgcttccctgccccctgaccccagtgctatttgaagtgagacaggaagtgggcaacagggtagctgggcccatcgatgcccaggccctggcagaggcccagcaggcggagacgggcctcggtggggctgggtccggcacaggccacactgcagtagggctcctcatactcgccaggcaccagggcctcctccagcagattgaggcgtagcagtccacggtcgtgcagggcctgcagggtctcacggctggcggtggaactcagggcctgcaggtgctgggacacaaggcacatgacgcccaccagatggccacgagcacgtgggcgggtgggcagggcaggacgcaagccacaggccaccataacagcagccagcagcaggtcaacaccatagagctccaggatccaatcacgcaggtagaagccacccatgcgggggttgatctcgataagccgaggcccagccccggtcagcttgagctccacgttgaagactccatcgagcaacccgcagcccaggcaacagcggaaggctgcctgaaccatctgtgcctcctgctctggtgccagcccggtgggcatgcaggccgccgtctcagtgaagccaggcagcctcgtagggccattgtcggagacaaaggcagccagcaaccgcccaccaaacaacaccaggtccacgtcgtgctcggtgccctccacaaactccatcagcagcatggcattgccccagcccagcccaatgcctgggtggtcggcctcgccctgcaagtctcgggtaatccgggaaaagtgctcatggcactgtggcgcatcctctaccagccggacacccactgcacctgccccgaactccagcttcatgacacctggcaggggtacctggtgcacggccctctccacatcagcctcactctccagtgggcagcagggcacagcatggagggagggcgcaggccagggtgggccatggtggtgcaacaggtgcagctgggtgaggctcttctgcttagccaggcgcatggcagctggggagctgcagggcagacctagctcctggcagagcagggctgtgagcaccaggcagtcatcccagtaggagaagcagccatctagcttgaggccgcgagcccgcaccaactctgccagcagccgtgcgttctcctcatccctccggtgctctgtcatgtcaaagtggatgaaggtctgtaccaactgggatgcaaagtggttggggtctgactccacgaggtgcagctgcagaagccacagggtggggcatatccaggtcagctagtactgggtgctagggggataggatggggcctaggatggccccttcaggggatacgagtacacaaacactaggtgctcaataaatgtgtgttgtggattgactgaataaatggaaggggcagaagtgggacacctgatacaggccggaggggagggaaggcatcctagaggaggcaatgcctaagctgggagctgaagaatatgagtcagccaggtggctgcaggaggaaaaggcatgttctgggtgggaggggctgcagcacagagaagagggtgtgagagagcgtggtggactctttcccacaggcagcctcactggccggggattgcagagaaactaccagggctggggcttgggacaagtggtttggtcacaattcaccccatgtgctctgacactgggaagtgtccacggaggaatccagtggggccccgtgcccctaaagcttactgcctgctgggggaacccagggcagggcagccactgaagagagagggagggtggctctctgcaaagtaacacagcctcggcagtggagtgacattccaagtggagaaaacactgagcaaggcaggggacacagaggtggtgtccacagggggtgctgcacggtgggagaggggagaggaggccagtgtgctagattagggccagcttgagatggcctcagttttcttatctgttcaatggggataagaatgtctaattggctgtgcgcagtggctcacacctgtaatcccagcactttgggaggccgaagcaggaggatcgcttgagctcaggagttcaagaccatcctgggcaacagagcgagatcccgtctctactaaaaatttttaaaattagccaggcaggccgggctggtggctcacgcctgtaatcccagttctttgggaggccaaagcgggcagatcacttgaggtcaggagttcgagaccagcctggccaacatggtgaaaccctgtctctactaaaaataaaaaattagccggacatgttggtgcgtgcctgtaatcctagttactccggaggctgaggcacgagaatcacttgaacccaggaggcagaggttgcaatgggccgagattgcgccattccactccagcctgggagacagagagagactccgtattaaaaaaaaaaaaaaaaaaaaaaaaaaaaaaggccgggcgcggtggctcacgcctgtaatcccagcactttgggaggctgaggcgggtggatcacgaggtcaggagatcgagaccatcctggctaacatggtgaaaccccatctctactaaaagttagccaggcgtggtggcgggcgcctgtagtcccaggtactcgggagcctgaggcaggagaatggcgtgaacccgggaggttgcagtgagccgagatcacgccactgcacccagcctgggcgacagagcaagactccgtttcaaaaaaaaaaaattagctgggcatggtggcacgtgcctgtagtctcagctactagggaggctgaggtgggaggatcgcttcagcccaggaagtcgaggctgcagtgagctgtgatcgcaccaccgcactccagtctggtcaacagattgagaccctgtctcaaaaaagaaaaaacaaaaacaagtctacctgcctggctcgctccagattctgtaaagtgatgccctgctatgaacttgattcaggatctgtatgcggttccccagcaccctctgcgggtcctgggtgccaagtgtcaggaattcaacctcaaagggcccgccctttccccaagacagagccaggctccttagcctggcattcaaggcccccactctggcgctaacgctgtccctcgcccagcccatctacccgggctcctctcctctttctgtggaggactccctgccctccccagggcctctcactccagaactagcggagtcccctcaccctcaccgggcggcggactccgcccttactcctgggcttacttgtacctggccaggatgccccgcccaagcaccgcctctagcgcggctggtcccgccccaaggacgcccctttgctccaggccccgccccggggtcccgcctccaccactcgggccaggacctggggcccagccccgccccgcgccccgcccacctggagcccgtagtcgcgcgccgcctcccacacgaacttcttgctgacgccgccagcgccgaccaccagcagctgttttccctccatgaggcagcgcgccgaccgccgaagcatggtctccaccagcggcgccgccaccgcctcgtcggccgccggccccagccgcggcgcggcccacagcccctccagcgcgccgcacgcctccagacacaggccgccgttcagctccagggccactggggtcagcacgccgccggccgctgtcagcgcgaaatccacgcctgcgccgggcgggaggcgcgagctcagctacggcagccaccgccctccagcccctggccctcggctcccggccccggccccggccgccctcactcacccaggaagtccgtgtgcgcccggcgcccgccgcgctgctcggcactcaggccggcctccagagccagcacggcggccagcgcggcctcggccgccgccttgacgcgctgccgcacagccgccacctgcgcctcctcgcccaggccgcactgggccagcgccacctccagcgtcctcggcagggagttgtggtgccgtagagggcggtccccgcggcccacgccgcacaccacctgggcagggggagactcagggggaggcccacacactccctgccccccacgcacacccccaccgccttgtgccaaaattcagaccagacccctcactggacattcaagaagccccgtcctccaacgtgtcttaaattgcacacgagctctccctgccactccccatctggtccccagacctctccagggattctacctacccaggcttccaggcccagctggggtccccctccaggatggctcctgcagccctgggggcctgggccaccctggtgtgccccaccctagcatctccctggggcgcacctttccctaccccactggagctccctgagggcagggtcgaatctctccctctcagtgtagcctagagcggggtactcaggagggtccgtaagccttcctgactctccagcttagaggcccctcctgaaggcgtccaggcactagaggtttatcaggaggccctgggtcagcctct

SEQ ID NO: 1680 - DNA, 6000 bp, Homo sapiens
gactgcctggtgctcacagccctgctctgccaggagctaggtctgccctgcagctccccagctgccatgcgcctggctaagcagaagagcctcacccagctgcacctgttgcaccaccatggcccaccctggcctgcgccctccctccatgctgtgccctgctgcccactggagagtgaggctgatgtggagagggccgtgcaccaggtacccctgccaggtgtcatgaagctggagttcggggcaggtgcagtgggtgtccggctggtagaggatgcgccacagtgccatgagcacttttcccggattacccgagacttgcagggcgaggccgaccacccaggcattgggctgggctggggcaatgccatgctgctgatggagtttgtggagggcaccgagcacgacgtggacctggtgttgtttggtgggcggttgctggctgcctttgtctccgacaatggccctacgaggctgcctggcttcactgagacggcggcctgcatgcccaccgggctggcaccagagcaggaggcacagatggttcaggcagccttccgctgttgcctgggctgcgggttgctcgatggagtcttcaacgtggagctcaagctgaccggggctgggcctcggcttatcgagatcaacccccgcatgggtggcttctacctgcgtgattggatcctggagctctatggtgttgacctgctgctggctgctgttatggtggcctgtggcttgcgtcctgccctgcccacccgcccacgtgctcgtggccatctggtgggcgtcatgtgccttgtgtcccagcacctgcaggccctgagttccaccgccagccgtgagaccctgcaggccctgcacgaccgtggactgctacgcctcaatctgctggaggaggccctggtgcctggcgagtatgaggagccctactgcagtgtggcctgtgccggacccagccccaccgaggcccgtctccgcctgctgggcctctgccagggcctgggcatcgatgggcccagctaccctgttgcccacttcctgtctcacttcaaatagcactggggtcagggggcagggaagcagtgctgggtggaggcactgtggtgccctctgctccctggagctcttcctgcttctctccccatcaccatgccccagccccagcctggcccgctgcaatgcctaggtctgttccagagcagcagggcaatttagacaccaaggcatcctggactcaagggcctcttgccctcccgaaggccccagtccagcctacagcttccccagcattctagccttggagaaatgacaatggccacacacacacacacacacacacacacacacctctgacgccagctccccaggtgggagtgggcccaaacccagcccctcctgtccacctctccaggtctcactctcttcctgccatctacaagaggagaggacctggctgggccccaagccttggacaaatcctgggaaaacctgagactagaacccttgtcttcctcttacccaaattctaggatagctctgaagcctgctggaaacttggtggcatccaacctgcctcattcggcctgaccggtagaggcaggtggcctgtggacagaagtaatcctctttctgctcaccccaggcagacacaactgcctatgttcccccgatgagaggaaacaggctgagagaagaaaaatgactgctccaggattataccacagtggagagcgggtcacaggacatgatgcagggtccaggtttctgttttgatcaagtcttacatgcccattcagcttctaggcccccctcacctccctgccctcattcacaagtggccctgagacacgtgaacacctccctcctatgcatcacaaaccttctccaccgagctttggtgctttggcctctggcacacctaactagcattggcagaggagagtctacactctcttcctcattcagggaagatgctttaagaaatcctgcctctgtgcagcagaggagctggaggcagctccccaggcatccctccccaaataaaggcttatgtactggtgaagtgtctagataggttctcttgactggacaactcctcccaggatcagctagatagggggtggggaagggggatcaagagacgggtaggggatacttgtagcatctggagctaagggaaaaccaccccactggcctggtgtctgagttgccctgggttgctaggggcctgccctacacccacatcaagacccgaacctggggatctcctttggtggaattacaaccagagggccacattcaacgagataaccctctgcatgcctggagacccctgaattctgtccacctcagttcatacccaacctcccctatgcacatggaaggcacacctagacagcctccaacaatcagaactcacacccaaggcctggtctgacccaaattcacacccacacatccccatccaataagaatccatacccaatctttttttttttttttgagacagtttcactcttgctgcccaggctggagtgcaatggcacagtcacggctcactgaaacctctgcctcccgggtttaagtgattcttctgcctcagcctctcaagtagctgggattacaggcacccaccaccacacccagctaatttttgtatttttagtagagacggggtttcaccatgttggccagactggtgtcgaactcctgacctcaagcgatccacccggctcgacctcccaaagtgctagggttgcaggtgtgagccaccgcgccccgccaaatccatacccaatctaaagtcacagaccacatgtcacagacaagatttgctgtgttgagtgtgttcattccttctttctttttttttctttttttggagacggagtctcactctgttgcccaggctgtagtgcaatggcgtgatcttgattcactgcaacctctgcctcccaggttcaagcgattttcctacctcagcctcccaagtagctgggactataggcatgcaccaccactcccggctaatttttgtatttttagtagagacaggttttcactatgttggttaagctggtcttgaactcctgacctcaagtgatccacccgccttggcctcccaaattgctgggatcgcaggcatgagcgaccctgcctggcctaagttcattctgtcaacagcgtttttggtttttgctgggtgtagtggctcatgcctgtaatcacagcactttggaaggccaaggcaggaggatcacttgagtccagaagttcaagaccagcctcctgggcaacaaaacaagacctcccctctaaaaaaaaaaaaaaagaaagaaagaaagaaaagaaaaaagattatgtgattatgtcattccagttacttgggatttgaggtgggagaatcactggaacccaagaagtcaaggctgcaatgagccacgatcttgccactgtactccagcctgggtgacagagtaagatcctgtctgaaaaactaaacaaaacaaagaaaaaaaaaccataaagttttttttttttttttttttttttttttttttttttttaagatggagtctcgctcttgttgcccaggctggagtacaatggcatgatcttggctcaccgcaacctccgcttcccaggttcaagtgattcgcctgcctcagccttcccgagtagctgggattacaagcatgcaccaccatgcccagctaattttgtgtttttagtagagacggggtttctccatgttggtcaggctggtcctgaactcccgacctcaggtgatccgcctggctcggcctcccaaagtgctgggattacaggtgtgagccaccgtgaccagccaggttttcgggttttatctgtttgagacttggtctcactctgccgcccagcctggagcgcagtggtgcaatcttggctcactgcaacctctatcgcccgagttcaagcgattctcctgcctcaacctcccgagtatctgggagtacaggtgcgcgccaccacacccgtctaattttttgtatttatagtagaggcagagtttcatcatgttggccaggctggtctccaacttctgacctcaagtgatccacccacctcggcctccgaaagtgttgagattacaggtgtgagccaccgcctccggcctgtttgtttttttgagacaggatctcactgtgtcacccagcctggagtgcagtggcaccatcatagctcactgtaaccttgaactcctggcctcaagtgatcctcccaacttggcttcccaaagtgctacgattacaggcgtgaggcatcgtgtccggcctcaacaacgttttttgaagtgtctattctgtaccaggtgcctaaatgtgcttaaattaagaagggagtaaacgccaacaaaatcccatatttacaggtctatcactgacccccaaaaccctatttaaggcgggaacctggcaacatagcctggcagtgagctggccactcagtaaatgctccgatttgcagggtcctcgagccagaggcactttgaggagaccctgatgcagccgcctccctttctggagtgaaccgaaagcaacgcgacctgcctttcatcacgcagccggcctggcagtacccgtctccaacagggctggggattgcatttacattcacacctgcatacacttccgaccctgctccatccaaactcaaaacaccgtagaaccaaaacgggctcccagaaagccttgctgggaagaccgagggtcctgcggaaaggattctgcaggctgaaggctaggcgcctcgccactctaggactacaattcccgagaggccttgcgacggaagccatctttgttccccaccaggctaagcgattttccggagggggagtaagatcccttgcgtcaccggcgcgcgcagctgccgtcgcggagagatgatgtttaggtccgggactgtcagtcagtgcgcggccaggtacgggccgacgggcccgcggggccggcgccgccatggcggccgtgtttgatttggatttggagacggaggaaggcagcgagggcgagggcgagccagagctcagccccgcggtgagtgccctgccctggcgcgactggatcctggagccgatcctgtcacccagccgaggccggagcggcggctccgcacgcccagagcgggctccgactctttgcagacccagatccttctcagatcccggtctctattaagttctgatcccaccctcaccccgacctctcttccagaaccccagccttttctcccgattctccctttcctgccttcggtttcttcccaattcttacccatcccctactagctgccatccctgacacccttctctcctgggccacgcagtccaacctgaacgggagcggggaggtatcctggcaccttccttggctcttacccctcggtttctcacaggacgcatgtccccttgccgagttgagggcagctggcctagagtgagtgagggtcgtgttgggggaggggggaatggagtggggaaggggaactggggagcactggagccttgtcctcattaactccttgtgtccgtaggcctgtgggacactatgaagaggtggagctgactgagaccagcgtgaacgttggcccagagcgcatcgggccccactgctttgagctgctgcgtgtgctgggcaaggggggctatggcaaggtaggggcgggcgcaccctcctcctggcctcacagcctccatctggaggcagcaaagggttctcaaaacaaattagacttgtgaatcagcagggcctctaatgggattcagagccagaaacataaaggagggaaggccaaatcctctccaatcggacttgaaatcttcactgccccacccttggcagggcctaggcctcctgatcccaaagccagagcttcagggtggggcttcttgaagataggatgtggagagggaagttgatcctgtctcccctgccctacaggtgttccaggtgcgaa

SEQ ID NO: 1681 - DNA, 6000 bp, Homo sapiens
ataaaatgtagctataggcagtttctggacgttttcctatttgttaagcaccttcttgctccgagctttccagccacagtgcactggacgccatcggaaggctgcagctgctatttggtgctttaccaccgctgagaaggtggaatggtcacggcccggttctgtcactttcttcagccggacagtcgccttattacggattccagtagggccgagcacactccttcctgcccgtctttacagatgaacatgctatcgctccagcagtacaacccgccttattacgtaaaaaagcagcccctatctacccgcagggaaggagtatgttcggcaccacagctggactggtgctcgagttaagcgtcctgggaggtccgcatgcgctccggaaccgtaatgcgcgctttttctaagccttacggtaaacgcggacgcagggcaaccacgtggcggtggaaccgaggcccggcgggaatgcgcggaatgcgcggcgcggcctcgcgcggttcccgagccacggcccagggtccggcggcgcgcgctctcgcctcctcccctcacctctcccagccgcaccccggccctggccctgccgcccagaactcgctgggcaagtcgtgccccgcgtgaacacacagaaggggcttggggaccgagcgcggcccatcagtccctcagaccctgaggacccagaattccctaaggggtccgaatccgagtcctgcccccagcccttaaggcacgggctccagggaccccaggggaagggcgcggggcattaggtacgcaacccgtttccccgcacctggaaaaaaactccctttccctcccctcccctgcttgttgagtgtccggataaccagaactctaaggcgccccgtaataacgaccccgctgtccctccacccacccccaagtgccaaagcgagggatggaagcgctttcaagcgttccaagggcattgaggagcgagctggagaggcgcggggatgcggggtcctccccgcagtcttccggaaagggcgggggagggcgcggcaagttccggagtggggcatgccgtgggagcccacgagggcctcagcgcggatcctccgccggaaaaccggctcccgcgagccgccgccgcaggtttcctaggccccgcgagtcccgcagcgaagccctgcgtctccgtccgacgcgggggtctgctcagcctcgggtgggccgcggccaggcctgactgcgggggagagggccgaacgtgacctccgaggtcacccccagccagctttctctcctgtggtcggaagtggttttcttctcgatctgggcgcctactccccaccacttggtctgagaggggctggggccggaaggccagggaatctctggtggatttgggggttcatattgctcagggtaccagccgatgcgttttgaggggcgggagtcgaggaattagaatcgcctttaaccctcaagagttgcgccttcagcctcgggatcccagatgcgtcgttggagccagggccgcccccctacctgttgggtttgcgttttaactccagcgcacaccttgccggcagccctcggagctaggggaggggtctcgtttccccgcagcccgccggacagacgactggggcacgggaggggcggtggcagggtggtctgtgtgtggctgaaactaattgatctggagcggaaacgcacgtctgcggttggggcgatggggggggcggtgcggctgtccatgtgccgagcgtgtggctgtctcgggtgggcactggggccggagttcgccccggcccacctcgcagttttggggcgcctgggatcggcgctacgtaagcgaagcagagctgccatagcacgtgggccgccacgcgcaccccaaaagcaagcagtgtggggggaaggggagctcgagcgccttcggagcccaggggccggctttcggaagcgttttcccgggcgacttaagggcttaacaatggaaaactcgcggagcctgagccaagtcctttcaagtcgccgccaggtatgcggctgcaggtgaccccacctgggtgcgcccgcccgccagccgccctggtggaaaagcgggtgcgggaggtcgctggcgaaaggtcgggactggtccctgcaccacccgcccccaacccaagccccgagccccgcggcgcgcagccgcgctgagtcccggggtctgcgtcgcggcgcgccggttcctgaatgaacgcgctcccttcccccgcctgaatgaaggttcccacagccagggacggtggcgaacacgcgcctgcagcggaattcgctttctcctgaccgaccatccgcccaggccgcggtcaccggggcgggggccagggggcgaggaaagcgtgaaggtgatttcagttaattttggattttctttcaaacaacgtggttaccctcccgactgggccacttgccctttgtctccaaatggtcaccaagaaataagaacagagcactttaaatgagcccagaatccgcagttcctgcttcgtggtgggttttaagaagacagtgtaaagtaaaactgcaaccgaaaagttttttaaagttgcttttctctttggaaaaaataaaatcaaaatgctttctctgcgcttcttgaagcaatgaccctcaaaagcccagaggtattggccccctcgggggacccgggggccgccaagcagggttcccccaggtgggggctgggcagctggcgctccccgccgggccccaaattccagcgccgggccccaaattccagcgcctcccccgcgggttcctggacggctctttacgctcgctaaccgggcttgcaattttgcgctcgtccctgagccgggaaatcaacgaagttcctagtcgagatctgcccggtccgcctagtaacagcgccgcgcccccattggctcatgctaattccagtttcctctgtcttgcgcccgggatgggggggtgaagctccctcctggacccagagccggttgtgccggagtgggcgagcctctttatgccctgctgcccctagccgacttcggcccgcttcgcgcctcgggctgggccagggcgcacgcggggctcggggcccctcgccccacgggatgggagaggccgggtgatagctccgggccccataaatcatccaggcggccgccgggtcgggattttatgaatgaaaaagcagctgggccgcccttgtgcgcgggctgatgctctgaggcttggctatgcgggggccaacgcgattgtgggtgctcggggagtgggggggggcacgaccgtaggtgctccctgctggggcaacccatcgctccccatgcggaatccgggggtaattacccccccaggacccggaatattagtaatcctaattcccggcgggggagggggcgcgggaggaattcaccctgaaaggtgggggtggggggggtcgcatcttgctgtgagcaccctggcgaaggggagagggctttttctatcagttttctttgagcttttactgttaagagggtacggtggtttgatgacactgaactatattcaaaaggaagtaaatgaacagttttcttaatttggggcaggtactgtaaaaataaaaacaaaagttaagacagtaaaatgtccttttattttttaatgcaccaaagagacagaacctgtaattttaaaaactgtgtattttaatttacatctgcttaagtttgcgataatattggggaccctctcatgtaaccacgaacacctatcgattttgctaaaaatcagatcagtacactcgtttgtttaattgataattgttctgaattatgccggctcctgccagccccctcacgctcacgaattcagtcccagggcaaattctaaaggtgaagggacgtctacacccccaacaaaaccaattaggaaccttcggtggtcttgtcccaggcagaggggactaatatttccagcaatttaatttcttttttaattaaaaaaaatgagtcagaatggagatcactgtttctcagctttccattcagaggtgtgtttctcccggttaaattgccggcacgggaagggagggggtgcagttggggacccccgcaaggaccgactggtcaaggtaggaaggcagcccgaagagtctccaggctagaaggacaagatgaaggaaatgctggccaccatcttgggctgctgctggaattttcgggcatttattttattttattttttgagcgagcgcatgctaagctgaaatccctttaacttttagggttacccccttgggcatttgcaacgacgcccctgtgcgccggaatgaaacttgcacaggggttgtgtgcccggtcctccccgtccttgcatgctaaattagttcttgcaatttacacgtgttaatgaaaatgaaagaagatgcagtcgctgagattctttggccgtctgtccgcccgtgggtgccctcgtggcgttcttggaaatgcgcccattctgccggcttggatatggggtgtcgccgcgccccagtcaccccttctcgtggtctccccaggctgcgtgtggcctgccggccttcctagttgtcccctactgcagagccacctccacctcaccccctaaatcccgggggacccactcgaggcggacggggccccctgcacccctcttccctggcggggagaaaggctgcagcggggcgatttgcatttctatgaaaaccggactacaggggcaactccgccgcagggcaggcgcggcgcctcagggatggcttttgggctctgcccctcgctgctcccggcgtttggcgcccgcgccccctccccctgcgcccgcccccgcccccctcccgctcccattctctgccgggctttgatctttgcttaacaacagtaacgtcacacggactacaggggagttttgttgaagttgcaaagtcctggagcctccagagggctgtcggcgcagtagcagcgagcagcagagtccgcacgctccggcgaggggcagaagagcgcgagggagcgcggggcagcagaagcgagagccgagcgcggacccagccaggacccacagccctccccagctgcccaggaagagccccagccatggaacaccagctcctgtgctgcgaagtggaaaccatccgccgcgcgtaccccgatgccaacctcctcaacgaccgggtgctgcgggccatgctgaaggcggaggagacctgcgcgccctcggtgtcctacttcaaatgtgtgcagaaggaggtcctgccgtccatgcggaagatcgtcgccacctggatgctggaggtgcggggcttcgggcggctctcttaagacttccctgcaacttgttgcccagacccacgtttctttgctactcacccccctcccttctctcccgctagaactttgaagtttgccgtggtgtttctagggatccgtattttcaaaataaaaattgcgggtattttctgaaggaggaaggggtgggggtgggggtgctagaagtagcgtttcgtgggaggggagaagggggtccgggaggggtgccttcgggagaagccagtgccaggggcaccccaatgggcccgagggtgcgggctggcaggctgggtgcgctttgtgtcccccgcctgcgccccagcccggctgcgcctcagcggccgggagccgccaactccggggggagggggcatagatttgatttttaaattaatatccatggacacgtatgcaagggccgctcgtgccagtattatgcgccatctttgctcttttattgcaaagcaaaagtgtttattaataattgggggcagggtgggggcggggagcggccgccgggcgctggggccgcagctaagggccgcgcggctgccgggagcccgcgggaggggcgcagggacgcggcatgggtagttttggggggacgccgctagggaagggggggcctttgttcaagcagcgagtcccggggcgccccgaacgggcagcctgggccggagagcacggcgag

SEQ ID NO: 1682 - DNA, 6000 bp, Homo sapiens
gcagcctggcaggcggatgagcccagtatctggcagtgaccagagggagttttgtgcagaccacaaaggctgatgggccgccctagattggtgtccctcttggaagtgggcccagatgtgcgggacagtccccaggaagccccaggtgagggcactggtgccctcttgggaaagctgctccctcctggggcccggctcccggcccagtcctccaggggtgtcccatggtgactggtgctaggaaccccacacctcttcccttacttgggaagtcactggaattgttgggctacatcagacggcccagaaaagtgtttttgtcatcggccagaaataggagagttgtgagtagagggcccgggtggagttggggtgtacttggtctgtgctctgaaggtcactgtgacagtcatggtcccatggtaaggggcatgggttgctggaagagctcttccttcccgagtgagccaagccgggctctcctggcgccagggcctgagccgcagccacaccacagccgccctgaaggctgccggccagggcttacccctcaagggacacggaatggcttcatcagtaccctgcagccccgtggcctggcccgggtggaggcctaggcttcagccatgcgatgtcccttcagaatatgacttgtctgcaatccctgctgctggggggtggcaggtacttggggtgagggttagggtcatagaagcgacatctctacgtcctcatatttgcgtcatctaattttgtttttgtgaatacgtgataacattcacaaggctcaagatgctaaaaggatgagaaggcagtgatgtccccatcacctgtcctgtgtcttcccgtggctttctctttccttggttatgtttgagtcaacagtggggctgacgttccaggagggtccgtgggccaggctcttgctctccgagtgcccagggatggctggaggctgaggagggcctggatgtggagcctcagataccgagtgcttcccttcaggccgggccgcttgctcagagccagcacacagggatgcccggatcacgggggccctgagagggtcccctgctcacagcctccttccctctctccttctgcctcagatgtgaagttcatttccaatccgccctccatggtggcagcggggagcgtggtggccgcagtgcaaggcctgaacctgaggagccccaacaacttcctgtcctactaccgcctcacacgcttcctctccagagtgatcaagtgtgacccggtaagtgagggtgatgtcccaggcagccttgccggggcttacagggggagacacctagtgccacggaaatgccgaggctggtgccaaggcccccaagggtgacaaggttggggctggggctgggcccctcggaccccaggccacagactgacagggcaccggcttcttccactgctcctagaacttactgactggctgggaggtcctcacagccttctcacgtcccctggggcttccaggagccgtagagtttctgggcgaagcgtccgggacggaggccccaggcggccccagccaatggtctgtgtggtgatggtgtgtggggttaggcccaggcgagctttgtttgggccacaatgtgcgtggccaataaatagatgcttgaaaagggctcctgtgaggtccgagacaccggacaacgggcggatagagacagccttgttgtttacggcctctttgagaggctgctgctgttaaaccctgggatgactgtgtctttcttcttaaaaatgccattgttttattcccgagtcttttcttaaagaaagaattaaaatgacaatcaaaagggtttgtggcatttaccaaattagaccagagaggtggccgggtcagccgccggccccgcggtgtgtgagggagtgaccgcctgaccccagcttggggctgggtgggcctgcaagacccgttttggctctggcctgggccgcctcttggtggtctgccctcgagcctcccggggactccgcacgggtctcagcagatgctatctagggtccacctgcctgtcccctgcctagtggtgcctctgtcccggggacactgggagtagcggctgcccagcccatgtgtgtctcggaagaggaagaagcttttttgccgtgggacaccgaagttggcaggggcctcccttctgtgttctcggccatggcctcccttgcaccctgccccgtgttatcctttgggggtggtgaggtgtcctcacccgctgtagggtggaggccagcagcccgcagctctctcaggaaaatggctcagaaacaccatcgaggcctccagaagcccagcaaagagaaagcccctccatcaaaatgaaactcgcgtctgcacttttcatttcgaactccacgccctgagtgaaaaccgcttccccgccaggggtgactgccctgggatgttgctgtcttcgggcagttgtgggaagttgggcgctggcccttatttgagtagagaccatcttaactagattggaggcacacgtctcacagctgacagacacacggggtgaagttacccgaggcggagtccactctgcctgatcagctagtgaccaacgtagctgagcccagactcagaaaaaccgtccacagcagaggcccctgcattttctagggcgtgttctagaattttctttggtgggtggaatgtccatctgtgcaaatcgggtgcgcagtgccacacaccagtgacttttcgcggaggagcgtgctgcctttttggagcttctggctgtgggagaacagctttgtccaccggggtagccttgcaggcagctgtggggccagaggaatgaaggaaggtcctggagtctagctgcatgtgtgaccctggagtgggtcatgggcgagggacgggccgcaggtgaagaatccctggatggagctgccaggcccctggggctgagaattgaagctggctggtgttttaggttgaacgtcaggagtcttgtatctcaccccaggcctctggcctcagtttccccatctgtacagtgggactgtttgtgcagccagcccggccagcttcatttgccatgatgagaatttatctgaggggcgggagaggaaagccctccctataaaggtacaggcgctaaaatgtcgtgacctcagtggtccacctaaaagtcgttctggcctgggtcatcgcctgtcgtgctatgcctttgtccagccccttctggttgggagttaagtggcacctgtgcggcacgtggtggggctgtggcccagccctgctccttgtggaaggtctgtttcctgggctgcctagagacttggcttgaagccctagcgtggcttcctggcagttgggacacacacagccccaacacatggagccggttctccatccagaagcccccgggcagtaagcagccacttcaggctgcgtgggacttgcccgtggtggagcctaggagaggcccctggctgggcgtggcgttccagatttcacggctgctctttcccactgacagtgtggtgtggacgctgccaagggagtctggagccccagagggtggaggtgcaggacttccaggagcgtccgtcgcactccacccgagggcgagcacctcagtggccgcagtgggtggatgcatgctgtgccaggctgatggctggccccggggcacaggcctgagcgggagaggatggaggggagggatcaatggtccaggtccccctggccacccagcattcatcctcagtcatgcacggcccaaggcttcgacagccattgatcatggaaggccaggttcacctcaagggctgccacatggagaggttaagtctgaaaaggctgaaaaggcagggttcaaagggcctcctgtccagatcagatggcactgaattccccagggagctggcacggccagtgggaacaggcggtgaaggcgctgttggacatggggacgggcagggggtgtgcagggtgggcgggcaagcatctggtgtcttgtggctccagagaccaggtgggaggtggaggcatttggtcctgagtgtcctgacaggtgatggcagctcccacatctcgctcaggttcagaggaggcagcatgggccgagggacagtttttggcttagtcttgctcttataaaggcttccgggtcatggcacctgggaaggggccctcgctgcaggccccttctaaggaccccctcttcccacctctccccaccctctctctctcaggactgcctccgggcctgccaggagcagatcgaagccctgctggagtcaagcctgcgccaggcccagcagaacatggaccccaaggccgccgaggaggaggaagaggaggaggaggaggtggacctggcttgcacacccaccgacgtgcgggacgtggacatctgagggcgccaggcaggcgggcgccaccgccacccgcagcgagggcggagccggccccaggtgctcccctgacagtccctcctctccggagcattttgataccagaagggaaagcttcattctccttgttgttggttgttttttcctttgctctttcccccttccatctctgacttaagcaaaagaaaaagattacccaaaaactgtctttaaaagagagagagagaaaaaaaaaatagtatttgcataaccctgagcggtgggggaggagggttgtgctacagatgatagaggattttataccccaataatcaactcgtttttatattaatgtacttgtttctctgttgtaagaataggcattaacacaaaggaggcgtctcgggagaggattaggttccatcctttacgtgtttaaaaaaaagcataaaaacattttaaaaacatagaaaaattcagcaaaccatttttaaagtagaagagggttttaggtagaaaaacatattcttgtgcttttcctgataaagcacagctgtagtggggttctaggcatctctgtactttgcttgctcatatgcatgtagtcactttataagtcattgtatgttattatattccgtaggtagatgtgtaacctcttcaccttattcatggctgaagtcacctcttggttacagtagcgtagcgtgcccgtgtgcatgtcctttgcgcctgtgaccaccaccccaacaaaccatccagtgacaaaccatccagtggaggtttgtcgggcaccagccagcgtagcagggtcgggaaaggccacctgtcccactcctacgatacgctactataaagagaagacgaaatagtgacataatatattctatttttatactcttcctatttttgtagtgacctgtttatgagatgctggttttctacccaacggccctgcagccagctcacgtccaggttcaacccacagctacttggtttgtgttcttcttcatattctaaaaccattccatttccaagcactttcagtccaataggtgtaggaaatagcgctgtttttgttgtgtgtgcagggagggcagttttctaatggaatggtttgggaatatccatgtacttgtttgcaagcaggactttgaggcaagtgtgggccactgtggtggcagtggaggtggggtgtttgggaggctgcgtgccagtcaagaagaaaaaggtttgcattctcacattgccaggatgataagttcctttccttttctttaaagaagttgaagtttaggaatcctttggtgccaactggtgtttgaaagtagggacctcagaggtttacctagagaacaggtggtttttaagggttatcttagatgtttcacaccggaaggtttttaaacactaaaatatataatttatagttaaggctaaaaagtatatttattgcagaggatgttcataaggccagtatgatttataaatgcaatctccccttgatttaaacacacagatacacacacacacacacacacacacaaaccttctgcctttgatgttacagatttaatacagtttatttttaaagatagatccttttataggtgagaaaaaaacaat

SEQ ID NO: 1683 - DNA, 6000 bp, Homo sapiens
tcagagccagcacacagggatgcccggatcacgggggccctgagagggtcccctgctcacagcctccttccctctctccttctgcctcagatgtgaagttcatttccaatccgccctccatggtggcagcggggagcgtggtggccgcagtgcaaggcctgaacctgaggagccccaacaacttcctgtcctactaccgcctcacacgcttcctctccagagtgatcaagtgtgacccggtaagtgagggtgatgtcccaggcagccttgccggggcttacagggggagacacctagtgccacggaaatgccgaggctggtgccaaggcccccaagggtgacaaggttggggctggggctgggcccctcggaccccaggccacagactgacagggcaccggcttcttccactgctcctagaacttactgactggctgggaggtcctcacagccttctcacgtcccctggggcttccaggagccgtagagtttctgggcgaagcgtccgggacggaggccccaggcggccccagccaatggtctgtgtggtgatggtgtgtggggttaggcccaggcgagctttgtttgggccacaatgtgcgtggccaataaatagatgcttgaaaagggctcctgtgaggtccgagacaccggacaacgggcggatagagacagccttgttgtttacggcctctttgagaggctgctgctgttaaaccctgggatgactgtgtctttcttcttaaaaatgccattgttttattcccgagtcttttcttaaagaaagaattaaaatgacaatcaaaagggtttgtggcatttaccaaattagaccagagaggtggccgggtcagccgccggccccgcggtgtgtgagggagtgaccgcctgaccccagcttggggctgggtgggcctgcaagacccgttttggctctggcctgggccgcctcttggtggtctgccctcgagcctcccggggactccgcacgggtctcagcagatgctatctagggtccacctgcctgtcccctgcctagtggtgcctctgtcccggggacactgggagtagcggctgcccagcccatgtgtgtctcggaagaggaagaagcttttttgccgtgggacaccgaagttggcaggggcctcccttctgtgttctcggccatggcctcccttgcaccctgccccgtgttatcctttgggggtggtgaggtgtcctcacccgctgtagggtggaggccagcagcccgcagctctctcaggaaaatggctcagaaacaccatcgaggcctccagaagcccagcaaagagaaagcccctccatcaaaatgaaactcgcgtctgcacttttcatttcgaactccacgccctgagtgaaaaccgcttccccgccaggggtgactgccctgggatgttgctgtcttcgggcagttgtgggaagttgggcgctggcccttatttgagtagagaccatcttaactagattggaggcacacgtctcacagctgacagacacacggggtgaagttacccgaggcggagtccactctgcctgatcagctagtgaccaacgtagctgagcccagactcagaaaaaccgtccacagcagaggcccctgcattttctagggcgtgttctagaattttctttggtgggtggaatgtccatctgtgcaaatcgggtgcgcagtgccacacaccagtgacttttcgcggaggagcgtgctgcctttttggagcttctggctgtgggagaacagctttgtccaccggggtagccttgcaggcagctgtggggccagaggaatgaaggaaggtcctggagtctagctgcatgtgtgaccctggagtgggtcatgggcgagggacgggccgcaggtgaagaatccctggatggagctgccaggcccctggggctgagaattgaagctggctggtgttttaggttgaacgtcaggagtcttgtatctcaccccaggcctctggcctcagtttccccatctgtacagtgggactgtttgtgcagccagcccggccagcttcatttgccatgatgagaatttatctgaggggcgggagaggaaagccctccctataaaggtacaggcgctaaaatgtcgtgacctcagtggtccacctaaaagtcgttctggcctgggtcatcgcctgtcgtgctatgcctttgtccagccccttctggttgggagttaagtggcacctgtgcggcacgtggtggggctgtggcccagccctgctccttgtggaaggtctgtttcctgggctgcctagagacttggcttgaagccctagcgtggcttcctggcagttgggacacacacagccccaacacatggagccggttctccatccagaagcccccgggcagtaagcagccacttcaggctgcgtgggacttgcccgtggtggagcctaggagaggcccctggctgggcgtggcgttccagatttcacggctgctctttcccactgacagtgtggtgtggacgctgccaagggagtctggagccccagagggtggaggtgcaggacttccaggagcgtccgtcgcactccacccgagggcgagcacctcagtggccgcagtgggtggatgcatgctgtgccaggctgatggctggccccggggcacaggcctgagcgggagaggatggaggggagggatcaatggtccaggtccccctggccacccagcattcatcctcagtcatgcacggcccaaggcttcgacagccattgatcatggaaggccaggttcacctcaagggctgccacatggagaggttaagtctgaaaaggctgaaaaggcagggttcaaagggcctcctgtccagatcagatggcactgaattccccagggagctggcacggccagtgggaacaggcggtgaaggcgctgttggacatggggacgggcagggggtgtgcagggtgggcgggcaagcatctggtgtcttgtggctccagagaccaggtgggaggtggaggcatttggtcctgagtgtcctgacaggtgatggcagctcccacatctcgctcaggttcagaggaggcagcatgggccgagggacagtttttggcttagtcttgctcttataaaggcttccgggtcatggcacctgggaaggggccctcgctgcaggccccttctaaggaccccctcttcccacctctccccaccctctctctctcaggactgcctccgggcctgccaggagcagatcgaagccctgctggagtcaagcctgcgccaggcccagcagaacatggaccccaaggccgccgaggaggaggaagaggaggaggaggaggtggacctggcttgcacacccaccgacgtgcgggacgtggacatctgagggcgccaggcaggcgggcgccaccgccacccgcagcgagggcggagccggccccaggtgctcccctgacagtccctcctctccggagcattttgataccagaagggaaagcttcattctccttgttgttggttgttttttcctttgctctttcccccttccatctctgacttaagcaaaagaaaaagattacccaaaaactgtctttaaaagagagagagagaaaaaaaaaatagtatttgcataaccctgagcggtgggggaggagggttgtgctacagatgatagaggattttataccccaataatcaactcgtttttatattaatgtacttgtttctctgttgtaagaataggcattaacacaaaggaggcgtctcgggagaggattaggttccatcctttacgtgtttaaaaaaaagcataaaaacattttaaaaacatagaaaaattcagcaaaccatttttaaagtagaagagggttttaggtagaaaaacatattcttgtgcttttcctgataaagcacagctgtagtggggttctaggcatctctgtactttgcttgctcatatgcatgtagtcactttataagtcattgtatgttattatattccgtaggtagatgtgtaacctcttcaccttattcatggctgaagtcacctcttggttacagtagcgtagcgtgcccgtgtgcatgtcctttgcgcctgtgaccaccaccccaacaaaccatccagtgacaaaccatccagtggaggtttgtcgggcaccagccagcgtagcagggtcgggaaaggccacctgtcccactcctacgatacgctactataaagagaagacgaaatagtgacataatatattctatttttatactcttcctatttttgtagtgacctgtttatgagatgctggttttctacccaacggccctgcagccagctcacgtccaggttcaacccacagctacttggtttgtgttcttcttcatattctaaaaccattccatttccaagcactttcagtccaataggtgtaggaaatagcgctgtttttgttgtgtgtgcagggagggcagttttctaatggaatggtttgggaatatccatgtacttgtttgcaagcaggactttgaggcaagtgtgggccactgtggtggcagtggaggtggggtgtttgggaggctgcgtgccagtcaagaagaaaaaggtttgcattctcacattgccaggatgataagttcctttccttttctttaaagaagttgaagtttaggaatcctttggtgccaactggtgtttgaaagtagggacctcagaggtttacctagagaacaggtggtttttaagggttatcttagatgtttcacaccggaaggtttttaaacactaaaatatataatttatagttaaggctaaaaagtatatttattgcagaggatgttcataaggccagtatgatttataaatgcaatctccccttgatttaaacacacagatacacacacacacacacacacacacaaaccttctgcctttgatgttacagatttaatacagtttatttttaaagatagatccttttataggtgagaaaaaaacaatctggaagaaaaaaaccacacaaagacattgattcagcctgtttggcgtttcccagagtcatctgattggacaggcatgggtgcaaggaaaattagggtactcaacctaagttcggttccgatgaattcttatcccctgccccttcctttaaaaaacttagtgacaaaatagacaatttgcacatcttggctatgtaattcttgtaatttttatttaggaagtgttgaagggaggtggcaagagtgtggaggctgacgtgtgagggaggacaggcgggaggaggtgtgaggaggaggctcccgaggggaaggggcggtgcccacaccggggacaggccgcagctccattttcttattgcgctgctaccgttgacttccaggcacggtttggaaatattcacatcgcttctgtgtatctctttcacattgtttgctgctattggaggatcagttttttgttttacaatgtcatatactgccatgtactagttttagttttctcttagaacattgtattacagatgccttttttgtagttttttttttttttatgtgatcaattttgacttaatgtgattactgctctattccaaaaaggttgctgtttcacaatacctcatgcttcacttagccatggtggacccagcgggcaggttctgcctgctttggcgggcagacacgcgggcgcgatcccacacaggctggcgggggccggccccgaggccgcgtgcgtgagaaccgcgccggtgtccccagagaccaggctgtgtccctcttctcttccctgcgcctgtgatgctgggcacttcatctgatcgggggcgtagcatcatagtagtttttacagctgtgttattctttgcgtgtagctatggaagttgcataattattattattattattataacaagtgtgtcttacgtgccaccacggcgttgtacctgtaggactctcattcgggatgattggaatagcttctggaatttgttcaagttttgggtatgtttaatctgttatgta

SEQ ID NO: 1684 - DNA, 6000 bp, Homo sapiens
ctaaaaaagaaaaaaagaaagcaaactcccacacatgctacatcgtggatgaatcttgatgatgttatgctaagtgaaatcagccagatacaaaaaggacaaacattgtgtgattccactcatgaggtccctaagtagtcaaattcgtagacacagaaagcgaagatggtgggtgccggggctgggggagccgaatggggagcaagtgtttaatgggcagggagtttcagtttgggaagatgaaaaccatctggagatggatggtggtgatggttgcactagaatgtgagtgtccttaatgccacttacccgtgcacttaacaatggctaaaatgagagaggctgtgagtgtgtggggacagagggtgtaagggaactctctgtaccttcctctccattttgctgtgaacttaaaactgctctgaaaaaagtcttttaaaaaatagttaacatcaggccagacacggtggctcatgcctgtaatcctagcactttgggaggccgaggtgggtggatcacgaggtcaggagaccgagaccatcctggctaacacggtaaaaccccatctctactaaaaatacaaaaaaaaaaaaaaaattagccgggcgtggtggcgggcgcttgtagtcccagctactcaggaggctgaggcaggagaatggcgtgaacctgggaggcggagcttgcagtgagccacgatcgcgccactgcactccagcctgggtgacagagcaagactccacctcaaaaaaaaaataggttaacatcaattttatgttatgtatcatgtatattttaccacctttttttttcttttttgagacggagactcgctctgtagcgcccaggctggagtgcactggcgcgatctcagctcactgcaacctccacctcccaggttcaagcgattctcctgcctcagcctcctgagtagctgggattacaggcatgcaccactacgcccagctaattttgtatttttagtagaaatggggtttcacaatgttggccaggctggtctcgaactcctgacctcaagtgatctgcctgcctcggcctcccaaagtgctgggattacaggggtgagccaccgcacccaattaacaccattttttaaaaagctaaaaaaaaaaattggctcaatctccccttattctgaaggtcctaaagaaaaacatgccacttgctttggggtgcttcggctcagtgtagaccagtctatcccaccggccttatcatcctcctggacttttgcagaaagacatcattgtgagggtgtcttgctgaagccaagaaagggaagttgaattgagaaagcagttgagctatttacaaagtttacacagcctgggcccttgccccgggctgagctcagtcattttgccctgaggactataagtggactattatgcagcactttcttttttattattattactattaagccaagtaagttcttaacagctaacacctgagctggtggctctgagaagcctcttcactccttcacgggagacgggaccattcacatgaagatcctacattgttgtttttttttttttggaggtcgaaaaaggtcactgttaggaggctttctgggcctttgctcctctccctcaatttattacccctccagtggctgatgacgtacagggagacttccacccgataatgacatggctttgtttatttcacaaattcccagcatttactgttaatcagacccagtttgaaccacccccaaggggcttgcagtctaaacagctcactttgctcagcctcttcctgaggtcaggcactgtcttgctaaggccgacatcagctcatgcccattttacagatggggaaactgagaatgctaagaagtgaaatagcgtaaggttatacaactaacagggagacagcctaaacttgaacccaaccggaagcccaacatggccccaagccttcctcgaaccccaggacttggcaaagcgggcgtcctggggtaaagcatggcagaagggctttgggtccaagctaagtgagggtcctgtttctagatcacctggccaggtgcagtggctcatgcctgtaatcccagcactttgggaggctgaggcgggaggattgcttgaggtcaaaagtttgagtccagcccgggcaatacagcgagacctcgtctctactaaaaaagaaaacaaaaaattagctgagtgtgtagtcccagctactcaggagactgaggctggaggattgcttaagcctggaagtttgaggctgtagagctatgatagagccactgcactttagcctgggcaatggagcaagatactatctcaaaaaaaaaaaaaaaattatatataggtccccttgtctctctgctgagaagtaaccagatctggaaaagatttagtcaccttggtccaactatttctttcacataaagaaaaaaaaaggcaatgcagaccttcccataggggcagctctgcctgaggcctttgcaggtacctctgtttgtctgccccggggcacagtggcagattgggcagggcagcttgcagtgaggattgctgatggatgagctcctagtgtacctagccagccatttactcacaaacagctattgagcacctactatgtgcccagcactggaggtacaactggcaacaacacaaatccgggcttgctccatggagatgacaatctaaatgcggtggagggtcagctaacaagtgcagaaggttctcttaagagctcaaagaagctccaaccagaaggactgggcaggggatccagaaggcatccccgagtggctactccaatggagtggcttctccattcaggcaaacctgaatgggataagtcattggcaggaagatctggggccgggggtcatccagtgggaaggggagagatgacgcggtcagcatggcgggaacacaggagcagaaaggaagcaggtgggaagccaggtcaagggccaggggcacggaaaggggtcagatgcagataagtgagtgcttcctggtgcatccttcatccgcaattcttccttacctgtgcttttgttgcctccattgcacagctgaggaggccagggcctgcggaggttgagagtgtgctcagggagcacccggagcaaagtggaagccagattccagatcagttctgctgggaattcccagctcccaaaagccctgctggctgtcagtccccagtcaccacaagcacctatcctgtgtgggtgggcctgcagttctgggagatatatcagctgcctgcagcgtcctttgctgaactcacagcaaataggagagacagggaggggtccttgggaagccctaaattgagcttgctgtgggagtcctgggaagaaaggagcctcatcctatcaaaagccgggggaagacatcagagtccctctgctcaggtcagctggcacaggtgggtctccaggcctgggtctcacttccccagagggtgtgttcggttggccccaggctgagggaggaaagcccacctcccatgtcattttgcaaatggggagtcagggacctagagatggaaagacaacacagcaagtgagggatgggttctaggtcccctgcaccctgcaccctgcaccctggccaacgatgtctatttggcaccagatctgcaggctcatctgggggaccccaggacccagaggcagccgggttgcatctcgaagctgtgagctgcagcccaggaaggtccaggtctgggtggcgctgcccaagcaggctgcaggcccaaggaggaacaaagatcctctcaaggggtgcggagctgaggttccggtcctgccaaagccacttgatgacccccaagtgcccccctttctgcacctcagagaagagccctcaagcctcccaggtcccctccaggggcacgaataagccccagcagggttctgaaggggtcccaggaatctccctgtggggatgcggtggaggtggaggaggctgcggtggcctggggacatctctggtcacaggtgctggtggtatgagagatggggtaggcaccaagccccctgcagctgtggctaggcgggcctgcaggaagggccaggcaggctcctcagggaccacaaagaacaggggttttcacacctaggtgggcctgcatctagctaggacagtccccatcaggccataatgggcacagtgggaggtagaaccatgagtgagagaggggaggcttccagaggcctggcctgggtccctgctagattgagggctctggctatggtacatggatatttctgctgtggaatcaaaggagcaggggatgctgaatatcccctctggccctatgccctgctacctgtcctttcacggaagggtgtgtgtgtagggggtgcaggaccaggcctccctgggtgcatctctgccaccttgccctttggctcaggtggacctccaccaggtattcagaactccagcccagaaacgcgccaagcctgtggggccaagacctagggggtgggggtggcctccctcccgcctgtagccaaagggtcctcccttgcccagccaggccccggtgtcgcttactgctcttatccacccctccttcccaggccggtcctcaaggccccagcaaaggaaccaagttcccgtgagcctccgaaaggcgaagggcaggcagcagccgctggcttctgcgcccactaggagcttcggatgcccgagttagggctgcgccaaggcggccggagcagagagggagacggggacggggacaggcagggacaaagtgcaagaggcaaaactggctgaaaagcagaagtgtaggagccgccaaggggcgggacgaacaggtccgtgggccgggcggagccaagggtgggggccggggtccctccaggtggcactcgcggcgctagtccccagcctcctcccttcccccggccctgattggcaggcggcctgcgaccagccgcgaacgccacagcgccccgggcgcccaggagaacgcgaacggccccccgcgggagcgggcgagtaggagggggcgccgggctatatatatagcggctcggcctcgggcgggcctggcgctcagggaggcgcgcactgctcctcagagtcccagctccagccgcgcgctttccgcccggctcgccgctccatgcagccggggtagagcccggcgcccgggggccccgtcgcttgcctcccgcacctcctcggttgcgcactcctgcccgaggtcggccgtgcgctcccgcgggacgccacaggcgcagctctgccccccagcttcccgggcgcactgaccgcctgaccgacgcacggccctcgggccgggatgtcggggcccgggacggccgcggtagcgctgctcccggcggtcctgctggccttgctggcgccctgggcgggccgagggggcgccgccgcacccactgcacccaacggcacgctggaggccgagctggagcgccgctgggagagcctggtggcgctctcgttggcgcgcctgccggtggcagcgcagcccaaggaggcggccgtccagagcggcgccggcgactacctgctgggcatcaagcggctgcggcggctctactgcaacgtgggcatcggcttccacctccaggcgctccccgacggccgcatcggcggcgcgcacgcggacacccgcgacagtgagtggcgcggccaggcgcgaaggggcgggggcggggggcaacggccgccgggccaacccgctcagtcacactctgagaccctcggcgggcacctgctcgggggccccgggaaccggggcggactcgggctccggtcccttctgacgcggggctggggacgcagacactcttggctccggcagcccagcgcaacccctgaggtcgggcgccgcctcccgccttcagaaactcgggctccgagcgccgaattccagcgccttcgcccgtgggcacagggcgcgcggtgcagccacagggggcccgagacacgcgccccggcctggcccaggctggggaac

SEQ ID NO: 1685 - DNA, 6000 bp, Homo sapiens
tccctacaaagggcaagaagataatgtaaataaaatggcaaaattataacccctagggagtggcagggaccttagtaaacagaagagtgcatgtccaaaccaaatagccagtagtgagcttgacagatggttgccctgtgggaatataagcccagtgtaaccagatctgacaatttttctaaagaaaatggaaatctagatttttggtttaaaaaaaaaatcctgaattgggaatatttgaaagcaattcaaaaattttttaaaaagcatcatgctggctgactttgtgcaagccaaacaaataaaccacacccttcacatctgtaggccttttgtagtctgctttatagtggggttaaatacagaaaactctgatctgaaatgttagaagagcaagctgacaggaatttgggtcctggtggaatatttgttttttgaaaaatgagcttcgataagaataatcttagtggaggtgggtgattgaagaggtggaatggggtgggaactaaagtagtggccttttgagaacagatcctcttatttctcctttggagtagtattggtcttgggccttagaaaaaaatagcaggaatctaattaacagctctgagggagcaatcaatttacaattgtgtgaagtgtaaattcctttgtgcaagaaacaaattacagtatttgcaaatgtgtaaataatgcagcactttcccagcaatccaaatgctttgggtgtccccttgagaaagaaaaagaggcctgaagaggcaaaatgttagaaagtgacctattgtctcaagaaatggagttttaaaaatatctttagtaactgatttttctcaattaactccttattttgaaactatagaggaactcagttctttggtcaatagaatgagaatatttaaagaagtaaacaatttcaagtccaaagtcacagcatattattaacagggtaacttcaatcaaacatgctaaacacaaaaattttccttcaacccttcctacacctctggtttgtggtaacaactttcatttgataaaagagagaatgatgcccaacccataatagttaatacattcaatgtcagagaaggattggtgacaggtaagaacatgagcctaatctctctgcttcaaagcagtggatttttctgaacaattcaattcacatttattggggtgcttttataaagagtgaaactcattactttctccaaaatttttttgagcacttccctatcagttgagctaggagccaaggatacaaagtaaatgttactctatccctgccttcaaggggtttgaagtctaatgagaaaacaggagttaaacctaccatttccctagtgagctttttggtaaagaagaggtatagaggggcactatggatgcttggacaagtgcttgattcaggaagtgtttcaacagaagatattcaccaggcagaaggaagaagggaaagggattaaggtagaggtaggtggaatactgatgggccttatgcagaatgatagctttcaaatgattgctctcacctgtgttcttattcaaatctttccacaaaatattatagcaagttgcaccatgagccttaagacatatgtatacccttttactcagaaattccaggcctaggaatcagagattctgccagaaacttaagtataaggaagtttattttgttatttacaatcatgaaaaatctgaaacaacccacatattaaacaatagcataaggattaagtaagttatggtacatccaagccatgtaattttatggattctttgcttaaaaaaattacactttaaaagaataattcaaaacaagcaacatgattatgagataacagttttgaaatgatgtacaatgtttaatgaagtatcatcctaattttgtaataaaaaattaaaaagtagttctcaacattggttgtaattttcactcatatcctacttttctaaagttctttcttgttttaaacataccagacaacaaaaggggtggagtttctccttgttctatgtgcaataaaaagaactggcttttgtttcttttcctcttaagtgcgatcctgggtttgaaataaaattccctttataatattcaggctggccaagaaaggaaggaaggtcaggtgaagaatggaagagaaaggagatgtccagaaactgaacatttccatgagagaggagaataactatgatgggaatgagggtgtgaggacagaccagaaagggtggttgctgtgttaagaataaggtactggcattgagtagttgagggcagaacataaacacatacataatggttcactgtaagaaatgtcacaatgtaatacatgattaactgccaaataaatagcactacagacaatacatattataatagtttggaggaatttggtgcagagagccatcatatggtcagatacatgtatgtgaccatgtattattgaagatattcatctactaaaatcttcctttagcgatctttgttagagggtgttattgtataggactagattctctcggctttcctttctggaggatttagttactgaagaacttaaaggaactcatttcgaaaggattttagctgtcaagtgaaaaaagaaaagaaaaggttataagaagaatgtgctagaaaacaatatgaatttaaaattctatttgagaaaattcaatctgcacaaaaattcacttcatccttcaatttctcctttcctttaaaatgtactcacataaaatctgctttaaaagccagaaccagccaggaatatagcccaagaaatttaccactaaatggggacacatatgtgtttcttagaaaaactgtgccttgctgactttctccctgcatttcttggttctctgcatcgaagggcatgtggtaattccctccttttctgaatttacttgcttttacagtttcttctaactgaatcttaagcaccttccccacaccattcattgctctttagttatgtatgtctacacagcatcaagcgacctttagctaacactggctaaatagatcaacacctttacccaactacataacttagacccttttggggttttctactctattttgatctatttaaacctgatactagcagatttccattacctttgtttcttgtgtagacttggtttatatgtgttggtctctaaaaagggacagagaggagacagctgttgagaaatgagaatggcagttttaaccgcacaaattggtctaatagctttgatatgctaaacttgctagctcctccaagtgtacctttccgattttgcataacaccaccctgaatccctaaggaaaccagggttgttgtttttttttaattaaaaagaaaagaaagaaatgcaaaccagtgaaaccgttcttttaaatcatctccacatagatttcattctacgaacttcaggccttcacaaatcctggtacgctggagacctttaaaaagggagaagccgagaatactgattaggttctaaaaatcgaaaacaggtgatgtcataatgcacagtcctgtggccacggccatggccgggtggggagctgggctccagtgagcacagagctccttgccagtaggcgatgcaagttatctctggggcccggaggacacgagtgaggaccgggcaccaatcaggttctcgctctgcgccggcctttgttctcactcgggagcaggttgcgggcgtctagcatcgggaacccgcattcgactcggacgcgcattgctagccccttcgggagacctggctcccctacccgtctgtcccgccacactcggtcagcctgcgctttccccagtcaagtctgccttctctccgcagaacgtggacgctaaaaccctgacttaccattttaagctttagaagaggtaggtttgtcccaatagttttaaacgacaatttgttctctgaaccttcctttctgagcagggcgctgtgctctgcatgtatccgaacagctgcctcaggaaggtcttttgggtgagaaaacaagcccctttggccttttagtgctggacaagtaaatgaacttacatctctaagataactgctagaaggtgcttcacaaacaagaggaaaccgctaaaccagaggttttgtgtctctcccctcaaactcgattacttgcgtaaatatatatataactcagacatttatcccctatccgcctcccaagcctcaagtaactgaaatctttgcaaaacaaggttcacaataaatgatgcgtaaagttctttgagatccctggatacaaagtactacataactgcagtcttctttacagctaaagttagattttggtggagagaaagcctaaccactgccctgaaggaaggaacatttaatcctcccactcccctccccctttctcgagagatcaggaaatatttagctcaatcttagactctctagcgagctctagctcccaactatttatctcattctcctcaccacttctgcagggacctagagaagggggcgtagcttatcttgggggtggggcttggagggcagtatatttgcatatgacacaccctcgtcctcttattggcagaggagagcaaactgttccctgctaccctactacttagctaaccgccacctcccttcagttccgagcctcggagataaacttaacttgcccggagattcaaggcttcctcggcccctgcgattggccggcgcgactcccagtcgggctctcgttgctcattggctgcgggctagcgccctgggggcgtagccggagctgtccgattggcgggaggggcggtaccggagcgtggaggtggtgaaggtggtggggcggcggaggcggggccgcactgaggcgctgcggcggcggtggtggcggtggcagcggtggcggctgctcgtcctagcctggcgggggcgggggtctggaagatgggggcgggtggaacaacgggccggtgaggagcagccgccgccgtctccgccgtcgctggggcagctgccgcggtggtcgcctctggcagtgccgctagctttcaggcagtcgcctctcctcccgacatcccgccttgaggaggctgaggcggaatcgcggctggcggcggggggacggaccggccctgcagtggccgcagtgacagcccggacccggccctccgcccgctctcgcctcggcgcccgcagccacgatgaaccggggcggcggcagcccgtcggccgccgccaactacctgctctgtaccaactgccggaaagtgctgcggaaggtacgggttcggcccggggtcctgccggcgagggtcgcttcctgccggccggggctcgggcggctcgtccccgggcgcgcactgggggaggctgagagggatccccgggcaccgtccctccgcagggactgagaaagggggcgtgggttgagggcaggagggtttggactactgcggctttttatttccgccgggacagacccaagtctggaggggttgggatattttttcttcccttgttccttttatttggtgcctttgctctcctttacggctcatttccctaccttgctaccccgggtcggctccttgggcggagggcgggagggatccgttcgatcctcctccctgtgcagtttagctgttgatggaggtcggtgtgaaatcagagcagctgggtcggatcccgaggaacctggcccctctttgctgtggctaactcttgcgagtgttgtttttgtttattcggttgcttctgccttgcgcgccttgctcaacaacccccgttttcaaattgtttggatggtagtcctgtgtctgtagttcagtctcgaaaggaaccagtaaagcatcttgaactttatgcccatgggaaatgcaattcgacctggccagttcctgaggctggggttgggggaggagaagactgaggtggatgtgggttattcctccttagcacccccctgcccccgtgttgatccagaaaaatgaggcgcaccatcagtttattgctgct

SEQ ID NO: 1686 - DNA, 6000 bp, Homo sapiens
ctgttatccctatccagtgacattttcatttcaggtactgtattttttttttatcattagatgtttcgtttggatctttctaatgtttttcagtttatctcctcattatctttacattttcccttccttgaacatatttatgatagctgtgttaaagtcttggtttgctgtttcattttctcttgttttttcctgttctgtttcaattaaatgatttttctcttgaatatgggtcacatttgcttgcttctttgaatgtctagtaacttttaattggatgctgaaccctatgaaacttatattgtgactgctggattttgttgacttcttcagagagtattgagtttccttttggcatacagttaattacttgtgaattagcttaatccttttcaaggattgtttttaagttttgttcgtatgcacctagaatagctttactctaggactggtttagcctttctactaaggcatgacctttgtgggttctctgctgattgtcatggatgttcagcgaggtttctttattctggttgggaggaactagaatgtcttccagccctttgtgagctctggggattgttctgcttacagctctttggtaattgttttctccatggtaatttttctttgcctgaccttgtggactctcatcctcagcatgttcagcttggtctttctttaaagactccaggggtcctttaagtagatttctggcaccctttctctgtgtaacttcccatctgtacttttgtttcagccttcacaaagttcaaattccgtttcctttgctcagtgagattttcatgttctgcttgggttacccctctatgccacagtctagaaagtgcctttagataaaaagctgtagagattgtagtttcatttttattccaatttgtatgtatttctagtttgatgccatttattttgtcaaggacagaagcagaagtcctcaagatcccttgagttttgctggtagcacttttctgtcttagttccaccttctaggttttgaccactagatagaattagaggtgtggttaattctgcaggctgcacaagagaaggagagccctgaaggctgtgttaggtcaggaggcgtattaagcttgatagttaatgagttcaaggtaaaatggagattgaaactaaaattagcaagagaactgaagtcgtagcatggggagcatcaattttgctgaagtggtaaggtgagtgagtgcataattgtgaaaatgagtataggttgctgcttaaaagtttctgactagtgctattgaaagagtagaaaaagacatttcatttaatttcagcttgcatttatcaaatgcttattctttgccagacactgttctagacatggggaatataaaaatatatttttaaacctttggggaactcatttcctaattggataaatagatacataatattaataatatgattttgtagtagattttgtagaagaagatgttggctttattttctgttgttactgagtttagcataccatccaacatgatgccatggtagtacagggtattaagagggatttcatttgctaacttgttgattaaatgatgcttgaattgagactagatagattagtaagcattaggcaaataaaggtgtgcttggcatttcatgcataaggaattgcgagagcagagacatggaagtatgagataatatgagtgtgagtatgtgtgtatgtatgtaaatataactataagcaatttgatagtactaaattataaaacaagaggagggggtgaatggagatgaaactgtaagaattaatagggccttgtaaaccaagagctttgactttattcagtagggaatgtatcatctaattgggttcagctgcatttattagaaaatctcagaatagccattgattatacaagatagaaattcatttttttctgatatgaaataagtcaggtagacagtctagggctagtatggtcttctgggacctaggcttctattgtcttgcttttccatcatccttacagcattgcctcttagtccagataacaggaaagaagatgctcttttttttcttaacttgacttccagaaagtcccataaaatacttttgtttacatctaattggacacttgatcataaggcttcactttctagcatgggaagtacattacttctccaaataaaatgggattctgttggtaggaaagaagagggataactagcagtctttgtaatgggaagccctagaagagaagtacggtggtcagatgttccctttatattactctaaatgtatttggggtgaggggttggagaaagaaggggagcaggaaagatgagtccaggagattaattaggtctcctggaatcagttgtttaggtgagagataagatctgatctagggctactactttttttttttttttaaggcggagttttgctcttgtcccccaggctggagtgcaatggcacgatcttggctcaccacaacccccgcctcccgggttcaagatactctccttcctcagcctctcaagtaggtgggagtacaggcatgcgccaccacatctggctaatttttgtatttttagtagagatggggtttcaccatcttggccaggctggtctcgaactcctgacctcatgatccacccgcctcggcctcccaaagtgttgggattacaggcgtgagccaccgcgcccagcctggggtgctactttaaggatcaaagaagagaatattagttggtattttggttgcaggtaacagaaactaaatataaattggattttgcaaaaaggatttattattaaagtacaaaattctcataagacatatagatgtaggaatgcagctaggcttcaagaatagctggaattagaattgtgaatggtttttgcaattttcttgccatttttcatttcccctaccctgagttctagtttttaaaaaatttttgctgatttctatttctcatgacagaaatggcctctcccaatgccttcccatttcttagttttagataagcccatttagacctgatttcagattcctgtggaatggctcaggttgatgtgaattgggtcaggtacctacgtttgaactaatcagtagtggccagggatagaggtaggctcgtatggtaatcatgtattcactctatggtatatttaataaatattttaaaaatgaaaatggtaggcttgaatatgtgaggtaacatcatcctgagtttctgacttggtttaagtgggtggttggttgttccagataactcagttcaatactatacaaggagaagtagattttgtagaagaagaggatagctttatcttctgttcttactgagtttagcatgccatccaactgcagtagacaattagtcagtgaaactttggttagacaaatttgaaagatatcagcacaatttattgtagttcaggcgatcagaatggatttaatggcccaaagggaatgtttagacattgaaaaatgtcatgggcaaagaatggaatcccaaataacaagatatttaagggctaagcaaaggaggaagagttcatgaaggaaatggagaagaaacagagtgggaggagagctgagaggtgtcatggaagccaggaaagtgagttatcaacagagttgcattaagcagagaggtctagagagctgaagactgaaacgttttgttgagttcggcacagtggaagccactggtgagtttggagaagtttcagtagattaatggggacagtagatgtattgtagagttttgagaaaatgtatgaaagtgagagtgtgaaggcggtgcatgtagactactctttcaagaagttcatctgagaatggaagccggaagattaattcctgctagaggaggaatatacggggtcaaggaaggtcccccttccctccttaaaaaaaaaaaaaaaagggtgggaaatgcttgaaattgtttctaggccattagggatctttggttaatgccgtgagaggagaagataattgatggagcaaggtcctggaggaacagaaagagttatcaaaatctttagagcaagatctgccttaaataggaggagttaactggaaataaggataggcacagccataaatgttttgggcggtgggtaggaggataaggtggccctagttttcttgatgaggtaaaagaagacatcatttgctgagaatatgggaattggtataaagcttcaggagggtgttgaagaagataatgttatctgcagttttagatcaagggaaatctcaaaatgtgaaacttaggggcaaacagcaaattcgtttacctgggtggtgtttcccctgttctagtgaagcagagatgtgagtaactacttgacgttggtagtcactgaagctctgtgctgaagtgaggtctctacttggcagttcccatttttgtttttttgccttctcttggcttgataataaatggatgagaaaataaaaataatttggttgtgtttggtgggcttaactcaaactagtgggtttatatgttttttctttaaaaaaatttttttttttgagacggagtctctgtggcccaggttggagtgcagtggtgtgatcttagctcactgcaacctctgcctcctgggtacaagcgattctcctgccttagcctcctgagcagctgggattacaggcatgcgccaccacgcttggctaacttttttgtatttttagtagagatggtgtttcaccatgtttgccaggctggtcttgtactcctgacctcaagtaatatgcctgcctcagcctcccaaagtgctgagattacaggtgtgagccaccacacccagctctttaaaatttcattgccattttgtaaaggggaaatacagtgtaagaatttttttctacgatgttgaatttctaccacttaacagcacagaatttttatatcaaagtatgcaaatttgacaatttcacttatatgctaaatgttcttagagctctgaagatgagtgggttgaggctgttccatcccagactcctgacaaggaaaaagcctggaaagtgaaagatgaaaagtcaggaaaagatgacacccaaattatcaaggtaagcaagccacttgattttccttccttgctttcttccttccttccttccttcctccctccctccctccttccctctctatccctccctccctctctgtccctctctccctccctccccctccctccctccctccctccctcccttccttccttccttccttccttccttccttccttccttccttccttccttccttcctttctttctttctctttctctctctctctctctttctctctttcattcattttagagacagggtctcactctgttgcccaggctgggccgcagtggcacaatcagagctctctgcaccctcgacctcccaagctcgagtaatcctcccacctcgacctccctggtagctgggaccacagttgtgtgcccaccacgcctggctaatttttttattttgtgtagagttggggtctccctatgttgcctagactgggtctcaaactcctgagcttgagcaatccttccacctcagcctcccaaagtgctagaattagagacgtgagccactgcacctggcctatcacttggttttaaagaaaaaagtatcaacttttgagaataaatgaatatgaaaatgaaagatgattaaaatttcttcaggagaacaattagactttgaaaacaatatactttaggaataattttggcagtactgctgtttgctgaatgtttagaacccccttccccttctactgtgagaaagtgagtgttcctctctattctcgttccttagaggctttcatgcttttgattgttgataagaagtggcactttccccttatgtccctaaagccttatactgtatctctgtctgacccttctatagtgagtggagttccatcacagttttttttcccttcacctcatgccttaattttcttaacaa

SEQ ID NO: 1687 - DNA, 6000 bp, Homo sapiens
ttttatgatgttttcttctttaagcacatagtatacctctccattcgttctagtctttttggggagcttatgcaagattttaaagttttcttcatataactttgcacattgctctagaccgaatgtttgtttccccaaaattcttatgttgaaatctaatccccaatgtgctggtatatggaggtagggactctgggaggtgattaggtcatgagagcagcaccctcatgaattcctataaaagaagttctagagagatccctctccctttccgccatatgagacacagcaaaaatactgccctctaggaaccaggacacaccttcactagacagcaaatagcccaacaccttgattttatccagcctccagaactgtaagacatacttgtttgttatttataagccatccattctataatattttgttatagcagcctgaactgattaaaacacacacgtttctaatataatcacagtttatttttattgaattgatgcaaaacagtgaaatggatgtttttctgaattccaagagaatctgaaaagacgttgatgctagttatgacaaatatcagtcaatgtagtcagttgattaaatattacaaggtcgattagtaaattacattttaaaataaaatgaatactttctattgcatatcaaacaagtaggcattgtgtgttcaagattcagactcatagaatggtagtgaatgtaaaaactcttggaaagcttcttgcaaacacacattaaattttatgaaacctgaagagaaagagtatttacctcaacctggcttatgttacttatttttagcgtctttaaggtatcgtttataattaattccccagccttcttcttcttgtaaatgtaagcttagtgtcttatgttctcaaagcacttcatcaccttagaatgtcttattcttctgaacttaaaagttttatgtttgggcgatacatgcgtaaaacaaaacaaagaaatctccgcagaaataaataagtaactgtccattgtaatgaaaaatgcttggatggataagtatgagtaaataatatggggtcagaggaaaaaatataatgtaaacttctaacaagttaagcacgggtaaattgtgaagtgcaatgcaaaattcacatgagtgtttcatatattaagtaaaatccaccaaaacaaaacactgaatcttcaaggcaattctgtccttcctgccagctgccactacctttctggcagcctccctttatcccattcctccagcacagggaaatgatgctctggcgacaaagggtacttccgcagaaaacttttgagaggtaccaacttaacttccaagagcttgtaacttactccggtgattttaagacgaaattggtgagaaagctgttaatatagtaaaaagtgcataataaatatatacgggtattaatcctgctcacaatcgcacccaacacctgaaagaattaaaccctccaacacccttcgggtctttaaaatctgggctgcggtaatccgagccctaagcgacctcagatgtgcgcatgccctgttggtggagccgtgctcctccttcctcgggtccggaagtcccggtttgtttgttaaattacgaccgtcgtaaactagaattttcttgcggcttcttagctttacgatggcaacaagtatggcggctgctagtggtagatttgaaagtgcgaagagtatcgaagagcggaaagaacagacccggaatgccagggccgaggtgttgcgccaggtacctctgttttggggcttttgtagttatttattgttgtgggagttgagggttcccgtaagctagcccactcaccccttcccttacctcgtcagtactgaatctcaccttaatttgggtgagttctccctttgcaatgccggtaaacccttttgtagctaccgattttttagatgttctggcaggtgccagttgctaattctcttttcaggcagatctgtcgctttttctccaagtttctttaccttttaagttacccattctttacatttctatcactcggactgcacactttgtaggtcccctgcggcttgtaaggactctgccagcatgtctcgcagcctcagtcattgctactgctgtatctgaaatgagattttcctttttcggaaacacattcaagtcacacttgaatagactcagtttgacatttcctcctcctgtctctattggtatcaattccagacttactgtaagctcttaccaatccaaacaaaagttaacaccaatctcagtatatttagcctgtcacaaaagatcgcgaaacattgtatttctcactaaacttcagatacatagaggtaacatacaaagaatggagaaagtaagcttctgaattatctgacaatctattcaatatgtaagaagtgtggcaatgaaagagaaaagttgcagttggagagcaacagagaattcagtgagggtttttgtttttatttaagttggaagagttttaaacaagtttaaatgcaaatgagaaggagccagcagagaagagggagaggagactctaaagggaaaatgacatagtttcaaaatttggcaaataatttgagggtgaagcagccccattctcctttaatctccaattttctcaccctgttctttggagtccatcataagccctgctcttttctctgatatcgatttttctgtttggtatataaccattgtattcatcttcttgcctacaccaagaattattatatgcacccagggaaaagctagctgcagaatgttggactacctctccatgattttcccttttctggaatattaactcttctagttcttgttgcttcagcagttctctgatataaacctttaataaattatttttatatttgattaaaaaaaaaaagaaaatgactacagccaggttttaaaggggaagagtgggcgattagtcttgggtaggtgaaatgttggtattgtttcgtaatttcaacatatgtaatgtgtgtgtgtgggtatatatatattattcattcttttctctttggtatttccagcagtttttggagggagtaagtttcgtaagttgagataaatcttatagtagagatatgcatagaatttgaaaaggaccaaactgagctttggagttacagggaaagaaagagggcaggaacgatttcctaggaaaaacttgctttgtttgactatcattgaagaatggataaaaattaccaatatgatcctttctttatacagagatgattcttcctgaggcatttttggggctgggtattggggctacaggcattgcatattgaaggcgtggaggtctaactgttgcaaaagtcttaaggcagtagccatgggaatggtgaagggaaaagggattccaagtcatattgagctagggagcttagagagatgggagggcctggactcagtccctggattctctctgattggtaactcaaatcactggagattggaaatgcagaaggagagatttttgctttgttttgtttatttatttatttttttatttttttacactggagaagcaaatccctggcaaggaatagacattcattcatgagtggatatttttgtataaaaatgacagaggtttttgttttcctttttttgtgaaacccagttgggtcaattgccagtttgtcttttttttttctttggttgtaggctaaagccaattttgaaaaagaagaaaggcgtaaagaacttaagcgacttcggggtgaggatacatggatgctacctgatgtgaatgagagaattgaacagttctcacaggtgaatactaacaggtttacgtgatgtaaggatatctgtccttttttgcacgtattcaagttaatattggatgaataattttatagaatgttttcataagttacaaaatgaatatcacatagttggcattgctgaatagtttcatctctttggcagaggtaagatattgtaatattttggacattatgactcaagttttgttatttgagtttggctagtagaagacagcttcaaatttctggcccactatagcaagcttataggcctaaaaatttatgcattttaagctttatgtatttattttattttatttttttaggtctcaagcctgttttcctataatttttttaaaaattatttttaattgacaaataataattgtgtaaatttatgggttagagtgtgatggtttgatctatgtatacattatagaaagattcagtcaagctaatgaacatatccatcacctcatcaacttatttttttgtggtgagaacgttaaaagtctgttcttcaatggctttgaaatagataataccttattattaaatgtggtcatcagtaatagatcactaaaacttatttctagtgtcatgaaaactttgtaccctttgatcaacatcttccctttccctatccttgctccttcccctagcctcttcctataattttaatttgtgctatcttgttatattttttatggcctaatagtcttgtataaatttttggggagaccatagagggatattatatgtatgtgtgtttgtgtgtgtatagatgcatgtatacatgtttgtgtatatatgtgtttatttgattatatttgtcacattaatctacaaataaagccaaaattttcccagtatttttctggtaagaagtctcagttatatgatttattgatagtgcatatattatagaaggtgtgttaagatttcctgaaagattttatttatttagacatattcttggtcttatttcatcagagattgaaagttttttagaatgtggtttattttttttctctcagaatacatccttttaaattaagatgaaattaaattattttcttgcctgttcaaaatgattgtaggaacactctgtgaagaaaaagaagaaaaaagacaagcattcaaaaaaagcaaagaaagaaaagaaaaaaaagagcaagaaacagaaatatgaaaaaaacaatgagtcatctgatagctcatcagtaagtatgtactaaaattaatcaaagcagctatttgagaacattttatttgaatgtgtaacttatgggaagttaaaatacaagaaaacgtaaaaaatatattactagttatgatatgaaaatatctgggatacatctacttagagatgtccagaaaatattggaaatgttgatcttgaatttcagagaaaggctaagaggatagggatatgatttgggaattattgctaagcacagcactggatcttgcccaaggcctgctgtaacaattacctggctacagctggtgttcactcaaggccctggggctctgcaatcagcaggtgatgaagccagccaggcctgcgtctttcccttcagggtggcaagttcccccaggcctgagggtgggtccagaggtgccatcagggacccaggtactggcgtcaaaaaccttagacttgtacctggtgttctattgaactgtggctgagctggcattcaacctatgaatggcagtccttcccactcttcccttttcacaggcagaggggcctcaccctgtagccaccaccatagacccacaggtagtactggcaggctaccactgatgttcccttaaggcccaagaactcttcagtcagctgcccggcctgggactcacccttcagggcagtgggcaccccctgggccagggcagatccagaaatgctatccaagagccaaggcgtggggctggagaccccaagatccctcttggtgttctaccaccctgtggctgagctggtacctaaggcgcaagacagagccccctttacttttctcaagcagaaggaggctctccccatagccaccacagctgggaatgtgctgagtctcacctgaatccagcaagtctcagatacacagtgaaggccacagtgtagtacccgattattggtgctggttattcagggcctaagggctctttagtggttaccagctatggctgagctggtat

SEQ ID NO: 1688 - DNA, 6000 bp, Homo sapiens
caaaaaccacatgatcatctcaatagatgcagaaaaggccttcaataaaattaaacaccccttcatgctaaaaactctttaataaactaggtattgatcgaatgtatctcaaaataataagagctatttatgacaaacccacagcaaatatcatactgaatgggcaaaaactggaggcattccctttgaaaaccggcacaagacagggatgccctctctcaccactcctattcaacattgaatattggaagttctgaccagggtaatcaggcaagagaaagaaataaagggtattctaatagcaagagaggaagtcaaattgtctctgttagcagatgacatgattgtatatttagaaaaccccaccgtctcagcccaaaatctccttaagctgataagcaacttcagcaaagtctcaggatacaaaatcaatgtgcaaaaatcacaagcattcctatacaccaataacagacaaacagagagccaaatcatgagtgaactcccattcacaattgctacaaagagaataaaatacctaggaatacaacttataagagatgtgaaggaactcttcaaggagaactacaaaccactgctcaaggaaataagagaggacacaaacaaatggaaaaacattccatgctcatggataggaagaatcaatactgtaaaaatgaccatactgtccaaagtaatttataggtgcaatgctatccccatcaagttaccattgactttcttcacagaattagaaaaaactactttaaatttcatatggaacaaaaaaagagcctgcatagccaagacaatcctaagcaaaaagaacaaagctggaggcatcacattacctgacttcaaactatactacaaggctacagtaaccaaaacaacatggtgctagtaccaaaacagatatatagaccaatggaacagaacagaggcctcagaaataacaccacacatccacaaccatctgatctttgacaaacctgacaaaatcaagaaatggagaaaggattccctatttaataaatggtgttgggaaaactggctaggcatatgcagaacactgaaactggaccccttccttacaccttatacaaaaattaactcaagatggattaaagacttaaatgtaagacctaaaaccataaaaaccctagaagaaaacctaggcaataccattcaggacataggcttgggcaaacacttcatgactaaaacaccaaaagcaatggcaacaaaagccgaaattggcaaatgggatctaattaaactaaagagcttatgcacagcaaaagaaactatcatcagtgaacaggcaacctacagaatgggagaaaatttttgcaatctgttcatctgacaaagggctaatatccagaatctacaaagaacttcaacaaatttacaagaaaaaaacaaccccatcagaaagtgggctaagggtatgaacagacacttttcaaaagaagacatttatgcagccaataaacatatgaaaaaaagctcatcttcactggtcattagagaaatgccaatcaaaccacaatgagataccatctcatgccaattagaatggcgatcattaaaaagccaggagacaacagatgctggagaggatgtagagaaataggaatgcttttacactgttggtgggagtgtaaactagttcaaccattgtggaagacagtgtggtgattcctcaaggatctagaaccagaaataacatttgtcccagcaatcccattactgggtatatacccaaaggattataaatcattctactataaagacatgcacacgtacgtttatctctgcactgttcacaatagcaaagacttggaaccaacccgaatgcccatcaatgatagactggtttaagaaaatgtgttacatatacaccatggaatactatgcagccataaaaaggatgagtttatgtcctttgcagggacatggatgaagctggaaaccatcattctcagcaaactaacacaagaacagaaaaccaaacaccgcatgtactcataagtgggagttgaacaatgagaacacatggacacagagagggaacatcacacaccagggcctgttggggggtgaggggctgggggagggatagcattaggagaaatacctaatgtagatgacgggttgatgggtgcagcatacctccataccacgtgtatacctatgtaacaaacctgcacattctgtacatgtaccccagaacttaaagtatatatatatatatatatatatatatatatatatatatatatatatatatatatataaagaatgtgggtacatgtctaaaggacacaggaaccagcttgaaagggctctcactggcctaacctggaccaatttgaggatcaaaataaatactgataacgaatttttatcccactgaacaaaaacaggaatccactgagaaattatgaatctgtattatataaaaataaataacttgaaaatttggtacatgatctacatagtttcaaagaaccacttcacaaaatacttattatagaaggaaaagaggtactttacagcagagaagctctgcagatgccagtttatttaaatgatcagaattaacatcacctgtaatggaacaaatggaaatcatgcgctacccaacaggatgcagtaagaccgcctcacttctgtgatcgtcctgcttaagaggccaaatttgaatttaatcacaaaagaacctccgacaaacccaagttgagtgacattctataacacaactatcctgcaatcttcatgaaacttttgtagttaattgtgatcatctgacctatttctggatcataggatttaaatgaaagaaactgaactaggctttaggaaaagccatcatttttctaataaaaaatgaggccagcttagctaacaacgtttaccctttgtcctttctctttattcttgtttatcagatgccgtgaacagatgtgaaagaatatgataccctgcttgtgactacaaatactaaagtcacagactgcaacaaagcgaaaaaggataaactatttggctccttcagcaattgcaccaagcctggaccagttacttttaggctccttgttacgttatcctttatttgattaagccatgtgactggattcgcattaggtgtggccaaatgcaaacctagccaaaataacctgctttttctttcttttcttttcttttcttttttctattttaacatatctagttcccctctctaaccccaacttttttttgggcagttttatttgtattgcatggtatttacaaattaattgagaaatgattttttatgatgttttcttctttaagcacatagtatacctctccattcgttctagtctttttggggagcttatgcaagattttaaagttttcttcatataactttgcacattgctctagaccgaatgtttgtttccccaaaattcttatgttgaaatctaatccccaatgtgctggtatatggaggtagggactctgggaggtgattaggtcatgagagcagcaccctcatgaattcctataaaagaagttctagagagatccctctccctttccgccatatgagacacagcaaaaatactgccctctaggaaccaggacacaccttcactagacagcaaatagcccaacaccttgattttatccagcctccagaactgtaagacatacttgtttgttatttataagccatccattctataatattttgttatagcagcctgaactgattaaaacacacacgtttctaatataatcacagtttatttttattgaattgatgcaaaacagtgaaatggatgtttttctgaattccaagagaatctgaaaagacgttgatgctagttatgacaaatatcagtcaatgtagtcagttgattaaatattacaaggtcgattagtaaattacattttaaaataaaatgaatactttctattgcatatcaaacaagtaggcattgtgtgttcaagattcagactcatagaatggtagtgaatgtaaaaactcttggaaagcttcttgcaaacacacattaaattttatgaaacctgaagagaaagagtatttacctcaacctggcttatgttacttatttttagcgtctttaaggtatcgtttataattaattccccagccttcttcttcttgtaaatgtaagcttagtgtcttatgttctcaaagcacttcatcaccttagaatgtcttattcttctgaacttaaaagttttatgtttgggcgatacatgcgtaaaacaaaacaaagaaatctccgcagaaataaataagtaactgtccattgtaatgaaaaatgcttggatggataagtatgagtaaataatatggggtcagaggaaaaaatataatgtaaacttctaacaagttaagcacgggtaaattgtgaagtgcaatgcaaaattcacatgagtgtttcatatattaagtaaaatccaccaaaacaaaacactgaatcttcaaggcaattctgtccttcctgccagctgccactacctttctggcagcctccctttatcccattcctccagcacagggaaatgatgctctggcgacaaagggtacttccgcagaaaacttttgagaggtaccaacttaacttccaagagcttgtaacttactccggtgattttaagacgaaattggtgagaaagctgttaatatagtaaaaagtgcataataaatatatacgggtattaatcctgctcacaatcgcacccaacacctgaaagaattaaaccctccaacacccttcgggtctttaaaatctgggctgcggtaatccgagccctaagcgacctcagatgtgcgcatgccctgttggtggagccgtgctcctccttcctcgggtccggaagtcccggtttgtttgttaaattacgaccgtcgtaaactagaattttcttgcggcttcttagctttacgatggcaacaagtatggcggctgctagtggtagatttgaaagtgcgaagagtatcgaagagcggaaagaacagacccggaatgccagggccgaggtgttgcgccaggtacctctgttttggggcttttgtagttatttattgttgtgggagttgagggttcccgtaagctagcccactcaccccttcccttacctcgtcagtactgaatctcaccttaatttgggtgagttctccctttgcaatgccggtaaacccttttgtagctaccgattttttagatgttctggcaggtgccagttgctaattctcttttcaggcagatctgtcgctttttctccaagtttctttaccttttaagttacccattctttacatttctatcactcggactgcacactttgtaggtcccctgcggcttgtaaggactctgccagcatgtctcgcagcctcagtcattgctactgctgtatctgaaatgagattttcctttttcggaaacacattcaagtcacacttgaatagactcagtttgacatttcctcctcctgtctctattggtatcaattccagacttactgtaagctcttaccaatccaaacaaaagttaacaccaatctcagtatatttagcctgtcacaaaagatcgcgaaacattgtatttctcactaaacttcagatacatagaggtaacatacaaagaatggagaaagtaagcttctgaattatctgacaatctattcaatatgtaagaagtgtggcaatgaaagagaaaagttgcagttggagagcaacagagaattcagtgagggtttttgtttttatttaagttggaagagttttaaacaagtttaaatgcaaatgagaaggagccagcagagaagagggagaggagactctaaagggaaaatgacatagtttcaaaatttggcaaataatttgagggtgaagcagccccattctcctttaatctccaattttctcaccctgttctttggagtccatcataagccctgctcttttctctgatatcg

SEQ ID NO: 1689 - DNA, 6000 bp, Homo sapiens
aaggtctccacaaggaggaattaaattcctacatcaaatgtattcatctatgtaaagtgcatagaactgtgtctgacatatggtaagcattatatgttttaggtcttattattactacatttactgagtgcttacacgtgcaatacatttttttcctttttctttttctttcttttttttttttttgagacagagtcccgccctctcacccaggctggagtgcagtggtgcaatctcggcccactgctcaactcccgggttcaagcgattctcctgcctcagcctccccagtagctgagattacaggcacccaccaccatgcccagctaatttttgtatttttagtagagacggggttccgtcatgttggccaggctagtctcaaactcctgacctcaggtgatctgcccgccttggcctcccaaagtgctgggattacaggtgtgagccactgtaatacattacattacagatacagacaaggaaactatgactcagcagggttaagtaatgtacccaacgtctcgtagctcataaatggcaggatctgtttggttctaaagcacacattcttaagtattctatgagaaattctgggccactgatgcacaagaattcttggccactggtgtacaaggaaagtcacctgggatgcttagggaaaaggtagatttggggcctcactcctgacctgtagaatcagaatcttcagagggtagagcctagaaatctgcttttaaaataagcaccccaggttattttgatgtaaatgatcagccacatttgacaaactcctttatatatattttactgcatacacagaaaacaaatgagaagaataaaacaaatggctaacagtggatattttaggaggtgggagagaaaagtttatagagaactttcattttgtaaggtattatggtttaacatgatggctacattttcttaaattagcaggtgatttttttttttttttggagacggagtttcgctctttgttgcccaggctggagtacaatggcgtgatctcggctcaccacaacctcccactcccgggttcaagtgattctcttgcctcagcctcccaagtagctgggattacaggcatgtgccaccaagcctggataattctgtatttttagtggagacagggtttctccattttggtcaggctggtctcgaactcccgacctcaggtgatctgcccacctcagcctcccaaagtgctgggattatagatatgagccactgtgcccagccagcaggtgatttttaaaaagattttaaataaatagaagtaaaattatcccattttctactactcacaaacactggtaacattttgaatattttttccagtttatccactattcagagtaggaaataaaactgtagctttctttctttacaaagttggaattgtggcacatatgtggaattttgcatcctatatttttacctattatattctgagcattttcccatgtaattaatcacataagaggctatgaaatataagaaggaatggttgatttttatatatgtcttatataaatataagaagaaacatatgctcatttctacttgccaacataatttcacgaagcccctcttacaacttaaaagctttgacttttaaggtcaaaggtgaggtatgatggctcacagctgtaatcccagcgctttaggaggctgaggtgggaggattgcttgaagccaggaatttgagaccagcctggccaatatggtaaaaccccatttctatacaaaaattagccgggcttggtggctcacatctgtaattccagctattcaggccgctgaggcgttgagaatcgcttgaacctgggaggtgggagttgcagtgagtggagatcatgccacctcactctatcctgggcgatagagcaagactctgtctcaaaaagaagaagaagaaaagaaagtgtgaaaaaaaaaggcacaaatttttttttcagtaatttataccatactgctgagtgaaaacaaatatgttaaagaatatatgtagtataccatcatttgtggggagagaaaaaataatacatacatgaatgcttatacatgcacagaatgtcctaggcattcacaagaaacataactgttgtctatgagaagaaagaatggatgcctgggggactgtggaggaaggcaggcctattttttaaaaattttccccgaatatttaattatgaaaaattttaaacatatagatgagttggttttacacagggaaccctagcatagccaccacctagactctaccattaacattttactatacttgccatatatatatatatatatatatatatatatacatactttttttttttttttgagacagagtttcactcttgttgtccaggctgaagtgcagtggcgcaatcttggctcactgcaacctctgcctcctgggttcaagctattctcctgcctcagccccctgagtaggtgggattataggtgcccgccaccactcccggctaattttttgtatttttagtagagacaaggtttcaccatgttggccaggctggtcttgaacccttgatctcaggtgatccacctgcctcggcctcccaaagtgcagggattacaggcgtgagccaccacgccaggcccgctttatcagtgtttctacccaaccatcagttcatcttattttttgatacatttccaagtaaattataaatatagattcacttactcctaaattcttcagtatgggtagcattaaacttcaaattttgttaactattttctctttgaattaaatgcacattttttaaaaattttattattttttatagcgatagctactttgcacaggctggtctcgaacccctgggctcaagtgatctgcctgccttcgcctcccaaagtgctgggcttacaggattgcaccactgtgcttggctgaaatgcataaatcttaagggtatactggctgagttttgacaagtgcatacacctgaataactgaagtccctaccacaatatagaacattacatcaccccagaaagtcgaaggaagactacttttgattgtattatttttagcaccttctgaattttgtattatgtgcctgcgctatttttaagaaataaatatttaagcattttaaatatttaaacatttttataacagtgggccgattctaaattggatgagaaagagtgaaaacaggagatggcagataacaggtggggtcaatggaatggagaacttattgaagtcagagttgtagcagtggtgtttccagaacaagtgagttaggaaaattggaatgcttcggttgacagtaggacgctgaaatcaagctctcaaaagttgtcttaaggttcagttaagcataagcaaagggtggcttgggtagatggagattaggatactagtttcctttcccttcctacgctctcaagtgcacactgtatttttttgtttgtagtttttttttgttttttttgttttttttttgagacaagagtctcgctctgtcgtccaggctggagtgcaatagcgcgatctcggctcactgcaatctccaccttcagggttcaagcgattctcctgcttcagcctcccgagtagctgggattacaggtgcccgccaccatgcccggctaatttgtgtatttttagtagagacaggggttcaccatgttggccaggctggtcgcggactcctgaccgcaggtgtctcggcctcccaaagtgccgattataggcgtgagccacggggccctatagggattataggcgtgagccactgcgcccggcctctttgcaatatttatcacaactcccactaagtaatatttgacttgtgtagccatccttaacatttggctaccttattaggccataaactccaaacgagcaggggtcttctcttttatttaatcctgtatttcctgtgcctagtatatacaagtgctcaaacaagtattaactacttgattggattctttaagtaggcccatccctcttctcttagtccagagctcttacttatttctacgcattatggccgtatgaaggctgtttgtaaacctgcaaaatacaataccaggtatcctgcaggttccacatgtaaattatattatctcattggccagtggtgtgtggtctgaaggggtaaaacccggaggcttatggtttaggatcttctaggataatgtgccttcagaaaatcgaagattaatattcattctctaaacaatctttttttttttttttcaaacttttttgtaatgacgagggtgttgaactggcctcaagtgatcctcccccttcggcctcccaaagcactgaacaatattttatctaagtgccaagcattcctgaatagaaatattaagagtcatcacgcttgtgcagtcaacacatatttactgggcgcattctatgcacgagttattgaagacagctgttgtaagcatttcaggacaatgcacctcccttaacaccgagtccgggatttggggcggggtgccggaaaacgccaggtcccgccagcagagggcacggtcccggcctcgctgcagcctcgggacccaccgaggcttccaggctcccacgctcgctcccgagcgcgtccccgccctcgcgtcacgtgacgtggccgcggaacctgagctgcggggcctaagccgagctaaattcgttgcaggtggccgcggcgggtgcaaccacaaaggctaatccgaaggagtcggggaggctcgtggagtcgatgcttcctcttccaagtcaggtcggctcccgttaccttctcagcattcgccgttccggtcttcctgagcgcgtgcatgaggtctttcgcgtggggaagctccggtgaccatgtaggggagaagagtgaggaagctcctggtgcttgggacgaggtcagcgctgtcggcgcgctgctccagcgcccaccacaccctggtgcgggccgacgggccctgggccctggtgggagctccggcctccggtcaaggcctggccgggagcgccacgaattctcgcgtcgtctcgcgagagtccaagttaaagaacatggcgacgtctaatctgttaaaggtaagaccctcactccagcttgggttttactgtgtggccgccgggttcggctctttgggaaaggcacggctcaggttcagctgcgaagtgtgggagtgttcaggggttgtccactggcagggaagccgcggtggcagccggcgagtaccggaacgcgggtctgtggccttggggtcgacaggctctggtggtcgctcccgccgactggccgctgggagaaaagcctggctgagcgctggcgaggagcgatgctttcaagggaccagctctggccgggagcgggagatgaatggtcgtgcggtgtcctgaccagctgggccgttagtactgttaggtctcagtttcttgtaaagcaatgtctaagacgcatcaaaggaaaaaccaagaaaatgctgcctaacaggtttcagtgactcgaccccccacttcttccatttctgttctcgttctgtctgcacgaaattccgagtcagaccagcagtgcctcccactccaccccccttcctcccttttctgcgtgttacaccttccctcctaattctcccattcttgagttcatctttttccttaggaaactgctttctaacccccacccagttacaggacacaaccagatgacaactgatgaagcgataccatcgttttagggcgcaggaaagttaccttgtcaaagacagtatttaaagttagttttatatagcaagggagatctaggcccacaggggcagattctccaccagttaaaaagtttggagaagaatgaggaagacttagaactagtctgttctgtgtatgtgtctgtagtagttaatcatttgccttaaaagtacggacagaaatgggggtagtgaatagctcagggaacataatattaatggcaaaaaccgcagtcacttttgcaccagcct

SEQ ID NO: 1690 - DNA, 6000 bp, Homo sapiens
gccacactgatctagcctagattcctaccaaattttctcctaattaccaatacaaaaagcttacccattattcaaaatccagctccaacactttattcaaaatccagctccaacactttctccataaaattttcactgatcatcccaccagaaattatttcctcaatctgtgagggagcatagagcagttggtaacacatctgaaacttttgccttatcataaatcattagtaccttttactctcctttagcatatggtaaattcccaaagagcatggacattgttctacatatctttgcattctccatggtaccttgcatatggatgtcaataaagttattttaataatgaataacttttacaggcactttttattgttgttgttttatagagacagggtcttgctacattgcccaggtcggcctcaggtaatcctctcacctcatcctcccaaagtgctgggattacaggcatgagccaccatgcccggcctctatagacactctgaatcactgctttacatttccattttctttcctcttaaaggataaaaaaaagtccactgagaaaagtagtatgaatcatatttcagtttaaagtttgatttatcttgtggttcggttatatactactgccttcttgtgcctccatctcactagatccaatcagaaggagagagaatgaaagttaagagttagttattagggagatgacgacctctggcatgctagtgagccaacaagtaaccagctaagtaggagtgtgtacgcacacatgtatgagagagagagacaagagacagagagagagaatactagttatcaggagaagacccagctggaaagatctcaaataatttgaatcatcaaaggtatctgaacaggaaagtgatatggtgagaactgcattttgatctagagctcagatcagagctaagagataaaaatagtgaaatcatgggagttaagactgtcccagaaaaaaatatacaaagatagaaaagggctgaagataaaatcctgagaaataattctattggggacaggggagggaagtcagtgaaaaacaaacgtgatttgagagagagaagaccaaggagggaatgtcataaaaaccaaaagagaagcagaggaaatgagcaataataccagaaaagaggataaatattatcagagaagaatctcatttgataatcaggaggttgctaatacttttatgactgacaggttctatacaattgggtgggagagaagagtaagccatatcattaagttaaagggcaaagaattataaaggcagcaaatgggggctgcttttccaagaactgtgacagtgagaaacagaagtttgaggcagaggcagagtacaagtttgtatgaggaggcagagtgcagtggctcacgcctgtaatcccaacactttgggtggccgaggtaggcggatcgcttgaggtcaggagtttgagaccatcctggccaatatggtaaaatcccgtctctactaaaaatacaaaaataagctgggtgtggtggcgtgtgcctgtaatcccagctactcaggaggttgaggcaggagaattgcttgaacctgggaggcggaggttgcagtgagtggagatccacaccactgcactccagcctgggcaacaagagcgaaactccatctccaaaaaaaagaaaagtttatatgacgcgacatatgaactttcttataggcataggagaaaaaagggaaactgaaaaaaaaaaaaaaaaagtaagaggggacataccaccaagtcctggggggaagatgaggactgaaaaagaacaagcagaatgagacaatttgggaggtagcatggaacagagaagaacataggagaaacaagaaaaatgtttggtatcgaccaaggaagttaagggcacttcaaatagctgggtaaagtaatgtactaagaattaagaggggtgaggctcagcaagaaaaggtttaaacaattgctgtttggggtggaacaataaactggaaatgaaaaaaatgagcactaagggcccagatgataattgcaaaagaaaaggaacaatcacaattacatgttcaaagtaatctaaaacagaagataaaattataatatcagatccctacaaatgttctacagactcactctgtaaggaaaaacaacaaagataaagtagttacatggaaaggttttcagagatacaaaacccctaagcagttaactgtatatgtcaaaatgtgctacacaaatctttacatagctgaaagacttctaagatccagcaatagtccacttgctttaaacagacaataaaattattagagtcaaattccaatattaaaaaagaaaagcagctagacatggtggctcacgcctataatcccagcactttgagaggtcgaggagggtggatcatgaggtcaagagatggagaccatcctagccaacatggtgaaaccctgtctctactaaaaatacaaaaattagctgggcgtggtggcgtgcgcctgtagtcccagctactcgggacgctgaggcagaagaatcgcttgaacccgggaggcggaagttgcagtgaaccaagatcgcaccactgaactccagcctggcaacagagcgagactccgtccccctccaaaaaaaaaaaaattaaaaagaaagaaaagctggtggttttttttatgacattggcttctaacttctaagttacacatcaagaaagttcactagagtcactgagtcacttactttttttcaaaatattatcaccttccctttatttgtaaatgttcaagttaaaacactttttaaattcttgtgagcttttaaacctaaaccctaagtaccccgttttctgtatattcaggcagttttcccattcacaggtctgtgctgtggatgtagattcagaatttccacaagtacttaactaatatgaaccaaagtagcttccacaggtaagtacttaactaatatgaaccaaaatagcttccacaggtaagtacttaactaatatagaccaaagtagcttctcctccaaacaatcctttgtgaggttttgtaagtagaacagtgacttactcttttctgagagttatttttcgggagaaaaagaccttgctttatatccaggtaatcaacaagtcaaaattttccagaatcacggacaaaattacttcttaaacacgtttcaattaatagcatactgtttatgtaaacacacagatgcattaataggagtcttcagaaataaaacaaattttctttccttttcttttttcatttagagtctcacagagcagtggcgtgatcatagttaactataacctctaactcagaattatcaatagcacctatattgtaggaacactgtgaagattaaattaatgtatctaaaacaatcctcccaccttggcctctcaaagagctgagattacaggagtgagccactgtgcccagcccacaaattttctttctgaagtaaagcatgagaaatttgctataccattataaaagagaaaagcagagtgggatgggttactcaattccccgaattagttttcttaaagaaagagggggagtagttatagtaatttattgtattatactaattaagtgccaggcactgttttaagcattatagatatattaactaatttaatcttcacaatgttcctatgatacaggcgctactgataatgctgtcctactcataaggaaacttgcccaaagtcatacagcttttaagtggtggctattcagggagtctaattctagggcccctctcccttttaaaaggtgatatacagtactgcctcttagtaaaatttgttcttcattttatgagacagtcccatctattagacaatcaaatatcagtggtctaaagaagacatgatggttaggttcctgtatattttctattattttctagtattcatccacattgcctgaaggcatgagaggcctcaggaagaagtggttcatcctttgtattaggctggtgcaaaagtgactgcggtttttgccattaatattatgttccctgagctattcactacccccatttctgtccgtacttttaaggcaaatgattaactactacagacacatacacagaacagactagttctaagtcttcctcattcttctccaaactttttaactggtggagaatctgcccctgtgggcctagatctcccttgctatataaaactaactttaaatactgtctttgacaaggtaactttcctgcgccctaaaacgatggtatcgcttcatcagttgtcatctggttgtgtcctgtaactgggtgggggttagaaagcagtttcctaaggaaaaagatgaactcaagaatgggagaattaggagggaaggtgtaacacgcagaaaagggaggaaggggggtggagtgggaggcactgctggtctgactcggaatttcgtgcagacagaacgagaacagaaatggaagaagtggggggtcgagtcactgaaacctgttaggcagcattttcttggtttttcctttgatgcgtcttagacattgctttacaagaaactgagacctaacagtactaacggcccagctggtcaggacaccgcacgaccattcatctcccgctcccggccagagctggtcccttgaaagcatcgctcctcgccagcgctcagccaggcttttctcccagcggccagtcggcgggagcgaccaccagagcctgtcgaccccaaggccacagacccgcgttccggtactcgccggctgccaccgcggcttccctgccagtggacaacccctgaacactcccacacttcgcagctgaacctgagccgtgcctttcccaaagagccgaacccggcggccacacagtaaaacccaagctggagtgagggtcttacctttaacagattagacgtcgccatgttctttaacttggactctcgcgagacgacgcgagaattcgtggcgctcccggccaggccttgaccggaggccggagctcccaccagggcccagggcccgtcggcccgcaccagggtgtggtgggcgctggagcagcgcgccgacagcgctgacctcgtcccaagcaccaggagcttcctcactcttctcccctacatggtcaccggagcttccccacgcgaaagacctcatgcacgcgctcaggaagaccggaacggcgaatgctgagaaggtaacgggagccgacctgacttggaagaggaagcatcgactccacgagcctccccgactccttcggattagcctttgtggttgcacccgccgcggccacctgcaacgaatttagctcggcttaggccccgcagctcaggttccgcggccacgtcacgtgacgcgagggcggggacgcgctcgggagcgagcgtgggagcctggaagcctcggtgggtcccgaggctgcagcgaggccgggaccgtgccctctgctggcgggacctggcgttttccggcaccccgccccaaatcccggactcggtgttaagggaggtgcattgtcctgaaatgcttacaacagctgtcttcaataactcgtgcatagaatgcgcccagtaaatatgtgttgactgcacaagcgtgatgactcttaatatttctattcaggaatgcttggcacttagataaaatattgttcagtgctttgggaggccgaagggggaggatcacttgaggccagttcaacaccctcgtcattacaaaaaagtttgaaaaaaaaaaaaaaagattgtttagagaatgaatattaatcttcgattttctgaaggcacattatcctagaagatcctaaaccataagcctccgggttttaccccttcagaccacacaccactggccaatgagataatataatttacatgtggaacctgcaggatacctggtattgtattttgcaggtttacaaacagccttcatacggccataatgcgtagaaataagtaagagctctggactaagagaagagggatgggccta

SEQ ID NO: 1691 - DNA, 6000 bp, Homo sapiens
taaaatgaaaattaaattccgaaagcactgaagttgacttttaatgatttttaattcactgaaaattaggctttccccctccctaaaaagtctggatataaatatacagtacataatattctaaagagagaataaaatgctggctatttctaattacctaatttgtttgagggaagcaccagtagtccacaaagtgaattaatgtgataaacaaactcaaatgcattgttttgtaatttatgtagaattcccgataagtctgtcagagtttgccaatatgtccaatgattaaagatattcagccaaaatgaatcctctatttttgcttttacagtataggaacagttacaggagtataatttatacattaatcaaactaaatgtttctataaatcactgtattaattgctgagttaaaggccatgcctgtatcatgaaaagcaaacaaaggatgttgccagaaagagaactgtgctcagctgatttgactacaccaatgtgtttaattccagcctttagtcaaaacaggtctagatgacagactcattcctctgatcatttaattttgacctattaagacaattaattctatttgatttttcctgttcttatgatttttttttaagactgtgtctcactctgctgcccaggctgaagtgcagtggtgagatcatagctcattgcagccttgaatttctggactcagaggatccttctgcctcagcctcccaagtagctcagactacaggtatgcaccagcaggcctggcaaattaaaaattttttttttttttgtagagttagaggtcttactatgtagcccaggctggtcttgaattcctggcctcaagggatcctcctgcctaggtctcccaaagcattgggattgtaggtgtgtactactgcacctggcctcttatgctatttctgttcttagaacactgtatatggttggggaccttactggatggaaagtgtgtgactctacctctttctatttctctctggttctgttgttcctatacattcttggacttttgctgagattgataatagccaatgttgaatagaatttttaaattttcaattaaaattctaataaaggtttccttaatttgctcaagctgatgcactagaagtagcagatttttaaatatacatgtgtttaaaaaatcaagattatttagaaatttaatgatgatcagatgaccttctgaaatattggcctaccttttggagatactttactttctcctcagattcctgtatctttagggcttcggcaaagatgtctctattttctagagggaataaagtcaaattcaatctgaaataattttattatgattttatactaaaattgatataaaattggacatgggttgaaagggaatacatagagtaggaaggtaaacaaaaatacatgtggtgtattggaactttacaaaccagatttgcaaacaactggagactgagttaattagctatggctgcagggaacctctaatctctttagatgatgagtaagctcgagtccagagacaagaaaaagtctcgaaagagagcatatctgcaggatcagagattccaatttctacattcctgttcaaactgttaaaggaatttaggcattgtcctctggataaacagggtggtccctgagcagggacttaggtgttcaattcagaaagttataccacagtgtaaagtagtacccttgtacttattgtctattttctgatgaacctaggagtcagaatgttgaaaggcataaaacttggtacttactgttactcgcaaggtgaaaagactgcgaggagtggctgttttctaaaaaatacaaaagggaagtaaagaaatcattggaaaagtcaacaacattaaaggcgtttgaattttttatactataacaattgcataacagtttccacatcctaggcctcactaagggctcacaggtccaggaagttcattggtaatgttgactccaccttcatctttctccagggcttttcatgtttgaattaaactatgtaaactatcctttcagccaacacatagcatttcctcagattattctatactgtttaccaaatagatgccataatttaagggaaacttatatgtttttagatgtaacatatataccactgatccttttcgggtggaagggttgctggaagggttcaggaaatatttatacatgcatttgtatgtacttataactatttgtatataccattgcagtttctcctggaaagggctctggtacctgcaggccagttacggtgaggcagatatgactgacaggaggccgctattctactcaccagaccctctgctcctcctgggccgcgccaccggcagacgctgactgctgtctctgcgcagcaccagctgagattcgctagggggatacatcgacgccgagatccagaactgcttagccaagttggcatcttgttccgaggagccagcaaataccagtaatcccggggggcacatttcctgggactcttttcggccgctaggttcttcgctgggtcccgtttccatggcaactgaggacgcttctgcaagcgtcctctcccctccccccgccccgcccctgccccgcccctccgagaaccgccaagttggtaccagcccctgccggctgccctcggtttcctaggtaggtgttgggatccgccacgcgcgtgggggccgtcggaagcccacccctgcggtgatcaggttttaggaccagtccaaatcttggatatgggagagtcaaaacgtcaactttgggttgtgtcctgtcggagtcagtgggggagtagtttagcttcttatatcctcagtgggctgccacatcctctcccctccccccagaaagatagctaaataaactttaaattcctcagccccattgccccaatccccacttccaaaccagattgccagggacagcacctgctaggtggaagttctgagaacgttgcgctggagaattcacgcctgaaagcctagcccttgggagctagaggcctgaactgggcggatacgtgcccatgtgtacagtttctgtgattttaaaattctgaatcctttaaatcttaggaaacaagctggatttaaagtgtaagtgcatttactaatcactcccactaaaagttgcatagactccaacagttgtaaatgattacttaaaagaagggatacatcttaatgagtgaacagagtctcttcatggaaaaaagaagtatgaaaaattttgttaatgtatttcttataaaagtattaacaagtctgtgtgtatgagtagctttcccgggagatttttgtcatggcaggaacaacttaaccacttcattgatagaaaagttaagattactgtggcaggaactgagatggacatcataaagtcaatttagcaaaggaaatggacacatagcaataaccacaatttatgtctttatggcactttattctttcgaaatattactaacaatattactttcaaaatattactaacaatatagtctcaagaagttaataatcacatgttcatataataacatacatcagtcagctaagaaaaaaatcatattcccccttatatctaaaattttggttaagagcctgaaggaatattgaaaaaaaaacaaaacaaaaccccacatacatacacattacatacattgtaaacttagtagctgaaatgttgatttttttcttttggctgagcaattaataggcaatggatgaaatcagcattttccaacacccctcttccccacgcacattgatgatgcacaggcagctcatttggacgaattcccaaatctttttacctggccgtgtggttagtgattggtactattagcaatcagctaactacactgcctagtaactagactcatagaaaaaattgcagtctcaagttggtaccccaacacgttgtgacaggcaggcaattcattggttgagttggagctcaactgagttgctagcttggtgaatactctactagacgatggcaaatagacacagtgaatcacagcatacagtattaaccgttacatggatggaggggcttcacctccagggattttgctttcctggcatgagactgtttcatcttctgtgactcctagagagagctaacagtttaactgtatctggagaaaccgcgggtttcctcgcacttgcagcgggcgctcgcggggcaggctgcgcaggacccacgccgacgccgcgcttctcaggcatcttctctcgaaggctgcgggctgcccgagccggcgtcttcttcccggccgggcggcggtgatgctgtgccttgttttgatggcagtggagttagtgattgtaaccaccacagtacaatcagctaatgacactgcctacaaaccgagcaccgggcacccgcggctgcagctcccggacggtccgcagcgccgacgcggggtcggggcccgcctcggaccccatttcaccgggggacgccctaccatggctgggcgcaagcggcccccgaggacacccccgggcccagcgggacccccgccggcctcgcagcgcacaacacgcgtagctgggccagcgggcggcgctgccggggaggacccgcgccctcccaggccgggagccgcgccccgacccccatgacccccaggagtgccaggcctccccttcccgcagcctcccgctcctctcagggccctcccgctcaggttcccctcgcttttcctttccccttcgcctcctcggcccgggctcccacttccttcacgccaggcttcagttcccagccccaaaccctagagctggctctctcgaccccgtgcgccccgccgctctgagcggccgagtgactgtggcgggggcgaccaaccgtccttggaaccccgcgggccgaggggcggggcgggcgcgagacggggcgggtgggggaggggatggggggggggaggaggctgagagaaagcgctgtgggcggtccctgaagggcctccaagggagacgcctagaagatggaggcccagattcttgagacgtttctctttctgatctagcaggagggacaaagagctcctccactccctcattccccaagaaggcccccagcctacccagtttccgtgaccattccgccctgggaaagcggcttcccaggtacctcaaattataggtttgaattttccaaatggaggtgggcttgggtagcctctgacatatgggaggatggcttggagagtctcatctgcacctctgtgctctgttggggacttggccttatactcttagagggccatgcagtgatgtgaagcctgggccttctagtcaaatagtgagccaggcagcttgttagttacatcaaatcgtggtcctcttgagatcaaggccataccattcaagacagtatatatataataaattactaaactagggactatttagaatagtagaaactatttgtatcagaaatagaagggaggtcctcaatgagagctgtaataggtcaaagaaggttcccagaggaggtgagacttgagtagatccttgatgcacgagtacatttggatattcagggttagggctgtggatgccagaaaaacagtatcttgtgacagttgggcaaaagggacagttacagaggacttctgggagatctctgctaataactttccttcccctcctttgcctttaatgaattaatcaggagaggataaggaatgttctctttatcctcaccttgtgaaattcagctggaagcagcctcccctagaaatatggtcttcatgcatccagtatagagcacccattgctgacaccaaaggcttagttctaaattagtttctgcaaaagaaaacttcccacctatagattgattccctaaaaccagcaaatggtctcatagatgccacaagtaacatgaacaggggcaggtcatctggatcattcaatacaaactacaaactcacactattaaaacaactaaagaactgcccaagga

SEQ ID NO: 1692 - DNA, 6000 bp, Homo sapiens
tgcctcagcctcctgagtatctgggattacaggcatgcaccaccacacctggctaatttttgcatttttagtagagacagggtttcactatgttggccaggctggcctcaaactcctgacctcaggtgatccaccctcctcggcctcccacagtgctgggattacaggcatgagccaccacgcccggccaatgactgatggttttctgatgtgactttgagagctgttaatgtgagcaagagttgatggccgtcgatcccatctgcctgtacttcctatattcttgatgctttgtcttataggaaccgggcaaatctaactcagtcttcctttgatccacactggatgagtgaactgcatgtgggtgtcagaactcagtgcttttgtactgaggctgtcaccttgttacctgagggctgccttaaatcctcaacctaatctcagctgttgcctctggcattccctggttattagtttcttgtggggtgtgtgtgggaagtggagaggagacctgagggaggaatagagacaggatatggaaatacctcagtgccacagtactgtattggtagtgcttggctaaattccagaagtccagcaaaagagggacaatcctttttattttatttatttattttttagagacagggtctggctctattcccaggctggaatgtagtgatgtgatcatagctcactgtagcctcgaacacctgggctcaagtgatcatctcacctcagcctcctaagcagctgggcctacaggtgtgccagcggactctgctattttctttctttttcttttttttttctggtagagacagggtcttgctttgttgctcaggctgtgggaccatcttttgaatctggcaaaacccacagcctatagattcagaattgcttattgataagtcatttgatttcttctggacacgggtggcctccaaagactttcagactctacctgagcagatgcttgtttattgacatggaaattacttttccagatgaacttttaaaatcaatggttttcaagtatcaatgcacactagaatcacccagtggacactgtaaaccatctggccccattcttaaggactctaattcagtaggtctgggttggaggccagaaatctgcatttttaacaggcatcttaagtgattcagacggtcagcctcagaatttggctcaggttttgaactagcctttttttctgctgcagtctgttttaatcaccttcattgaaggatttattagcatctccatgtttattacctgtttcattctcatagcatcacagcaactcaagcaggaacaagaggtggttagctccattttatggggtgttagggggtggaaggtgggattgaggcactgggagaggtaggtcatgatgagtcagagacagagatgggaactgaagtccaaaattgatgactctcaaaccaggcaattttctggggcctattttctcagcttgtgattttatatttaatcatagttattccttgaatcgccagttcattgtacttgggtaagcaaagcatatttgtattttaaacaaagtagtttagcatcaaggtgccagtttttgttagcatattaaggctctcttaagcttgagttaatatcgaaaacagtactgtggaactgacttaatctgcttctctctgtgcatgcttcctttattatttctgaagactttaattttttttttttttgagacagggtctcactctgtcacctaggctggagtgcagtggcagtcacagctcactgcagcctcaacctcccaggctcaagtgatcctcccacctcagcctcctgagtagctgaaactaggcgtgcactacaggcccagctaatttttgtgttttatttgtaggaatggggatctcactatgttgctaggactggtcttgaactcctggacttaagcaatcctcctatctcggcctcccaaagtgctgggattacaggtgtgagccactgcacctgtccaagactctttttttttttttttttttgagacagggtcttgctttctcacccagggtggagcgcagtggtgtgacctcagctcactgcagcctcaacctcatgtgctcaagtgatcctcccacctcagcctcctgagtagctgggactataggtgcacaccaccacgtcctgctaagtttttttttttttttttttagagatggggttttgctatgctgcccatggctggtcttgaacccgtgagctcaagtgatccatcatgtgcaccactgccccaggtgactttttacataaagtataagaaaacagattcctcctctcaatgcctacaggaatcccctctgatcttctaactggtaaagtactaagttaaaaaaacctcttagccctctgtctctccaagttgggtagtattaaatatatgaatccatttttagcctgggcagcatggtgagactctgtctccatacacacacacacacacacacacacacgcacacacacacacgaagctggatgtggtggcacatgcctatagtcctagctactcaggaggctgaggctggaggattgcttgagtccaggagtttaaggttacagtgagctatgattgtgccactgcactccagcctgggaaacgcagcaagaccctgtttgttaaacacacacacacacacacacaacacaataattttttaaaatcctgaaaactctcagttaagtcattattattattattttagagatgggggtcttgctgtgttgtctaggatggtcatgaacccctaggctcaagtgatcctcccacctcagcctcccaagtaactgggaagacaggcacgcgttaccatgtttagctaaattgtttttattatgctgtggttatttaaatttacgaatataaagtaggaaaaatgtgcttttatttctagttcttacacagctaaaaaaaaaccacaacaaatttacaaattaaatacaaatgaaaccacaaaatgaatactattcaattaaaaatattatagtaatttaacgtgacaaatgatgtattttgctaaaactgtcatccgtcgtattgttactatggtgttgcctgctatagctcagcttcttttgtgttcaacatgcctatgccaccaagtgactcctgatatcttaattttctcaccatttttctgttacaactaccaaatagtgcaatctcatgatgcatttggctttcattttgtgcatgaaagtatcattgtcattttaaaaccacctctgttcttttctcattatcccagaacaataaaagcagcactaaaacacacatgtaaatgtgggtgctgaaattgtgtggcaatacttggttgtaaggtggtcacccaaataattcagaatatgcttatacaaatctaaaaaatatgaaaatgaaaataaaattaaaaccctagagaatacattcgcagacataatttgagaaaaactgttcaggtctgctggttcccaaactttcattactatcaaaggctctagctattgtgcttacttccaagaaccccatttatttatttatttatttatttatttatttatttatttattcattatttcattcattcattcaaaggctctattgtgcttacttccaagaacgctatttatttatttatttattttagagacggggtctcactctgccgcccagattggagtacagtggtgcgatcctggctcactgcaacctctgcctcccgggctcaagcgattctcatgtcagcctcccgagtagctgggactacaggctcccgtcaccagcccagctaatttttgtattttttagtggagacagggtttcaccaagttggccaggctggtctcgaactcctggcctcaagtgatccgcccgcctcggcctcagaatcccatgttttaaaaaagtttgtctcctacactgcatttatagttttattaatcaggcacatagaattaccatttcggagcttgtgatcaccatatgtagttatcactccaagctgcttaaattccagtctaaaacaaacaaaacattctaattattctgtgctaccctgacaggggtaagtgaaaactttccattcaggtttgtaagaacgagctcccagacctccacctcttccccttgctgcctctgaggactcttggaggtctagggaggccagtttgggttttcttgctcaagaaagtagccaccccacccaatttggaaggattaaagcttgtcctagttttgcttcattgttgtacttctagcatgctaaagagctaaaaaatgggaggaagaaaatacaacagaaggcaccattccagtaccaaactgaaaagaaacacaaaaacaagagagcagcatgtttttaacagcttgcgtggaaaaaatattgactggggagtttggacagcactgttcattttctctcaccgcccgcgttatttgtcttacggagcaggagccagataccattctggagaaagagccgcgggaagaggtggaggggttctgtggaagtttgagtctgagcggagaaattagggctggagatccagtggctcagggccaggaagaagtcaggggaggtgctaaagcctttttcctcctggcctcgggcactctctttggtccgcctgagtcttaagagggcacagcgcagatcattcaggtaggttcctggctccttcagactacaacgagctggatgaatccctgtccctgtttctttcggctggggaaaggacgcaggggttccattcgctttcttagcccacccgtcttcttgagttcagacctacaactcctgcagtgggggtcagaagggagccttaatcatcgggacagaaacgcggctccccaacttcggctaaaccagcgtggcggccttcgtccctactgcctgggcgcggggcggggcctgggcgcggggcgggaggcggtgaccagcagcaggaggagaaagaacatggcgggcgcatcagagctcgggaccggcccaggagcagcgggtggagatggagatgattcgctatacccgatcgcggttttaatcgacgagctccgcaatgaagacgtgcaggtactggactgaggccggggacccgaggcgagaccggctggtcgcgtggtagagaagggggaaggcctgcgtcgcggtgggggtggccgaggtactgaatgagtcggactcgtagcagaaacttgaaggggaggcggggaatgctccgcgaggggctgtggtgacacgccccgaccctcccgggtacctctctagtaaccttgcttcggaccccctgaggcgtccgcccggagccttgcccttcccgggcggttgtcggggaacccgcttcccgcctgggcgccccatccgggccgtgaggtggccgcgtctcttgggcgagggagcaggagaagcgcggtgccaggccgagacggggctggagcggctgaggggcgcaggatgcccagaagccctttgaagtgcccctggatcccttcatctcggcttggaactggctcggcttgttgggtagaaagcgggggtgggatggccgattaatctggacgagtagtgtatccgctctgtgggaacttttctttgaaaccacaggtgttgtattcaaccgtttcacctgcttcaccactgccaaagtgctctctttttaaaattatcttacttcctaggtgttgtattgtctttccttcatttctcttccggtcccttctgagtgtttctcctgggaaatcctccgccggctagtgaggccgagttacacttctttttggaagtccttatgagcttccttaacagtaaaatctaaatgaaaggttatcttcattcttacccctgtgtcataatttcacctgttagcaccttttgtcttttgatctaaattcagccgtttctttacattgttcttctttctactttcttttctgaagctccgactcaacagtattaagaagttatcaacaattgccctagcac

SEQ ID NO: 1693 - DNA, 6000 bp, Homo sapiens
tttatcacttaatatttttattacaaaaagcccacaaatattaattttacaaaataattttaaattcctcaatccaaggaacctacccagacacagaatatccccagagggaggtgctccctccccaggctccccttgctgctgggacagcagctataaatagatggtaatcataccagcttccattcctgtttgttgctgctgccaagtagcaggttctgacaggaaaggaaataatttgcatttactgagtacggctaaatgccagacttttggctagacactttatccgtatttaattttcacactgccactgtgtgatacatgttacgtaacttgccaaggtcccccagctggtaaacaacagatccaacacgaaccaggcagctcagactcggacatttgatgttcttgtccccaggctgcagcagctgcccctgcacactggtgacacatcatgtgggtgaggcttagtctttatagcgagacagagaagaaaacggacttattctgttggagtcatgaatgtctgactcatgtgtttccctattcacaaattaacctgctccacactgtggtagatatgaagtgaaagcaaaggtgttcctgaaaggaagatgaaggggtggcctgcccctccacacctgtgggtatttctagtcgggtgggacaagagactgagaaaagaaataagacacagagacaaagtgtatagaaacaacagtgggcccaggggaccggcgttcaacataccaaggacctgcaccggcaccggtctctgagttccctcagtttttattgattattatcttcattatttcagtaaaaaggaatgtagtaggagggcagggtgatagtaaggagaaaaacacgtgaacaatagaatctacgtcataattaagttcaagggaaggtactatgactggacgtgcaggtaagccagatttatgtttctctccacccaaacatctcagtggagtaaagaataacaaggcagcattgctgcaaacatgtctggcttcccaccatagggtggtttttctcctatctcagaattgaacaaatgtacaattgggttttataccgagacattcagttcccaggggcaggcaggagacagtggccttcccctatctcaactgcaagaggctttcctcttttactaatccacctcagcacagaccctttacgggtgtcgggcagggtgacggtcagatctttctcatcccatgaggccatatttcagactatcacatggggagaaaccttggacaataccccgctttcaagggcaggggtccctgcggctttccacagtgcattgtgtccctggtttattgagactagagaatggcgatgacttttaccaagtatactgcttgtaaacattttgttaacaaggtatgtcctgcacagccctagatcccttaaaccttgatttcatacaacacatgtttttgtgagctccagattggatcaaagtggttgggtcaaagtggctggggcaaagctacaaattaacatctcagcaaagcaattatttaaagtagaggtctttttcaaaatggagtctcttatgtctttcctttctacatagacacagtaacagtctgatctccctttcttttgcctacagaagagacatctcctgagaaaggaggatcttgagtttatctaactgatggctcaacacctaagacatctggtataccagtgtttatccgtggtgtgagggtttggaggaaggcacacagaatcatctgaagtgctcttttctcttttatgttttattacagaaaacttcaaacatatacaaaagtagaatgaattgtataaagaaatcccatattgcatcatttcacttcaaaaattatccactcatcccaatcttgcttcatttctacctgcacccagcccttccctttcatactattttgaagcaaatgggttgctttttcaaattttaagcgccttatgctgcttttatagcaacatgatggcaaatactgtgcaaacgtggaaacgctgtctgattgtactgtcctctaccagaaatatgcattcgctactttgcttcttgaatacaggtatgtcatgtgtatgtgagccatgataggccaggaggaatcctttcagactttgctcctgacttccttgccttttcctgatgatttatgaacatctgtgaattgggagacatataagccatgataaatgtgaactatgaagaaggtgaggttaatgagggaatacagaacacatgcatttattaatttctttttttaaattcaagtattcattcattgctgcatgcattgactgtgtgtagccatcacattccatgctgcacgctctttcttctcctttctcagcctaactctggctcttccctgacttttccttggaccttgaggaacagtcttcaccttacccagtagtctctctgctcaggaagaagcaagaacttaggcagttgtgttttgtgggtctgtacacacaggttttctggagggaggtcccagaacctcaacctcaaagtagcacttcctttcattctcacttcagatttctcattaccgttgtcaaaagacaaaattacaacgagtttagtttaaagatcttaattcactttatttgtgattctagaatcaggcaacacttcattccataaagtagaatcagtgtcccgatgagctgaacagatgaggttggttttatagaaagaaaaaggctgaagaaaggagacacaaagaacaaaaagcagattggctgtttcaaatttaatttcctggtaaggtgggaactgagaaacagaacaatagaaaaataactgattgattggcatcagtttagttcaggtacttttttgtaagaattaaaacagagggaacttcgttatcatgaagactgaaactggcaggtttgggaatttggtgattatctctcattctcctgatttctcagaaggtcagacagacagcttagttttggtttggcgaagtagagctttagcatgagtgactccattttggtttggtctgttgggcttagtgcaggaactcagtccaaagtgatggcctcctgtaaatgttaacattgtgaaacctttctaattcagtcagagactgggtgctcttcctccaatatttcctctgccatttgcatcttcctcaggggcagattaaacttcacagctcattacttgcacaagccccttctaaggctgacatctaattttgtattcattattttatattcttttctttaaagagtccttcccctccctgcaactgtataagatttaagttccactaaatctagatccatccctcatctacctacaaattagtaattatcatatttttctgtgattatatattcacatgttgtgggtccccagacctagcacaatgtctgctatgtgataattgcttaataaatatgcagtacaaagtttcagaattttcatctatcagtcattctttgtcattgggcatttattattagttgcagttagaattcaaagttgacaggtctaccaaaaagaaattgatttggttttccaaggaagggagtttctcaggatgttttggctgttttcagtgcttcctctctcaatcccagttttgtttcctttgctcatggcatgtgaattggcccttgcttcactgggataagcagattgtctcaaagacacttaacaattgtcagggatcttagagtcagtgcctacttggggtcaaccctcacaatatatctttttaaaaaaccaaaaaccttttaatcaaaacagtacatctggctcttggtatccacggatccaaccaaccacagatcaaaaatattctggaaaaaactaataaaaaataacaatacaacaacaaaaaataatgcaaatcaaaatacaatataacgactctatagcatttagattgatttgtattaggtcttataagtaatcaagagatgatttaaagtgtatggggaggatgtgtgctggttacttgtaaacattacatcattttatgtaagagacttgagcatccacggattttgctactggggcaggggaggtttctggaaccaatccccccataccaagggaggactgtgtatgtttactgcagaaaaatagagaaagcaagggcagagaagagaataaataccataaatccaccacccataggataatttgatgtctgtcctttacatacatacttacatactttttgttttctgaccaatggttatacacttaagtttttaaaaaggaatcatagtatacatagaatattgtgaacatctttctgtatgcaatgcattaaaataatgaaaccatttttaaaagcttttgacacatttatatatttataatatgacagaaagtactaagtatcttgttcacacaggactaatattatgtatatctaagtaatataaatatgtaatgtaggtaatgtaaatgtgtaatgtatcacgtagatgtaatatatgtacatagatgcaattataagcaaccttttatttataatgaggtgacgccacttctttacacaactctagagggcgccattcgtagattctggtgccacagcggcccaataaaagttgaggaaaaaagatcgagatgggctcgttggctctttcagttagataattttacaagtaagccttttgaagtttagaaaggttcagttagacctggttattaaaaacgtttaatttcctccagtgaaaaacgggcgggaagcaacgaactttgaaaacaactaaggaagaaaacgcgtctgcttacagtttgccaactacgggacaccgtggaaatcccatctcgggattggcgcggtgcctgctgggagttgtagtgcgcccctcgccttccgggcggcggtctgaggcccgcgagactccgtttcccggcaggcctcgcgtcaagacggccggcgggacgggagctgcggcgctggctacgagagtgacccagtcagcgttggttcccgtcttggccatggcctcgttcgtgacagaagttttggcacactccgggaggctggaaaaggaggatctggggacccggatcagccgcctgacccggcgggtggaggagatcaaggtgagagcggggcagctgtctgctgactggaaggggactccgggtccttgtgtgaagggactggagagaggagtcaggggctaagggcagacagagtggggaccagcagagtggggcctgttggggagatctagttgtgggggctgaatgaggagtggaggggcccagaatgtgtggattgaggagggatcttggaggggagcccacacaggggttgggaactgaggaggcgaggagacctgggactgtggggacgaacaggcggtggctggagagcactggagagtggagttatgttggggaggggtgtgccgcgggaagagggagactgaagagaccagcagagcgggaggagcaactggaagctccgaggaagctagggagcgagcgcaggagaggaatagaaaagacaggatcccccttccccttcttccatcgatgagtgtttatttcctccacccactccttgatttgttgatgaataaaatagcctggaggattgcacctttctcctccccgacattaaaaaaaaaacaaacccaaaccctcagtatgtttttatttttatgtatctatctatcttttgagatggagtcttgctctgtcgcccaggctggagtgatctcggctcaccgcgacctctgcctcccgggttcaagcgattctcctgcctcagcctcccgagtagctgagattacaggcgcgtgccaccacgcctggctaatttttttttttttttttttgtatttttagtacagacggagtttcaccatgttggccagactggtctcgaactcttgacctcaggtgatccacccgcctcggcctcccaaagtgctgggattacaggtgtaagccaccgtctccggcctcttaatgtggtttta

SEQ ID NO: 1694 - DNA, 6000 bp, Homo sapiens
aatgtacatatccttcagagaattaggaagagaaccagaagaatgtctgttatatatatatttgtctgctaaagattatttattttctccatgtcaaggaatataaccaactaaattttaattctaagcaactctgtggggcttggaatgtgatggatgctgaattcattagtaacaacaaaaggaaaggaatcaagaaatacattcctaaatgctgtatgagaaggtgagtggaggaaaagactctggctgccatatagaatgagaaagaagcacttcacggtgatttcttctaacaattcttgctactcaggtctttggagtgaggaaaacaagtaaaaattaaggaagttgaggagaagctctgaatacttacatagtcacaaggatcacgaccagctcaattaaggaacacaaatgtttttaacccttcttttgtcttctgtttcttctatagagtatggggctctccatcccaaacatctcatttctcagcgtgccaaggagttgggtttgagttctccagttgcagaccccaaacggctttttctttttcattcagaaccatacagaagatattatacatctgatggctgccctatggcctaggatgacttcctcagagttagcgaaagtgaaaatatcccctacctttgtggaattttaaatggtctcatagtcccctggagcctcatctatgatctattctgagacagggagcaggagccctctgagcacagggatcaattaaatggcagatattggaagagtttaggagttagcaaacaggatgcagtaatcacgataccctttaaaggaactgggaatcaaagagctgtggatccctcctgaccaccctatttttctggtttgggtagatatctcatcagtctcttttgttctgtgcagacttcagggatttggcctaccaaatctgtcatttttccagtttctacccatccctatacctcttatggctgtggaagaaattataacataatgaatagaatactcactttggagccagaaggttctgagtgcgaagaacaagtttgtttctcattagctatatgtccttgagcaggtacctggtgctctttgagccttcactttgtgttgtgtaaaatgcagttatgatagtatttcacagggtgattttgagtgtttagataatgcttgtaaactttctgacatactgtgtacccatgagatttatatttcttgaaattggataaacaaagatttctcacctctttaatttcattgttagaatccttccttttgcttttccccccacttgctcttttcctcttttccttcccaattttaagatgagggttttttaaaaacaatggtggttttgttttgtttgttttaacgatgagtaattaaaaccaaaagatggtgagcagaaaaaactaccaaaccaaaactaaaataatgttgccagatttagaaaaagtataagaaatctcagaatccttttcatgaaagtagcctttctatgtggaaatctaagtggcatatagttttccagattctcaaaattccgctggccaacccaacaaaaggaaagtggaactaacatttagagaatgccaacttgtgacatatgccttaaaacttatttcatttaatgattacaacatacatatagactaggtattatcagttcattctacaaatgatgacatggactcggagtagttaaattgctttctcacaattatacaactattaagaactagaggtaggactcaagccccagactgaatctaaagctcatagacttaattatgtgacagaccgaggtagatcctgataaattagaacctggtttcttgttttctctacaattttccgaacctctggatgagcaatatatgttctttacaagccctcatagatttttagacacttgagctgcatcctgcctatcccctttggcatttgtctaggctttgggtttgtcaggagcatatttgcttgtaatcgatgaaaattgttacttttaagcaatggtcactctcatccaagaaatttctgacaaactactaagtgatttgtgatcacagacattattcctgtctgtaattaatgtagtttgacatactatgtaaaacacttagcactggtttcaaataggaactcaatatatagtactatgcatatttttaaattcactctatctatccattcattcatgataagtttctgctgagcccaggttgtctgtgatatcttcaaacacttaatttccaagttatcggtgatcatatgaaaattatacctattaattataattgttatcaccaatatgtaataaatgcttataagatttgtgcacgtctgagcatttgttatttgagcttttgaaatctattctccagtatctatagtggattgcaatcacaagacctaagcgtatatacaaccactgggatttgtatgtatttattcattaaacaaataacttcatgacttttaaaaacttactttcttaaaggtttacaattttaagagcacataaagggctcaagtatgataaaaacggcaggaagttttaggtgaattgctatggaaacatcagaggagagagaacaagcagaactggacacttaaaactccatgatgatagagaacattgaagaaagagaataacagaaatgagacaatgaccgaaacgacttattgaaagcctgttctgaaccaatgctaagcactctatgacaaacagcctttttatttcaggaagggaaatggctctcagaagaactgaagaaaaataagtagcaaactatgatcaacataatcaacacacaccggcataattcagggcacatgtgttacagtggtgggcgctaaaataaattggatattgttctcataatatgcagatttctatttccattataagcaaatgtgcttttcatattctgaagaagatagtttccttaaaagtctactttttaattaatcataatcaaatgtattagggtaagataaggacccaaagagctgttataaaccatggagaaatttgttactttatcctgtaaaattctgtgatgatacagtggcttgctctatgagagtctcaggggctcaggatctttctgtcttgttgcttctccatttttaggggaaatgctccaggctttatgatctagtctttatggttcaagctggttcagttacctgcattcacaccaatgagcaggaagagggtaaagtgaatgggaagccatcctcttttctttgaaagggcatgacatggtgttgcacttatttcttgtaccctatgggccagagcttagttacaaggccacaccagctttaagggaggctaggcaatgtttttattctgaatggtcatagacattgtgaaacttggggttcctgttagtataaaaaagaaggtgagaatcaaccttgaggaatgcctggcaacactaagacagacttttaagtgaagatatctcatctttatcggtttaattgtgtatattgtgctaggttatgggaattttcacatagttgttttttcaacaaccagcaacttctgtgtgtttcctgattcagtgccctctaaccacgctgcatgcctggtctgtggcagacttttagtgctaagctctaagcccagcaggatcagatgatgaactctgcccacgtttccagctcctcccttttgttgctcagatgtttcggccaatggaaagaaggcacagtcacaaggaacaataccagacatgatttctctccagagaaaaggataatttcctctcataattagttcagtacatgtaaaaaacatggttgtagggcctagtactgataaaatagaatttgtgcttatattatgctttactatatatgcatatattacatgcatgtaactgtatatacatgcatgggtgtacatatatacacatatatacatctatgcatgcacatccatgtatataaatgtgtatgtgggtgtatatatataaagtatataaatgtgtgtgtgtgtgtgtgtgtgtgtgtatatatatatatatatatatatatataaaacttttatagccactaagattcattagatctcacaaaaacaatcagtggaggtttgtcattatccccgtttcagatgagagaacaaataacttggggagagttatttgtatataacaaatatctcacaaaaacaagtatataaccagtatataacaagtatatccacaaaaaatacatcacagagaccaaaatcaagctgtgttttccatatgtatcatgtattctttatcctatagattctcgacagcaatatgacactttaagtctcagatttaataggttgttttgaaatagagaagccatggggaccttgatcgcttctaatgtcctttagccaggtaaatgagcatagacattctcagttacttacatcgttaacccaaacatttggtttcaggatcccataagcgacccatgacaggaagacttgggcttccctggctagagcttctctcattagagcagatgtgtgtgccttgcactatctccttatctttccccctgctgtaggggaggggcaacttgggggaaaatgactcacattagagataaggtgtcaatgatataatctccataaagctttgattaacagggcccaggacacagtaagcctttggcaattaagcttttacaaaaatatgcagtttttaatgtcattgttgttgttcctgttgcagcattttcccttgccctctttgcctgttctctgattgttccttagcaaagagcaaagaaaaaaaccaaacgttccaaagtcgaagacttttcctttgatacaaacaagcgaaagttcgattatttgttcaataattttccgttgatcccttagtcttgtagtcgctactttataaccggtccctagaagggggcggttctttccggaaattatgactgcagctgttttcactccgctgtgactcagagcgctccgggctgcaggagaggaaggtaggggaccaagctaccggtgcagggcctggatccaacccctgctctggaagactgagagctccacattctagctccctttccccagtccccaaatttgtaggggctccttgaattgcacgccccatgggtggaggatttcatcctgatgtatgatccccaggaaggttcctgcaagtttggcagtttaggggaatcttttggaggttgaaggagggatttagccatctcctaatctcaaggcccttcttcctactttccttctcttttactttactttttttcccgctttctttctttgatatagacaattgatgttttctcagtttcaggatagtgtaagctgaggaaatgaggctgtaagcctcatctactccaatcagttgcagcccctaagcccttctctatagaaatgtaagagaccgacgcagtctcttctgtaaatacgtggacattggaaatctaggactgaatggaaaggttaaatcaatctctgattttatccaagccccacttcttaccccaaatctcctccttgtctggttccgagttctccacttcacccctgccacaggccgcaggggtgtgtgtggccggtggtgccacccagctcccctcccaccctcctagctgctgagcggctggtgctgggactctgcattcctgaagcagctacctggctaggccggaagccttgtattctcccagctgcctcagattcatggctttcagcttggtggccagtctctacctaagccttgcaagttgcctttctgaagtgccatcctgagagacagaactaattctgacccaaactaattttgtttgtactgggaagagtgggggcaagggtgcagaatagcaagttttcctcaacggaggatttgttctgagcttagaatcaggaagcgaaggctatttccttgtaggggtgccctttgcgtctctctctcttttactctagccaccttggtgagtattgcccagcct

SEQ ID NO: 1695 - DNA, 6000 bp, Homo sapiens
atagccatcgtattaaccaacccagctgatactgagatggtgaatggggcgggggagcagggaggaatatgtcgcgcatgaaaaactccgggtgtaaaagtcaatgcagaactcactccccgaggaaccgaaaaagacattcacgactctcaagtggagagaggatagaaagtcaagtggcgggggtcgcgaccagtgatcgggatttcagtctgatctcagtacccagcggaacaggaccataacctaaagaaatgagctttttccggagcaaagagcggccccgatttcaaagtagaaaaaataaactgcttgggggtggaagatggcgaggggcggggggcggggagggaggcgggtcgcggcgctggctccggggtccgcggcacggcctcctctgccgcgctgcccagggcccggaccctgcccggcgctgcgcccaccgcgagggtgccagacccgccgcgccgccgccgcgctctcccagccgcggccccctcccccgccgcttcctcttgctctcccagccccttcccccacgtgtggatgacgtcaaaattccgcgaaaaagccgcgtggtggctccccgagcggaggcgcgattccgccgcccagcggccccctcccgggggcgcctggagggggagaagggcggaggcggccggttccttctcctcccgggaggcaggaccccccgacgccgaccgccggacgccccccgccccaaagcttattggaaaattcacttttgtaaagcaaatgtatttccagagctattttcggccgcgtgaggcgtgtcctaagctgaatcagacaggaagagggggaagttcgggtcttttaattttttttttttccgaagggaggggagtgagatgctaggtgggtgacagacggcaggcgctcgccttcttaactcacgcctgtcgcatctgccgcctcagtaatccagccccgtccaagccgaaattcgccgaagggagtgcggatgcacaggcctggcggactctgcccccctccagaacgcagcggcccagcgccccggcgggcgcggctgcgaccagagggtcccggaagcgagtgaacacctgcaatcgcactgcccgtccccacccaccctgctcccccgtgctctccgcttcccgacgttttcctcttctccttgtccgcatttttctactttgcctgcactccctccttcctcttgatgtgcctcctatgtgtcccctcggatttatgtgtcccctcgcattttgccagtcgggttttcggttttgattgaccgtccatccctccacggagaaacacaaacacagctccactctttgggggagccgaggggaaggcagtggctcccatttctgagcctgaactcagtcactacccgctccccacctggcctaggcgcccctgcgcggagaaggcgggactcgaactcgcgctgctcccgggccttgagccgaccgcggaatcacctggctgggaggcatcctccaggtaagcttgggagtatgtgtgcttagtgctgcaggctcctgcagaaaagtgcctataaacacccaacaccctgctgcaccctccacctccaggctttgtacactttccaaccgaaactccaaaacgctagcgtagagggtggggagccggccggaaaaagaataaaagtccaataaaactggcgttcgctaaagtttatcaccagtcctacatgggatatatatatatgtatttttttttccgtgaagggtgaaaaggagataaggaagaaccaacaatctaccccctcccgccgccccccacccccgcgccacggtgatcagtttggacttcaaagccagagcacaggctcttgcgctttttcttgaaaccgaagtctacactgaaagaaagtgtgcacttttgcctagaaggcaacatgcgttttcccgcgtgctaggtggagtgcattttaacaagacattagggttttaacacatggctggagtggcgaccaaaagggaaaactcagtttccagtccaagcctcctagagacattcctgccaacctccgcaccctctcacgccccaccccacgtgtgagagtctgcaaaaccaccggggattggattcgatggcgagcttcacgctcgggaacagtcagtaatcggaaggggaagtggacaggggaacttcaagaggcgagcctgccacgcgggaagcgcccgaacttgcgggtctccatgaatgcagagggcgccgggaagggggggcatccggccgcgaccctctctgcccctcccattcgctgcccccctccccgctggaatttctctgtaaagcaagacggagtagggggagggggagagggaaggggcgagagggccctcggctcactcccgagacgtgaggactcgccacccaggcattctcctcggggtgggctgggccccgggacgaccacccgcttcttcctcgcccccgctgcccccacttcgggagacccagagctctggatgcctttccccggagaagggggggtgtgcggagtcggggtggaagagaccttgctcgcagagctatatcaagtgatgtccagaggctgggagccccggcggcctctgtcccttgcctgtcgggttagatttatactttaaaaatacctcccgccctccctccttctctcgcctctccccgctgcaactttctttgatccgctcaaaggtggcttaggtgaaattggagtaattcccttatgggggtcttaaaatgtaagtgaatgtccttatccggggtgactcaaaagcttaagtcgggaagcccaacgtgactaaaaccaataggtgattgttcggggccgactgtgtgcgggtgtacacggtattcggcccgggtgtcatccgcggcgctggactgtttcattttgagtttgcaacttgggtttttcagcgagctttttttcttcctgaaagctaatggcttccacagcaattagacattttcctcgcccgccccttccctcccctttctttacatataggagatgggatactcattcccgctgctattgataaggtcggaggcggccgggcctctccccagctttcgcccgccccagcgcccgctctccctccgccctcccttggcttccttttgatgtagtggggaacgcgtcctactaaaaaaaaaaaaaaaaaaaaaaaaaaaaagtaatctgcccggtaacaatcagcgcgcagtagcaggagccccagagctattggctatgcaaatagagggaggggagacggcgccccaaactcttcctcacccttttaaagcgatatcccctcctttcccccccaccaccccttccgccccaccctcgtttaaagaggctggctccggggcctgagttaatcgcttgcacctctagtttattcgctcccctcctccgccttgcagggaacctagtgtacggctcacccagcccgcgccccaccccgccttgctggctctccgcgcccctgcccgggccccctctctcggtgagggaggcactcagtcggcctcggtgtgcccagagagctcgagccacgccatgcccgctgcacgtgccagcttggccagcacatcagggcgctggtctctccccttcctcctggagtgaaatacaccaaagggcgcggtgggggtggggggtgacgggaggaaggaggtgaagaaacgccaccagatcgtatctcctgtaaagacagccttgactcaagcatgcgttagagcacgtgtcagggccgaccgtgctggcggcgacttcaccgcagtcggctcccagggagaaagcctggcgagtgaggcgcgaaaccggaggggtcggcgaggatgcgggcgaaggaccgagcgtggaggcctcatgcctccggggaaaggaaggggtggtggtgtttgcgcagggggagcgagggggagccggacctaatccctcactcgccccctccccctcccgggccatttcctagaaagctgcatcggtgtggccacgctcagcgcagacacctcgggcggcttgtcagcagatgcaggggcgaggaagcgggtttttcctgcgtggccgctggccgcgggggaaccgctgggagccctgcccccggcctgcggcggccctagacgctgcaccgcgtcgccccacggcgcccgaagagcccccagaaacacgatggtttctgctcgaggatcacattctatccctccagagaagcaccccccttccttcctaatacccacctctccctccctcttcttcctctgcacacactctgcaggggggggcagaagggacgttgttctggtccctttaatcggggctttcgaaacagcttcgaagttatcaggaacacagacttcagggacatgacctttatctctgggtatgcgaggttgctattttctaaaatcaccccctcccttatttttcacttaagggacctatttctaaattgtctgaggtcaccccatcttcagataatctaccctacattcctggatcttaaatacaagggcaggaggattaggatccgttttgaagaagccaaagttggagggtcgtattttggcgtgctacacctacagaatgagtgaaattagagggcagaaataggagtcggtagttttttgtgggttgccctgtccggggcccctggcatgcagggctggatggagggagaggggtggggggtggcgggggaccgcgtttgaagttgggtcgggccagctgctgttctccttaataacgagaggggaaaaggagggagggagggagagattgaaaggaggaggggaggaccgggaggggaggaaaggggaggaggaaccagagcggggagcgcggggagagggaggagagctaactgcccagccagcttgcgtcaccgcttcagagcggagaagagcgagcaggggagagcgagaccagttttaaggggaggaccggtgcgagtgaggcagccccgaggctctgctcgcccaccacccaatcctcgcctcccttctgctccaccttctctctctgccctcacctctcccccgaaaaccccctatttagccaaaggaaggaggtcaggggaacgctctcccctccccttccaaaaaacaaaaacagaaaaacctttttccaggccggggaaagcaggagggagaggggccgccgggctggccatggagctgctgtgccacgaggtggacccggtccgcagggccgtgcgggaccgcaacctgctccgagacgaccgcgtcctgcagaacctgctcaccatcgaggagcgctaccttccgcagtgctcctacttcaagtgcgtgcagaaggacatccaaccctacatgcgcagaatggtggccacctggatgctggaggtaggtcggggggtggcgctcgccaggagccaggacccctccggatgctcgggtccccggccggagccctaaacctgggagagggcaatccccgcgccggcctcccggctcctgtgcgggagtttaccgcgcgccttctggcgagacgcgtggctttatttctgttcctctccagataaactggggaggcagaggggggaggaaaatctgggagaagcgaggctgtcctgggcgggggtaggggagcatcccgcgcgcgtgttcctgcatgtggctgcctcttcttcccacccccctcgcgacctgtcttttgcgaagccgccgcggctgcttgcgctgcggccaggaagagagtcggggcctgaaatcgggaccccgagtagaaaggcaaccccccccaaaaggccagagcaaattcgtcttggcctcaggtccccgcctgtggtcgcgactccgcgctggcacttcaccggggaggtggagggaggagggagaaggagagaaacggggaattcgggagccccggaagtcccattgaagaaacgcgtgtttcaggggaacccaaaagaaccgcttcttgcccctcactccaagtctttgcccagcgagccgtgtgcccacgtatgcacagctctg

SEQ ID NO: 1696 - DNA, 6000 bp, Homo sapiens
aggccaaggcgggcagatacctgaggtcaggagttcaagaccagcctggccaatctggtgaaatcccatctcaactataaatacaaaaatcagctgggcgtggtggcacgtgcctataatcccagctgctcgggaggctgaggaaggagaattgcttgaacccgagaggtggaggttgcagtgagccaagattgtgccattgcactccagcctgggcgacagagcaacactctgtctcaaaaaaaaaaaaaaaaaaaaaaaaaaacagaaaagaaaagaaacattataccttaacttttcgcacctagtgagtgataacctatgaggataatgctgccacatggtccttgagggaagaacttggggaagagccgaacagggatgaggcaggtgagccccatgtgatttatcgtcattcattcagctcaacaggtcggacagggtaagggtaagggatgtaaccaggagatgccacaggaacgtctgagaggtgttagcaagtcccagaggccagcgcccgactccatttcagcctcgttcagggtggcacggagactcctgctgctgcgtcacgtctgtcatgttcagcactcttcccagacacacagtcttgactaaagattgtcaggatcttgacacacgcttcattagtcttgactaaatgcgaatctatacctcatttcaaagaaatctgaattctttaggttccaggaccagtttattgttatacataatcacgatcatttattgagctccacttagcactgcacatatatcagtatcatctcagttgccctttactctgattattttgtggggaaactgagatcagaaaagttaaataacttaggtgccacctgcaagtatagtgggtgggcagcagataccacccttcctcatttcattgttccaggtgatatttcgtctctgcctttggcctttagtctgtggttgttcctaatcttagttttcattgaaagctgtagtttgaaatgtgggatagatgagagataggaaaggaaaatttaggggtatggaaattttgttccttagtggttagttccagctttattttgtttatttatatgtttgtttttaaagatcgggagcttgctgtgttgtccaggctggtatcgaactcctggtttcagcttcccgcctcagcctcccagagtgctgggattacaggcatgagccaatatgcctggccagctgtgttttagatctttgggaaataaagagaatgcttttgggcttggcaaaatagaaacctctgggtggggagaattgcacagtaaaagaaacaaaagggaagtttatattaaactatgaaaagacacagggaggttcaatttaacatatttgccttatgtatgtgcttcttaagagagtgcacaaaggcacctttgcagaggagagaggctagaaaatgcccgttagaagcaagtctacggtttgcaccctcttactagcaccagcaacggtccctgtctagtgatacccatgacttgtcattgcattgcatgtcatctgcctaagagaagctcctgcctggggcagacacactgtcaattacccctacaatatagactgatactaaagcaaggctgcatattcttgcttattcccaaattggatggctcaaggttccagaatgttgtagacattctgcattatatctttatgagagttaaggaaatggtaaagaagcagaaaaagttggggatttttttttttaagtatttacagtgaggcgcggtggctcatgcctgtaatcccagcactttgggaggccgatgcgggcggatcacaaggtcaggagttcgaggccagcctggccaatatggtgaaaccctgtctgtactaaaaatacaaaaattagccaggcgcggtggcgggtgcctgtagtcccagctacttgggaggctgaggcaggagaatcgcttgaacccggaaggtggaggttgcagtgagccgagattgtgccagtgcactccagcctgggggacagagtgagaaaaagtatttacagtttatgtgagggtcagtacgttggttcattggcttccttcttatctagttctcgggctgagtttgctaatgtcatagcacttctagtagccttccccttttctctgccacttcccagcttccccaggcagaaagcatctggtcggccccttgattaccaggcatccataagtgaccatcatttaggccagtgcttctcagaatgccaatcacctgggctccactaaaaggcaggttctgaatagctcggcctgggttgactgagattctgcggttccaacaagctcgcaggtgatgctgatgctgccagcccatggaccccacctggagtagtgaggttccttggcactttaagaacatccctcctttacttcacatttatttctactggaaactagcacagacttatgcaagctaaattacgcatgttttctccgtaggatgctctatgtcctgttcctcttactaacaactctggtctggaccattgttctaggattgtctcaaagcttgccaggagcagattgaggcggtgctcctcaatagcctgcagcagtaccgtcaggaccaacgtgacggatccaagtcggaggatgaactggaccaagccagcacccctacagacgtgcgggatatcgacctgtgaggatgccagttgggccgaaagagagagacgcgtccataatctggtctcttcttctttctggttgtttttgttctttgtgttttagggtgaaacttaaaaaaaaaattctgcccccacctagatcatatttaaagatcttttagaagtgagagaaaaaggtcctacgaaaacggaataataaaaagcatttggtgcctatttgaagtacagcataagggaatcccttgtatatgcgaacagttattgtttgattatgtaaaagtaatagtaaaatgcttacaggaaaacctgcagagtagttagagaatatgtatgcctgcaatatgggaacaaattagaggagacttttttttttcatgttatgagctagcacatacacccccttgtagtataatttcaaggaactgtgtacgccatttatggcatgattagattgcaaagcaatgaactcaagaaggaattgaaataaggagggacatgatggggaaggagtacaaaacaatctctcaacatgattgaaccatttgggatggagaagcacctttgctctcagccacctgttactaagtcaggagtgtagttggatctctacattaatgtcctcttgctgtctacagtagctgctacctaaaaaaagatgttttattttgccagttggacacaggtgattggctcctgggtttcatgttctgtgacatcctgcttcttcttccaaatgcagttcattgcagacaccaccatattgctatctaatggggaaatgtagctatgggccataaccaaaactcacatgaaacggaggcagatggagaccaagggtgggatccagaatggagtcttttctgttattgtatttaaaagggtaatgtggccttggcatttcttcttagaaaaaaactaatttttggtgctgattggcatgtctggttcacagtttagcattgttataaaccattccattcgaaaagcactttgaaaaattgttcccgagcgatagatgggatggtttatgcaagtcatgctgaatactcctcccctcttctcttttgccccctcccttcctgcccccagtctgggttactcttcgcttctggtatctggcgttctttggtacacagttctggtgttcctaccaggactcaagagacaccccttcctgctgacattcccatcacaacattcctcagacaagcctgtaaactaaaatctgttaccattctgatggcacagaaggatcttaattcccatctctatacttctcctttggacatggaaagaaaagttattgctggtgcaaagatagatggctgaacatcagggtgtggcattttgttcccttttccgtttttttttttttattgttgttgttaattttattgcaaagttgtattcagcgtacttgaatttttcttcctctccacttcttagaggcattcagttagcaaagaggttggagcaacaacttttttttttttttttgcacaattgtaattgacaggtaatgaagctatttgttaaaatatttgcctttttaagtaaaaaagaaaaatcagaacagggctatttgaagaattattttatacacagattctgccttgtttcatagtatgagggttgaagacggaaaacaatctaagggtctctcatttttttaattttgttttgttcagtttggtttttttttttttttgcgctgctaagaagctaaagtcatccatccttattcacgttgacagtacctagctgtaatgtttcacagagtgtgctgctattttataaacatttttataatatattattttactgcttaaattccaagtcctgaagtagatggttgagatatgagttcttcgtactggaaaagcccttccgtagtttgttttcttctggtagcatattcatggttgtttttttttttcttttttggttttttggttttttttttttcctctgatcacattcttcaaagacggagtattctttacctcaggtttactggacaaaatcaataactacaaaaggcaatgattcacgcttttgttttcataatacctcacaaccgtacagtttctgcttgggagcccattcgcatgaggaatacagaagcagtgtgagcagggctgactccctctcaggtggaaggcagggcggtctcactcccagggacctttttggtcatggaggccatcgggctcccagttagaccctggtatcctcatcatgatggaaaaaatacattgaaccaagggatcctccctccccttcaaggcagacgttcagtacaaacatttatgcggtaggctcagatgtcgtaatttgcacttaggtaccaggtgtcaggaaacagactaaaaagaattccaccaggctgtttggagatcctcatcttggagctttttcaaaagcggggcttcatctgcaaagggccctttcatcttgaagtttttcccctccgtctttcccctcccctggcatggacaccttgtgtttaggatcatctctgcaggtttcctaggtctgaatctgcgagtagatgaacctgcagcaagcagcgtttatggtgcttccttctccctcctctgtctcaaactgcgcaggcaagcactatgcaagcccaggccctctgctgagcggtactaaacggtcgggttttcaatcacactgaattggcaggataagaaaaataggtcagataagtatgggatgatagttgaagggaggtgaagaggctgcttctctacagaggtgaaattccagatgagtcagtctcttgggaagtgtgtttagaagggttcaggactttgtgagttagcatgaccctaaaattctaggggatttctggtgggacaatgggtggtgaattctgaagttttggagagggaagtggagcagccagcaagtaagctagccagagttttctcaagagccagctttgctcagcacactctcctgggccccaaggagtcccacggaatggggaaagcgggaaccctggagttcttgggaatcttggagcctaaagagaaaccgaggtgcaaattcatttcatggtgactgacccttgagcttaaacagaagcagcaaatgaaagaaccggacaaataaggaagggcacaagcctacccgactctatttacagtctgtaactttccactcttcctgtagtcccgaggcccctgggtccttctagcttttctctttcccatccttggggccttgtgtgatgatgggtgtggggctgccgatgggaaagtcgggggttgttaggcttttctgcctgctcctgcttaaacacaagaaggaatcctggattttgccctctc

SEQ ID NO: 1697 - DNA, 6000 bp, Homo sapiens
ttatgtatgtgcttcttaagagagtgcacaaaggcacctttgcagaggagagaggctagaaaatgcccgttagaagcaagtctacggtttgcaccctcttactagcaccagcaacggtccctgtctagtgatacccatgacttgtcattgcattgcatgtcatctgcctaagagaagctcctgcctggggcagacacactgtcaattacccctacaatatagactgatactaaagcaaggctgcatattcttgcttattcccaaattggatggctcaaggttccagaatgttgtagacattctgcattatatctttatgagagttaaggaaatggtaaagaagcagaaaaagttggggatttttttttttaagtatttacagtgaggcgcggtggctcatgcctgtaatcccagcactttgggaggccgatgcgggcggatcacaaggtcaggagttcgaggccagcctggccaatatggtgaaaccctgtctgtactaaaaatacaaaaattagccaggcgcggtggcgggtgcctgtagtcccagctacttgggaggctgaggcaggagaatcgcttgaacccggaaggtggaggttgcagtgagccgagattgtgccagtgcactccagcctgggggacagagtgagaaaaagtatttacagtttatgtgagggtcagtacgttggttcattggcttccttcttatctagttctcgggctgagtttgctaatgtcatagcacttctagtagccttccccttttctctgccacttcccagcttccccaggcagaaagcatctggtcggccccttgattaccaggcatccataagtgaccatcatttaggccagtgcttctcagaatgccaatcacctgggctccactaaaaggcaggttctgaatagctcggcctgggttgactgagattctgcggttccaacaagctcgcaggtgatgctgatgctgccagcccatggaccccacctggagtagtgaggttccttggcactttaagaacatccctcctttacttcacatttatttctactggaaactagcacagacttatgcaagctaaattacgcatgttttctccgtaggatgctctatgtcctgttcctcttactaacaactctggtctggaccattgttctaggattgtctcaaagcttgccaggagcagattgaggcggtgctcctcaatagcctgcagcagtaccgtcaggaccaacgtgacggatccaagtcggaggatgaactggaccaagccagcacccctacagacgtgcgggatatcgacctgtgaggatgccagttgggccgaaagagagagacgcgtccataatctggtctcttcttctttctggttgtttttgttctttgtgttttagggtgaaacttaaaaaaaaaattctgcccccacctagatcatatttaaagatcttttagaagtgagagaaaaaggtcctacgaaaacggaataataaaaagcatttggtgcctatttgaagtacagcataagggaatcccttgtatatgcgaacagttattgtttgattatgtaaaagtaatagtaaaatgcttacaggaaaacctgcagagtagttagagaatatgtatgcctgcaatatgggaacaaattagaggagacttttttttttcatgttatgagctagcacatacacccccttgtagtataatttcaaggaactgtgtacgccatttatggcatgattagattgcaaagcaatgaactcaagaaggaattgaaataaggagggacatgatggggaaggagtacaaaacaatctctcaacatgattgaaccatttgggatggagaagcacctttgctctcagccacctgttactaagtcaggagtgtagttggatctctacattaatgtcctcttgctgtctacagtagctgctacctaaaaaaagatgttttattttgccagttggacacaggtgattggctcctgggtttcatgttctgtgacatcctgcttcttcttccaaatgcagttcattgcagacaccaccatattgctatctaatggggaaatgtagctatgggccataaccaaaactcacatgaaacggaggcagatggagaccaagggtgggatccagaatggagtcttttctgttattgtatttaaaagggtaatgtggccttggcatttcttcttagaaaaaaactaatttttggtgctgattggcatgtctggttcacagtttagcattgttataaaccattccattcgaaaagcactttgaaaaattgttcccgagcgatagatgggatggtttatgcaagtcatgctgaatactcctcccctcttctcttttgccccctcccttcctgcccccagtctgggttactcttcgcttctggtatctggcgttctttggtacacagttctggtgttcctaccaggactcaagagacaccccttcctgctgacattcccatcacaacattcctcagacaagcctgtaaactaaaatctgttaccattctgatggcacagaaggatcttaattcccatctctatacttctcctttggacatggaaagaaaagttattgctggtgcaaagatagatggctgaacatcagggtgtggcattttgttcccttttccgtttttttttttttattgttgttgttaattttattgcaaagttgtattcagcgtacttgaatttttcttcctctccacttcttagaggcattcagttagcaaagaggttggagcaacaacttttttttttttttttgcacaattgtaattgacaggtaatgaagctatttgttaaaatatttgcctttttaagtaaaaaagaaaaatcagaacagggctatttgaagaattattttatacacagattctgccttgtttcatagtatgagggttgaagacggaaaacaatctaagggtctctcatttttttaattttgttttgttcagtttggtttttttttttttttgcgctgctaagaagctaaagtcatccatccttattcacgttgacagtacctagctgtaatgtttcacagagtgtgctgctattttataaacatttttataatatattattttactgcttaaattccaagtcctgaagtagatggttgagatatgagttcttcgtactggaaaagcccttccgtagtttgttttcttctggtagcatattcatggttgtttttttttttcttttttggttttttggttttttttttttcctctgatcacattcttcaaagacggagtattctttacctcaggtttactggacaaaatcaataactacaaaaggcaatgattcacgcttttgttttcataatacctcacaaccgtacagtttctgcttgggagcccattcgcatgaggaatacagaagcagtgtgagcagggctgactccctctcaggtggaaggcagggcggtctcactcccagggacctttttggtcatggaggccatcgggctcccagttagaccctggtatcctcatcatgatggaaaaaatacattgaaccaagggatcctccctccccttcaaggcagacgttcagtacaaacatttatgcggtaggctcagatgtcgtaatttgcacttaggtaccaggtgtcaggaaacagactaaaaagaattccaccaggctgtttggagatcctcatcttggagctttttcaaaagcggggcttcatctgcaaagggccctttcatcttgaagtttttcccctccgtctttcccctcccctggcatggacaccttgtgtttaggatcatctctgcaggtttcctaggtctgaatctgcgagtagatgaacctgcagcaagcagcgtttatggtgcttccttctccctcctctgtctcaaactgcgcaggcaagcactatgcaagcccaggccctctgctgagcggtactaaacggtcgggttttcaatcacactgaattggcaggataagaaaaataggtcagataagtatgggatgatagttgaagggaggtgaagaggctgcttctctacagaggtgaaattccagatgagtcagtctcttgggaagtgtgtttagaagggttcaggactttgtgagttagcatgaccctaaaattctaggggatttctggtgggacaatgggtggtgaattctgaagttttggagagggaagtggagcagccagcaagtaagctagccagagttttctcaagagccagctttgctcagcacactctcctgggccccaaggagtcccacggaatggggaaagcgggaaccctggagttcttgggaatcttggagcctaaagagaaaccgaggtgcaaattcatttcatggtgactgacccttgagcttaaacagaagcagcaaatgaaagaaccggacaaataaggaagggcacaagcctacccgactctatttacagtctgtaactttccactcttcctgtagtcccgaggcccctgggtccttctagcttttctctttcccatccttggggccttgtgtgatgatgggtgtggggctgccgatgggaaagtcgggggttgttaggcttttctgcctgctcctgcttaaacacaagaaggaatcctggattttgccctctccttagctcttagtctctttggtaggagttttgttccagaggagctctcccccttggatttgaacttgctctttttgttgttgttgttctttctcttctttttcttacctcccactaaaggggttccaaattatcctggtctttttctaccttgttgtgtttctatctcgtctttacttccatctgtttgtttttttctccatcagtgggggccgagttgttcccccagcctgccaaattttgatccttcccctcttttggccaaatcctagggggaagaaatcctagtatgccaaaaatatatgctaagcataattaaactccatgcgggtccataacagccaagaagcctgcaggagaaagccaagggcagttccctccgcagaacaccccatgcgtgctgagaggcgagctccttgaagaaggggctgttcttccaggaggccttattttgaactgcctcaggaccccactggagagcacagcatgccttactactgggtcatccttggtctatgtgctctgtactggaggctctgttctgcctcttatcagccaggtcaggggcacacatggcttaagtgacaaagccagaggagaagacaaccctgacagcatcacgctgcatcccattgctagcaggattggcaactcttcagacggagctgcgcttccctgcagtctagcacctctagggcctctccagactgtgccctgggagctctgggactgaaaggttaagaacataaggcaggatcagatgactctctccaagagggcaggggaattttctctccatgggccacaggggacagggctgggagaagaaatagacttgcaccttatgtcatgtaaataattgattttctagttcaagaagataatattggtagtgtgggaattggaggtaggaaggggaggaagtctgagtaagccagttggcttctaagccaaaaggattcctctttgtttatctctgagacagtccaaccttgagaatagctttaaaagggaaattaatgctgagatgataaagtccccttaagccaacaaaccctctgtagctatagaatgagtgcaggtttctattggtgtggactcagagcaatttacaagagctgttcatgcagccatccatttgtgcaaaatagggtaagaagattcaagaggatatttattacttcctcataccacatggcttttgatgattctggattctaaacaacccagaatggtcatttcaggcacaacgatactacattcgtgtgtgtctgcttttaaacttggctgggctatcagaccctattctcggctcaggttttgagaagccatcagcaaatgtgtacgtgcatgctgtagctgcagcct

SEQ ID NO: 1698 - DNA, 6000 bp, Homo sapiens
cagcgctaggagataggaagtcatgctgagagacacagccacatggggctcagattgaagggatagatcaagaagcactttaacgcaagaagatgactgctagtgtggagaggagaatctttctcccagaaaactctgcaaatacttggtgaccaaccagaccacaaagctgcgtgttcaggggctccttccctccccattgtaggggtctctgggagtggggcagggtctccagtctgaactcaagccaggattcagacacatatagacaatgcagataggccggccccagcagaagtgtatttgtctgaggggttgaggggcctccagaaaaataatccacatggaaggaaatgggaatcccacctgatcagcttaacccataacaagactgagtcctttgcagggcaaggagtctgaaaagaacttcaaatcagcagattgccagggcatgagtagtactggccaggtatttccttaataggtataacatgaagacggggactaaggtattcttcctggctttgaaacagaacataaagcagttctggctccttgagggcttcaggtgctgagctatagtgagaaagggaacacccccgggctgcccagcaggaggtggaaaggctggagaacagggagatccacgcaggtgcctggcaatgtgcccaggcagaagcagtcacatgctcgtgaacatatgtgagacatgctctgaaactgcagaaatatcttgggggtggtttgtagtggggtgaagttccacatgagttggaagaagcaagaactagggaaatgtggattataactgttaatggctcccactgtgtaagtgggtgaggcctgggaaaagttgagttctactaggaaagtacaaagtttaggtttccccagggaatagctagcaagataatggctgccttgtctttgcggaagtccaacctggacactgttgatcagttgaaactgtttctcttgaattctccctcatgtagcaagtttatgagctgcaaatgtccctctttgctcaggcctagggcaggaatccttcctcgatcctcatctctacacatgtccatctcatgccgattaaatcctgtgagcaatctctaccactaaaaaaaccagggataggtgcagagctgcctgtctgagcaagatggggaggagatacagggaggcttcaaggccgctgtgccaagctcacacaaagacagactttgagacaaaagagacaaagacactaagcacaaacagctattttgttttccaccttatcattttccacattttccaaattatctatagaaaaaggcaaatgctagtttttcaaaaccaaatgtaaaaagtacaagtaagcacagcttttcacaatctacgtggatgaggctcatctgagttttatgtgctttcccttttggtcacccatcaggcatttgatcctgattatgtaacacacagcagtcacagagagcaaccacctgatgtgacggagggagttctgccatgcagatgatgcggaaggttggtgtggctaagcattgccaaatctgacaaatctgtattttgtggtatcccccttggggacaaggaccctgttgtgggaggagatagacattaacgtattttcccactcacctccactggatcttggctcatccagcgagagtgattgacaatccccaaaggctgttggccaactatttgcaagaggggtccatggagagaggcctcttccacctgttactcttttctctatcacttcacatccataggggtccctaagccccaagagaagggtcaagtgcaaatctggtaagccaagaagacctagcagttgtcaacctaattagccttcaggaaaaatatatggctatatgagcacagtaaagttgctatagagacaggcaggggaggtacattcagaacagggcctcatcgcatcacccgataaaaataagacccaggctttttaatagcatgaattacttaagttttaaatttaacaggggacgacaccaaggctctcactggttttcagaacatttgaggaatctgggctgcctgcttctgcatatgttagcagccatcacaacatatgctgtggcggatggcaatgaagaactggaagcccacgtgtctctcccacaccgtgagatgagagatggtctttctcactttgggtttgtcctctttaattgggtgagagattttcaatgtgtttcagggaaatttctgggaaatagctatactgcgctctgcactggccagttgtatgtattattgctagtcactgtaacaaccttaggaagtaatgatatcattttgcagatgacaaaataagctcagagaggtccagaactttcctaaggtcacacagctactaaatggtggagttgagattcaaatccaggtgtccccattccaaagcccattgctttatgagacatcaaccagaacctctgcacagagaggaatccaggaagagatgaatctaaggagcgttaccatttttattggtatatgacatggaccttgttatagtttaatctctctcctaaggcagtcccaaagtggatgggttccaagaaattccacagagattctgagctctgctggtgagcacctctccgattatccaaggcaagtgttaacttcagactgacttctccttaccatccaacatgtttctggactgtctcttccctaagtgaggaccaccagcataattaacacaagattccaaacaacatcactgagaaagtgtccccactgctcttgcatccatgaaagcttaactatatgaaacccagctggaaatccaaagtgaagttctttttgttgacaactttgtcttcggattattcatgaaccttttactttgcagaaggatttttaaaaacagttttccaacaaaggcctacatagtagactcaatctgagcctataaggcatcatctttcctcatgggaaatggcagtgctggtgatgatgagattgggtatgggacaacggcagtggaagggagaggaagccaatggggaagtcagggggccgtggtgacagtaggaacaagtggtgcctatgtccctccccattcagtttaccagctgagggtaaagacagacatctgggcttcacaggatttcagaaggcatgtctagggcaacactaaacacatggcttgacagaaatttgaaccaaagcatcgaacccagtgaacgaggcagaagggcagagagaaggcaggtagaagccacagaccagaggctgggacccagggcacagcagaaggtttagaatcagagggaaggcggtggtgcctcagtagagtccttgggccatggaactcaccccaggagcttttccaggctgcctgcagcctgcaatgtgggtgtagagtgtggctaagggagctgcctgctgggaccagctctactgctcaggacactcaaatccatctgtatgccactgtcatcaccccacacatactctctccaatcccggcaaaatcagtgctaatgtctcaccaacagattaaggcctggattgaagtacaagaaacaggatttttaactcaagttaattcaattccccagcgacccttgttaacttattcaccctcagagacgtattaatagttctgtcttatattgtatagaaatttgtgcagtgagttttctggtagctttacattttttttctcacttcagttagacatgtaatctatttaaaagtaatatgggaataagataaatcagtgtaggaataacttcctggcagaaatatttttactagtttctgagtgtaatatcagcccagcaaaagttatctgcaaatatagaagttctcatgtacatcaaagacactcaagttttttttaagaaataaatcattttatgctactgaaataactctgtgatgtgctattggcatttaaggagctaaacagactctatgggccagccaacttctactgcaagcattagacatgcacaggctttagactcaggcacaccttagaagttctggctttgctacttattagctatggtaactcgggcaggtcatttatcctctctaagcctcaacttcctcatctgtgaaatgggaataatatcagtcacatgccagggataaatccagggagaatggccagggggctgtgtcaaaggccagacacaacttccaccccaggtgaatgtcgggaccaggacagtgagcaggcaaaccttgcccttgccctccttccctccacaatcttaaagctccttgaacaacccccatccccaccccctgagaatgtctgtgccctcctgctgaaagggtttggcctttcagtgttcccctccaccatgagctgtttccatgaaaagatctcaagggtgacttgaggctacggtcatcactaccacaagccttttcccatccctgcctctacctattgccctctaaataaggaagccagcgctgccaggcaaagaacttctgcccaatatgggtcctgggtggcctctcgcctctctctttccctgggcccccagccagctcccccctcccccagagatgctccctgctcacttcattcctgcctcatagttggaatgacagtggctcccagaacccctggggagtgtggagggtgatgggggtctggggaggcagccaggcccaagagcaggttaatgttacagccctggataagtgagctgggcgggttgacgtcagggcgatgatgggtggaggggagggccgggctgctgaagcaactataaagataggtcaaatcaaatatcatcaactagggacggagcaagcgggcgagctagagagcgtccccgagccatggtctctaccggccgcggctcagcctgggtccctctgctctcaacccgagtgcccgatggaggctttggtttcatgtcagcagccttcatctgccttccaaaaataagcccctgccgccatgccggagggagaaaaacaagaagggcggtatttttagggccattaattctgaccacgtgcctgagaggcaaggtggatggccctgggacagaaactgttcatcactatgtcccggggagcaggacgtctgcagggcacgctgtgggctctcgtcttcctaggcatcctagtgggcatggtggtgccctcgcctgcaggcacccgtgccaacaacacgctgctggactcgaggggctggggcaccctgctgtccaggtctcgcgccgggctagctggagagattgccggggtgaactgggaaagtggctatttggtggggatcaagcggcagcggaggctctactgcaacgtgggcatcggctttcacctccaggtgctccccgacggccggatcagcgggacccacgaggagaacccctacagtgagtgccagctgcagccagtcgggacgcttgggggtttgggctcatgcagggctaaaaggtgaaggggccctgctctagcggacaggatgcacgataaagggggcagaaatgctgctcaccacttagatgattccacgtgaccctgcctgggtgcaagctcaatatactgcggtccaagcatcctggtgttctttgccatcgccttggttagatcctcagtggcactaactatttcagcattactggcccatctgatgccttgtaagaccattaggaaccattagtctgggaagcccccaaggcctgggtagggagaatcagttagtatacttggatcaaatttgacacaagctcatttttattcagcttctttcttggagaaggaagggaaattcaattgcaaaatgtccaactgaagcacatccttctttttatttcagcggctccctctgtccccaggttcttatcctgcaagctgcctgcaagctgccagcttgctgtatggttagtctcctatccaagaaaggatgggggctgcaggatccaagaaagccatcagctatggtgtggctgctgtgttttcaagattaagtgggttgagatttgt

SEQ ID NO: 1699 - DNA, 6000 bp, Homo sapiens
atcaaagcaatgcaattgttttaaaaaggactcttggctgggtgcagtggctcacacctgtaatctcagcactttgggaggctgaggtgggcagatcgcttgagctcgggagtttgagaccagcctgggcaacatggcaaaacctcgttgctacaaataacacaaaattagcagtgcatgttggcacatgcctgtagtcccagctactcgggcggctgagcccgagaggttgcagtgagctcggatggagccactgcactccagcctgggcaacaaaatgagaccttgtctccaaaaaacaaaagactctttaaaaaaaaaaaaagtggctgggcgcggtggctcacgcctgtaatcccagcactttgggaggtcgaggcgggtggatcatcaggtcaggagttggagaccagcctgaccaacatggtgaaaccctgtctcaactaaaaatacaaaaattagccgggcgtggtggcattgcctgtaatcccagctacttaggaggctgaggtaggagaatcacttgaactcgggaggcggaggctgcagtgagctgagattgcgccactgcactccagcctgggtgacagaaggagactcagtctcaacaacaacaacaacaaaaaagtgacaggaacaagatcatgtcctttgcagggactcagcaaactaatgcaagaacagaaaaccaaacactgcatgttcttacttacaagtgggagctgaacaatgagatcacatggacacagggaggggaacaacacaatggagcctgttagagggtggaatggggggagggggagcataagaaaaaaatagctaatacatgctgggcttaatacccaggtgatgggttgataggtgcagcaaaccaacacagcacgtttacctatgtaacaaacttgcacatcctgtacgtgtactccagaacttaaaaaaaaaaaggtgaccatttaaaaaaatgatgcatcattataataagtgaagagtagtttgtcatagtatgcagcatgttcaattggtgacacatatatccacatgatatggacagaatagtatacctgtggacactgttggtttgccatccattaggcaacctccacactctgccttcttccttgcttaccaaatggttgatatgctcaagtttagggaggctcctaggtaataagcttgatcagttaaaccagtctgggtaattctatttctcttacctgtacagtcctgtgccctgtaacattttggtaaacaatagaccacatatgcgacagtggtgtcataaaaatataatacagctgaaaaattcccatcgtctagtgacttcttggtgaccttgaccctgtgtaggcctaggctaatgtgtgtaggtgttttagtttttaacaaaaaagtctggccgagcatggtgcctcatgcctacaatcccagcactttggtacatgtctgtggtcccagctacttgggaggctgaggtgggaggactgcttgagcctggtagattgaggctgcagtgagctgtgatcaggccactgcattccagcctgcaatcccagcactttgggaggctgaggcgggaagactgcttgagcccagaagttcgagaccagcctgggcaacatagggagacactgtttctacagaaaatttaaaaattagccaggtatggtggtgcatgtctgtgatcccagctgcttgggaggctgaggtgagaggattgcttgagtctgggaagttgaggctgcagtgagccgtgatcatgccactggactccagcctgggcaagagagtctttaccttgtctttcaaaataaaataaagaataaaaagtacaaaaagaaaattcctttttccacttctggacattagaggaagaagctgccatctagactggtgcagtggctcacgcctataatcctaacactttgggaggccaaggtgggtggatcatgtgaggtcaggagttcaagaccagcctggccaacatggtgaaatcccgtctctactaaaaatacaaaaattagccaggtggtagtggcgtgcacctgtaatcctagctacttgggaggctgaagcaggagaatcgcttgagcctggggaggcagaggttgtggtgagccgatatcgcatcactgcactccagtctgggcaacagagtgagaccctgtctcaaaaaaaaaaaaaaaagaaaaacaaaaagaagttgcaatctagcaaccatgaaagaaaagccaagaggagacaagctaggaccatattgtcgagctgctgcattaaccaacccttcttcttgtaggtgataacaaaggaattggttattatctctatatttacagatgacgaaaccaaggcactgagacaattaagtaacttgtctaaggtcagagtggtagaaccaggattcaaatccaggcagcctggctccagtctttaatctctatacctctccaaagcaagctaactgctacaagaccgctcccaacaagtacaaggacattatgaagtctttctggtaatgcaaaaggtgcttttgatcatttacaggtttcagtaggtgactgcactgtacatatattgctcagtgttgcagtggtacatatatattatgggtttttgtccccataattgcacatccaaaaagactccaaaaaggtattaccaaaaacaggtcgagttaagtccgagacattctgaaaaagcgatccactcctataactcttaaatccaccaggacttaattttgacacacagtaaggggtaaagatggaaaataacttttccccaaagagtaatcacatacaccaagactgtttttgactaatccagaaaaggaagttaatgaatgtactctttgggtcatgcatcccatgcaattttaggataaaacagcaaaataggaaaaacatgtttcttgctcttatgatgcttcctggtgtagtggaacagaaatgacaatgtagcaattccatgtgagatggtcctttgaaagagctaggtacagtgacagctatggactcttacctctaagctgtggtggaagatgtttgatggacagtacctcttgcacaacatactgattcacccctccacttttcaacaactcctctggggataatggcagatggaactcatacatttggggagccattctactcctacaggctcacagggctagaaaccaaacagtgaaaaagtcagggtctatattcaagacctgtcttcgtatctggttctattactttcccatccccaacatatataatggcttttagttttatagcaagctagtaacatcatctggttttgttagttccccacccccaacatatataatggtttttagttttatagcaagctagtaacattatcttacgggatctgagattgaccctggactagaaactaattctagtagtgactttggcacttggtcttgacacttaaacctctgggctttatctgtaaaaacagggttactaaactctgattacttcacaaagttgctctgatgatcaaacaaatcaagcagtacgaaggtgtttaaagaactataaagtggcatattaatgtgcaaagtactattatttccatttttatgtgcaaagctccttaagtatagagagaatggtctgatctcgtctgaggccaaaacagtgccccagcatgggctagtgggcttcctgcaccagaatggtaagagcattaacaatgatgatttatttatcctgtgccaagtctgttaggctgtttgcatgtatcatatctgatctaagtatcctaacctcaatcccatgaggtgcataataatacaaatgagtttacagagcggaaattgaagtaagaaagttaagcgatttgcttaacatcttccgttgcggatctgttaagcgatttgcttaacatcttccgttgcggatctgttaagcgatttgcttaacaacttccgttgcggatctgtcagacttacagtttctcacacatcgcgccccagggatatacttactaggcctattgtattttgcccaagactgggtcacactgccatgtactcgactttcctactcttttacgacctgcaacaccacatcttacctggggatctcacccgcggctctgattccggcagtcaggctgaaatgaaaaggaaaaaacacgcgtgcacaacacgcaccaattagcaaggcagttttcaagtcggcggagaatccggccaatccccggcaggcagaggcaaagggccgcctctgagtctggcaacgcgcgggcaaagccacaaataccgagttcaaatctcaacggctgcaggacggccaatcgcgacgcccgccggagcggccggccaatcacagcgccgcccgggggcgggccaaggctccggctccggcccccgctcccacccccggcccgcctgcgaatccctccttggccgcaaggtccccctttgcccagtcggcggggaggaggccgtatttctgctggccagagacgtcgcgtccctggctgggcattcagtcacccccaggaaaggaggcaagtccacgctgggagttagaaggcatcgcctctaatccaggtttcgccatctcctctgctaagtgacgtccagcaagtcacttcactttcaggacctcaaatctcctccccagtagtaaaataggggtaataaaaacagctacagcggaagactgttgtgaggcacagagaaagggcttggtcattggaagcgggttccaggttctcaaccttcatttccttcacggttgaaggacgccaaagaaagcggaaagggtgaattttcttgaaatctcagttttggggaatcttagcgacgagtcgcggacctcagcttgtccggcgctccaaaacttccggcaggcggaccggaagcactgaggcgggaagggtggtagaggcccctcctgccggaacccggggggcggggctcgtggctgttgcggatggggcgtaggtgggcggtgcgcccacagctgcctgggtaaggcccaagatggctgtcttcgccttagtactcgtgtgaagttggcggggacggttcctgtcatcttcttgggcttatttggtgtgctgttgaaggggggagactagagaaatggcagggaacctcttatccggggcaggtaggcgcctgtgggactgggtgcctctggcgtgcagaagcttctctcttggtaagtggctgatgtaggcaccccgataactgcttcgtagtataataggcggctcagattaattccctcccttccccatccccaggtgtgcctagattgatcggtataaggctcactctcccgccccccaaagtggttgatcgttggaacgagaaaagggccatgttcggagtgtatgacaacatcgggatcctgggtaagacttgaccttcgacgtggtacacaatttcagaatggcaattaggctgtaacgactatcttttcctcctgtgtagagagtggtactgtgctcaatagtaagagcaaacacttatgtagctgtttacattgtgtttggcactgttctgagtcccctcgtataatttttacttcataagtaaaaataaacagtttttccaaagttaataaatggcagcatcagaattttaaccccaagcagtctggctccagagtctgtgctattgttctgtactgtaatgttccttgtctataggtgctgctcagcaagatgcaaccgtgggttgaaagcttagctggtgtaggatgagttctcttgtcttggatctaatgtgttctctcacattacacaggaaactttgaaaagcaccccaaagaactgatcagggggcccatatggcttcgaggttggaaagggaatgaattgcaacgttgtatccgaaagaggaaaatggttggaagtagaatgttcgctgatgacctgcacaaccttaataaacgcatccgctatctctacaaacactttaaccgacatgggaagtttcgatagaagagaaagctgagaacttcggaaaag

SEQ ID NO: 1700 - DNA, 6000 bp, Homo sapiens
tatgttgcccaggctagaatgtagtggcctgatctcagctcactgccacctccacctgctgggctcaagccatcctcccccctcagcctcctgagtagctggaattacaggcatgtgccatcatgcccagctaatttgttttttgtatttttttagtagagatggggtttcaccactttggccaagctggtcttgaactcctgacctcaagtgatctgctcacctcggcctcccaaagtgctgggattacaagcatgagccactgctcctggcctcaagagctcattctaatgccatcttttcaacaaataccttttctgatcatccccctcagcaaaaaaaaaaaagaaaaaaaaaacctgtcatgggactcgctttcattatcatatttaaatttacattttgtttacatacacatctcttctttttttcttttttccagtcttacccctgtataaactggatgaagctgctgccaatttaaccaagtgggaatcccagtgctaattgtctgctggatgggatatctttattggagcagattaacatagcctcacatttgtggtttgtgaccactgatttagcaaatacattgtttttcttttttctttttctttttcttttgagacagggtcttgctttgttgcctaggctgaagtgcagtgtcacaagctcagctcactgcagcctcgacccccaaggctcaagcaatccttccacccagcctccacagcagctgggactacaggcacatgccaccaacgcctggctaattttttttttttttttttgtggagacagcatttcaccatgttgcccaggctgatctcgaattcctgggctcagctgatcctctcgcctcaacctcccaaagtgttgggattacaggtgtgagccactgcacctggcgaacatccttttcttttttgtttttttcctttgagacagagtttcgctcttggtgcccaggctggagtacaatggcacgatcttggctcactgcaacctccacctcccgagttcaagcgattctcctgcctcagcctcctgagtaggtgggattacaggcatgtgccaccaggcccagctaattttgtatttttagtagtcagggtttctccatgttggtcaggctggtctcgaactcctgacctcaggtgatccgcccaccttggccccccaaagtgctgggattacaggcctgagccagcatgcccaaccaacattcttttctaaagcatgttggtcagaagcagtccaccacggaggggatgaacaacagtatacagtcatggtctttcatcagggctatgttaattctgttctctgtcatgatgtaatctaaaaaatgtggaccatttgcacattctgcagagtatcacattggtccaccatcttgtaactttacatccttcagacgtctttttttttttttttttctttttttaaagacagagtctccctctgttgcccaggctgaagtgcatggtgcaatctcagctcactgcaacctctctgtctcccggattcaagcgattctcctgcctcagcctcccgagtagctgggattacaggcacacaccactatacctggctaatttttttgtatttttagtacagacgaggtttcaccatgttggccaggatggtcttgatctcctgacctcgtgatccgcccacctaggccttccaaagtgctgggattacaggtgtgagccaccggacatcttttaagtagaatgaagactacttagaggtaggaaccaaccctaccttggtgatttttgttcctccaaatatctttgcacataataattcaatatttattcaaagaaaacgttatatactgtttcataccacaaacaagattgttctgtccttgaaaacaaaaccttttgtatctttgaatcaggaaatattctataaatgcctattgacctattaatttcctcttccctaacaatcagatactctaccaggatatgtagatatcttcttcagggcaccttgcacttagcagagtcccaaatattttattttctccactctagcaccaccaaatcatgtaaagtatacagccactcacatttcacatcaacttctccattcttatgcatagctccttccagccacccctctgaaaactgactctcctaaacatttccgtaagacccaggatcatgttttcatatatacccatcaatccatttatccaaaacccacttgtaatttaacaagtgctttttatttttattgaagatggggtcttgctatgttcctaaggctggcctccaactcctggtttcaaaggatcctcccacctcagcctgcagagtagctgggattataagtgtgctccaaccaccatgccccgcaacaagtatttattaatctaacttcacttttatggagtttttgttttttaaaatatagagatggggtcttgctatgttgcccaggctggtcttgaactcctggcttcaagcaatcctcatgccttggcctcccaaagtgttgggcttacaggtgtgagccactgcacccagccctaacttcactttttttttttttttttttttgagacagtctcaccccagttgctcaggctggaatgcagtggcatgatctcagctcactgcagcctcaaactcctgggctcaggtgatcttcccacctcagcctcttgtgtagctgggactgcaggcacgcagaaccatgagtagctggaactacaggcatgcagaaccatgcccagctaagttgttttttttttttttttgagacagagtcttgctctgttgctcaggctggagtgcagtggcacgatctcggctcactgcaagctccacctcccaggttcaagtgattctcctgcctcagacacctgagtagctgggactacaggtgtccgccaccactcctggctaatttttttgtttgtttgtttttgtattttcagtagagacagggctgtgttagccaggatagtctcgatctcctgagctcgtggtccgcccccctccgcctcccaaggtgctgggattacaggcaggagccaccgcacccagccactttatttttagtagagacggagtttcaccatgtcgcccagaccagtctcaaattcctgtctccaagcaatcctcccacctcagcctcccaaaatgctgggattacatgtgggcaccattctgcccagctgtaattcttaaaaattattattaaaaaagaacaaaacacatagatgccctagactcaactcagctctactgatcaatctttaggggttaggactaggcttttgaaatgttaaaacacccagaaaactgatgaccagtcaggcttagtatccgccatctctaccattcatatggtacttaatgtttcatatttaaatggaaaggacacctcacacttttttgtttttcctatagttcctactcagagaatatgcctaataaatattttatgagagtagtacagaagtatgactccatttttctcttatatttcatttcagtgtggaaggctctttagaaacactattaacataacagcattatgtcaaaaagcgccaataacattctcaccaacttttctttttaaaggaattaggtatagctagactgtaaaaggcaagtggtgtgaagcccaaacctaagatcctaagatctaggatgagtcaagacttcatagtctacatgagtagaggcagcatctagaggaaaacaaaagtatgtggctatcaaattccaaagaagccccattttattacagagaaaatacaaagccgtttcctcacagggaaaagtacagtttcccttctccagggtgacagatgagccttttccgaagttctcagctttctcttctatcgaaacttcccatgtcggttaaagtgtttgtagagatagcggatgcgtttattaaggttgtgcaggtcatcagcgaacattctacttccaaccattttcctctttcggatacaacgttgcaattcattccctttccaacctcgaagccatatgggccccctgatcagttctttggggtgcttttcaaagtttcctgtgtaatgtgagagaacacattagatccaagacaagagaactcatcctacaccagctaagctttcaacccacggttgcatcttgctgagcagcacctatagacaaggaacattacagtacagaacaatagcacagactctggagccagactgcttggggttaaaattctgatgctgccatttattaactttggaaaaactgtttatttttacttatgaagtaaaaattatacgaggggactcagaacagtgccaaacacaatgtaaacagctacataagtgtttgctcttactattgagcacagtaccactctctacacaggaggaaaagatagtcgttacagcctaattgccattctgaaattgtgtaccacgtcgaaggtcaagtcttacccaggatcccgatgttgtcatacactccgaacatggcccttttctcgttccaacgatcaaccactttggggggcgggagagtgagccttataccgatcaatctaggcacacctggggatggggaagggagggaattaatctgagccgcctattatactacgaagcagttatcggggtgcctacatcagccacttaccaagagagaagcttctgcacgccagaggcacccagtcccacaggcgcctacctgccccggataagaggttccctgccatttctctagtctccccccttcaacagcacaccaaataagcccaagaagatgacaggaaccgtccccgccaacttcacacgagtactaaggcgaagacagccatcttgggccttacccaggcagctgtgggcgcaccgcccacctacgccccatccgcaacagccacgagccccgccccccgggttccggcaggaggggcctctaccacccttcccgcctcagtgcttccggtccgcctgccggaagttttggagcgccggacaagctgaggtccgcgactcgtcgctaagattccccaaaactgagatttcaagaaaattcaccctttccgctttctttggcgtccttcaaccgtgaaggaaatgaaggttgagaacctggaacccgcttccaatgaccaagccctttctctgtgcctcacaacagtcttccgctgtagctgtttttattacccctattttactactggggaggagatttgaggtcctgaaagtgaagtgacttgctggacgtcacttagcagaggagatggcgaaacctggattagaggcgatgccttctaactcccagcgtggacttgcctcctttcctgggggtgactgaatgcccagccagggacgcgacgtctctggccagcagaaatacggcctcctccccgccgactgggcaaagggggaccttgcggccaaggagggattcgcaggcgggccgggggtgggagcgggggccggagccggagccttggcccgcccccgggcggcgctgtgattggccggccgctccggcgggcgtcgcgattggccgtcctgcagccgttgagatttgaactcggtatttgtggctttgcccgcgcgttgccagactcagaggcggccctttgcctctgcctgccggggattggccggattctccgccgacttgaaaactgccttgctaattggtgcgtgttgtgcacgcgtgttttttccttttcatttcagcctgactgccggaatcagagccgcgggtgagatccccaggtaagatgtggtgttgcaggtcgtaaaagagtaggaaagtcgagtacatggcagtgtgacccagtcttgggcaaaatacaataggcctagtaagtatatccctggggcgcgatgtgtgagaaactgtaagtctgacagatccgcaacggaagttgttaagcaaatcgcttaacagatccgcaacggaagatgttaagcaaatcgcttaacagatccgcaacggaagatgttaagcaaatcgctta

SEQ ID NO: 1701 - DNA, 6000 bp, Homo sapiens
caaaaaattagctgggtgcggtggctcacgcctgtagttccggctactcaggaggctgaggcaggggaatctcttgaacctgggaggcggaggttgcagtgagctgagatcacagcactgcactccagcccggtgacagagcaagactccgtctcaaaaaaaaaaagaattgttgttaatctcttactgtatctaatttgtaaattaaacattaccataggtaggcaggtagagggaaaaaaccatagtatatacaggggttggtactattccagtttcaggcatctaataagggtcttggaatatatctcctgggataagggtcctactgtactacatatttacttgtttattacttgttaagaaccttgaaaggaagaactttgtcattttgtctgttttgtttactgttgtattatcaatgcttagaacaatgtctggcacacagcacatgatcagtaaatacttgttaaatgaattaaatgatttgatcttatttataggagaagttgtattcaggattctaaacaccaaaatcatcaaagcaatgcaattgttttaaaaaggactcttggctgggtgcagtggctcacacctgtaatctcagcactttgggaggctgaggtgggcagatcgcttgagctcgggagtttgagaccagcctgggcaacatggcaaaacctcgttgctacaaataacacaaaattagcagtgcatgttggcacatgcctgtagtcccagctactcgggcggctgagcccgagaggttgcagtgagctcggatggagccactgcactccagcctgggcaacaaaatgagaccttgtctccaaaaaacaaaagactctttaaaaaaaaaaaaagtggctgggcgcggtggctcacgcctgtaatcccagcactttgggaggtcgaggcgggtggatcatcaggtcaggagttggagaccagcctgaccaacatggtgaaaccctgtctcaactaaaaatacaaaaattagccgggcgtggtggcattgcctgtaatcccagctacttaggaggctgaggtaggagaatcacttgaactcgggaggcggaggctgcagtgagctgagattgcgccactgcactccagcctgggtgacagaaggagactcagtctcaacaacaacaacaacaaaaaagtgacaggaacaagatcatgtcctttgcagggactcagcaaactaatgcaagaacagaaaaccaaacactgcatgttcttacttacaagtgggagctgaacaatgagatcacatggacacagggaggggaacaacacaatggagcctgttagagggtggaatggggggagggggagcataagaaaaaaatagctaatacatgctgggcttaatacccaggtgatgggttgataggtgcagcaaaccaacacagcacgtttacctatgtaacaaacttgcacatcctgtacgtgtactccagaacttaaaaaaaaaaaggtgaccatttaaaaaaatgatgcatcattataataagtgaagagtagtttgtcatagtatgcagcatgttcaattggtgacacatatatccacatgatatggacagaatagtatacctgtggacactgttggtttgccatccattaggcaacctccacactctgccttcttccttgcttaccaaatggttgatatgctcaagtttagggaggctcctaggtaataagcttgatcagttaaaccagtctgggtaattctatttctcttacctgtacagtcctgtgccctgtaacattttggtaaacaatagaccacatatgcgacagtggtgtcataaaaatataatacagctgaaaaattcccatcgtctagtgacttcttggtgaccttgaccctgtgtaggcctaggctaatgtgtgtaggtgttttagtttttaacaaaaaagtctggccgagcatggtgcctcatgcctacaatcccagcactttggtacatgtctgtggtcccagctacttgggaggctgaggtgggaggactgcttgagcctggtagattgaggctgcagtgagctgtgatcaggccactgcattccagcctgcaatcccagcactttgggaggctgaggcgggaagactgcttgagcccagaagttcgagaccagcctgggcaacatagggagacactgtttctacagaaaatttaaaaattagccaggtatggtggtgcatgtctgtgatcccagctgcttgggaggctgaggtgagaggattgcttgagtctgggaagttgaggctgcagtgagccgtgatcatgccactggactccagcctgggcaagagagtctttaccttgtctttcaaaataaaataaagaataaaaagtacaaaaagaaaattcctttttccacttctggacattagaggaagaagctgccatctagactggtgcagtggctcacgcctataatcctaacactttgggaggccaaggtgggtggatcatgtgaggtcaggagttcaagaccagcctggccaacatggtgaaatcccgtctctactaaaaatacaaaaattagccaggtggtagtggcgtgcacctgtaatcctagctacttgggaggctgaagcaggagaatcgcttgagcctggggaggcagaggttgtggtgagccgatatcgcatcactgcactccagtctgggcaacagagtgagaccctgtctcaaaaaaaaaaaaaaaagaaaaacaaaaagaagttgcaatctagcaaccatgaaagaaaagccaagaggagacaagctaggaccatattgtcgagctgctgcattaaccaacccttcttcttgtaggtgataacaaaggaattggttattatctctatatttacagatgacgaaaccaaggcactgagacaattaagtaacttgtctaaggtcagagtggtagaaccaggattcaaatccaggcagcctggctccagtctttaatctctatacctctccaaagcaagctaactgctacaagaccgctcccaacaagtacaaggacattatgaagtctttctggtaatgcaaaaggtgcttttgatcatttacaggtttcagtaggtgactgcactgtacatatattgctcagtgttgcagtggtacatatatattatgggtttttgtccccataattgcacatccaaaaagactccaaaaaggtattaccaaaaacaggtcgagttaagtccgagacattctgaaaaagcgatccactcctataactcttaaatccaccaggacttaattttgacacacagtaaggggtaaagatggaaaataacttttccccaaagagtaatcacatacaccaagactgtttttgactaatccagaaaaggaagttaatgaatgtactctttgggtcatgcatcccatgcaattttaggataaaacagcaaaataggaaaaacatgtttcttgctcttatgatgcttcctggtgtagtggaacagaaatgacaatgtagcaattccatgtgagatggtcctttgaaagagctaggtacagtgacagctatggactcttacctctaagctgtggtggaagatgtttgatggacagtacctcttgcacaacatactgattcacccctccacttttcaacaactcctctggggataatggcagatggaactcatacatttggggagccattctactcctacaggctcacagggctagaaaccaaacagtgaaaaagtcagggtctatattcaagacctgtcttcgtatctggttctattactttcccatccccaacatatataatggcttttagttttatagcaagctagtaacatcatctggttttgttagttccccacccccaacatatataatggtttttagttttatagcaagctagtaacattatcttacgggatctgagattgaccctggactagaaactaattctagtagtgactttggcacttggtcttgacacttaaacctctgggctttatctgtaaaaacagggttactaaactctgattacttcacaaagttgctctgatgatcaaacaaatcaagcagtacgaaggtgtttaaagaactataaagtggcatattaatgtgcaaagtactattatttccatttttatgtgcaaagctccttaagtatagagagaatggtctgatctcgtctgaggccaaaacagtgccccagcatgggctagtgggcttcctgcaccagaatggtaagagcattaacaatgatgatttatttatcctgtgccaagtctgttaggctgtttgcatgtatcatatctgatctaagtatcctaacctcaatcccatgaggtgcataataatacaaatgagtttacagagcggaaattgaagtaagaaagttaagcgatttgcttaacatcttccgttgcggatctgttaagcgatttgcttaacatcttccgttgcggatctgttaagcgatttgcttaacaacttccgttgcggatctgtcagacttacagtttctcacacatcgcgccccagggatatacttactaggcctattgtattttgcccaagactgggtcacactgccatgtactcgactttcctactcttttacgacctgcaacaccacatcttacctggggatctcacccgcggctctgattccggcagtcaggctgaaatgaaaaggaaaaaacacgcgtgcacaacacgcaccaattagcaaggcagttttcaagtcggcggagaatccggccaatccccggcaggcagaggcaaagggccgcctctgagtctggcaacgcgcgggcaaagccacaaataccgagttcaaatctcaacggctgcaggacggccaatcgcgacgcccgccggagcggccggccaatcacagcgccgcccgggggcgggccaaggctccggctccggcccccgctcccacccccggcccgcctgcgaatccctccttggccgcaaggtccccctttgcccagtcggcggggaggaggccgtatttctgctggccagagacgtcgcgtccctggctgggcattcagtcacccccaggaaaggaggcaagtccacgctgggagttagaaggcatcgcctctaatccaggtttcgccatctcctctgctaagtgacgtccagcaagtcacttcactttcaggacctcaaatctcctccccagtagtaaaataggggtaataaaaacagctacagcggaagactgttgtgaggcacagagaaagggcttggtcattggaagcgggttccaggttctcaaccttcatttccttcacggttgaaggacgccaaagaaagcggaaagggtgaattttcttgaaatctcagttttggggaatcttagcgacgagtcgcggacctcagcttgtccggcgctccaaaacttccggcaggcggaccggaagcactgaggcgggaagggtggtagaggcccctcctgccggaacccggggggcggggctcgtggctgttgcggatggggcgtaggtgggcggtgcgcccacagctgcctgggtaaggcccaagatggctgtcttcgccttagtactcgtgtgaagttggcggggacggttcctgtcatcttcttgggcttatttggtgtgctgttgaaggggggagactagagaaatggcagggaacctcttatccggggcaggtaggcgcctgtgggactgggtgcctctggcgtgcagaagcttctctcttggtaagtggctgatgtaggcaccccgataactgcttcgtagtataataggcggctcagattaattccctcccttccccatccccaggtgtgcctagattgatcggtataaggctcactctcccgccccccaaagtggttgatcgttggaacgagaaaagggccatgttcggagtgtatgacaacatcgggatcctgggtaagacttgaccttcgacgtggtacacaatttcagaatggcaattaggctgtaacgactatcttttcctcctgtgtaga

SEQ ID NO: 1702 - DNA, 6000 bp, Homo sapiens
gcagctgggactacaggcacatgccaccaacgcctggctaattttttttttttttttttgtggagacagcatttcaccatgttgcccaggctgatctcgaattcctgggctcagctgatcctctcgcctcaacctcccaaagtgttgggattacaggtgtgagccactgcacctggcgaacatccttttcttttttgtttttttcctttgagacagagtttcgctcttggtgcccaggctggagtacaatggcacgatcttggctcactgcaacctccacctcccgagttcaagcgattctcctgcctcagcctcctgagtaggtgggattacaggcatgtgccaccaggcccagctaattttgtatttttagtagtcagggtttctccatgttggtcaggctggtctcgaactcctgacctcaggtgatccgcccaccttggccccccaaagtgctgggattacaggcctgagccagcatgcccaaccaacattcttttctaaagcatgttggtcagaagcagtccaccacggaggggatgaacaacagtatacagtcatggtctttcatcagggctatgttaattctgttctctgtcatgatgtaatctaaaaaatgtggaccatttgcacattctgcagagtatcacattggtccaccatcttgtaactttacatccttcagacgtctttttttttttttttttctttttttaaagacagagtctccctctgttgcccaggctgaagtgcatggtgcaatctcagctcactgcaacctctctgtctcccggattcaagcgattctcctgcctcagcctcccgagtagctgggattacaggcacacaccactatacctggctaatttttttgtatttttagtacagacgaggtttcaccatgttggccaggatggtcttgatctcctgacctcgtgatccgcccacctaggccttccaaagtgctgggattacaggtgtgagccaccggacatcttttaagtagaatgaagactacttagaggtaggaaccaaccctaccttggtgatttttgttcctccaaatatctttgcacataataattcaatatttattcaaagaaaacgttatatactgtttcataccacaaacaagattgttctgtccttgaaaacaaaaccttttgtatctttgaatcaggaaatattctataaatgcctattgacctattaatttcctcttccctaacaatcagatactctaccaggatatgtagatatcttcttcagggcaccttgcacttagcagagtcccaaatattttattttctccactctagcaccaccaaatcatgtaaagtatacagccactcacatttcacatcaacttctccattcttatgcatagctccttccagccacccctctgaaaactgactctcctaaacatttccgtaagacccaggatcatgttttcatatatacccatcaatccatttatccaaaacccacttgtaatttaacaagtgctttttatttttattgaagatggggtcttgctatgttcctaaggctggcctccaactcctggtttcaaaggatcctcccacctcagcctgcagagtagctgggattataagtgtgctccaaccaccatgccccgcaacaagtatttattaatctaacttcacttttatggagtttttgttttttaaaatatagagatggggtcttgctatgttgcccaggctggtcttgaactcctggcttcaagcaatcctcatgccttggcctcccaaagtgttgggcttacaggtgtgagccactgcacccagccctaacttcactttttttttttttttttttttgagacagtctcaccccagttgctcaggctggaatgcagtggcatgatctcagctcactgcagcctcaaactcctgggctcaggtgatcttcccacctcagcctcttgtgtagctgggactgcaggcacgcagaaccatgagtagctggaactacaggcatgcagaaccatgcccagctaagttgttttttttttttttttgagacagagtcttgctctgttgctcaggctggagtgcagtggcacgatctcggctcactgcaagctccacctcccaggttcaagtgattctcctgcctcagacacctgagtagctgggactacaggtgtccgccaccactcctggctaatttttttgtttgtttgtttttgtattttcagtagagacagggctgtgttagccaggatagtctcgatctcctgagctcgtggtccgcccccctccgcctcccaaggtgctgggattacaggcaggagccaccgcacccagccactttatttttagtagagacggagtttcaccatgtcgcccagaccagtctcaaattcctgtctccaagcaatcctcccacctcagcctcccaaaatgctgggattacatgtgggcaccattctgcccagctgtaattcttaaaaattattattaaaaaagaacaaaacacatagatgccctagactcaactcagctctactgatcaatctttaggggttaggactaggcttttgaaatgttaaaacacccagaaaactgatgaccagtcaggcttagtatccgccatctctaccattcatatggtacttaatgtttcatatttaaatggaaaggacacctcacacttttttgtttttcctatagttcctactcagagaatatgcctaataaatattttatgagagtagtacagaagtatgactccatttttctcttatatttcatttcagtgtggaaggctctttagaaacactattaacataacagcattatgtcaaaaagcgccaataacattctcaccaacttttctttttaaaggaattaggtatagctagactgtaaaaggcaagtggtgtgaagcccaaacctaagatcctaagatctaggatgagtcaagacttcatagtctacatgagtagaggcagcatctagaggaaaacaaaagtatgtggctatcaaattccaaagaagccccattttattacagagaaaatacaaagccgtttcctcacagggaaaagtacagtttcccttctccagggtgacagatgagccttttccgaagttctcagctttctcttctatcgaaacttcccatgtcggttaaagtgtttgtagagatagcggatgcgtttattaaggttgtgcaggtcatcagcgaacattctacttccaaccattttcctctttcggatacaacgttgcaattcattccctttccaacctcgaagccatatgggccccctgatcagttctttggggtgcttttcaaagtttcctgtgtaatgtgagagaacacattagatccaagacaagagaactcatcctacaccagctaagctttcaacccacggttgcatcttgctgagcagcacctatagacaaggaacattacagtacagaacaatagcacagactctggagccagactgcttggggttaaaattctgatgctgccatttattaactttggaaaaactgtttatttttacttatgaagtaaaaattatacgaggggactcagaacagtgccaaacacaatgtaaacagctacataagtgtttgctcttactattgagcacagtaccactctctacacaggaggaaaagatagtcgttacagcctaattgccattctgaaattgtgtaccacgtcgaaggtcaagtcttacccaggatcccgatgttgtcatacactccgaacatggcccttttctcgttccaacgatcaaccactttggggggcgggagagtgagccttataccgatcaatctaggcacacctggggatggggaagggagggaattaatctgagccgcctattatactacgaagcagttatcggggtgcctacatcagccacttaccaagagagaagcttctgcacgccagaggcacccagtcccacaggcgcctacctgccccggataagaggttccctgccatttctctagtctccccccttcaacagcacaccaaataagcccaagaagatgacaggaaccgtccccgccaacttcacacgagtactaaggcgaagacagccatcttgggccttacccaggcagctgtgggcgcaccgcccacctacgccccatccgcaacagccacgagccccgccccccgggttccggcaggaggggcctctaccacccttcccgcctcagtgcttccggtccgcctgccggaagttttggagcgccggacaagctgaggtccgcgactcgtcgctaagattccccaaaactgagatttcaagaaaattcaccctttccgctttctttggcgtccttcaaccgtgaaggaaatgaaggttgagaacctggaacccgcttccaatgaccaagccctttctctgtgcctcacaacagtcttccgctgtagctgtttttattacccctattttactactggggaggagatttgaggtcctgaaagtgaagtgacttgctggacgtcacttagcagaggagatggcgaaacctggattagaggcgatgccttctaactcccagcgtggacttgcctcctttcctgggggtgactgaatgcccagccagggacgcgacgtctctggccagcagaaatacggcctcctccccgccgactgggcaaagggggaccttgcggccaaggagggattcgcaggcgggccgggggtgggagcgggggccggagccggagccttggcccgcccccgggcggcgctgtgattggccggccgctccggcgggcgtcgcgattggccgtcctgcagccgttgagatttgaactcggtatttgtggctttgcccgcgcgttgccagactcagaggcggccctttgcctctgcctgccggggattggccggattctccgccgacttgaaaactgccttgctaattggtgcgtgttgtgcacgcgtgttttttccttttcatttcagcctgactgccggaatcagagccgcgggtgagatccccaggtaagatgtggtgttgcaggtcgtaaaagagtaggaaagtcgagtacatggcagtgtgacccagtcttgggcaaaatacaataggcctagtaagtatatccctggggcgcgatgtgtgagaaactgtaagtctgacagatccgcaacggaagttgttaagcaaatcgcttaacagatccgcaacggaagatgttaagcaaatcgcttaacagatccgcaacggaagatgttaagcaaatcgcttaactttcttacttcaatttccgctctgtaaactcatttgtattattatgcacctcatgggattgaggttaggatacttagatcagatatgatacatgcaaacagcctaacagacttggcacaggataaataaatcatcattgttaatgctcttaccattctggtgcaggaagcccactagcccatgctggggcactgttttggcctcagacgagatcagaccattctctctatacttaaggagctttgcacataaaaatggaaataatagtactttgcacattaatatgccactttatagttctttaaacaccttcgtactgcttgatttgtttgatcatcagagcaactttgtgaagtaatcagagtttagtaaccctgtttttacagataaagcccagaggtttaagtgtcaagaccaagtgccaaagtcactactagaattagtttctagtccagggtcaatctcagatcccgtaagataatgttactagcttgctataaaactaaaaaccattatatatgttgggggtggggaactaacaaaaccagatgatgttactagcttgctataaaactaaaagccattatatatgttggggatgggaaagtaatagaaccagatacgaagacaggtcttgaatatagaccctgactttttcactgtttggtttctagccctgtgagcctgtaggagtagaatggctccccaaatgtatgagttccatctgcca

SEQ ID NO: 1703 - DNA, 6000 bp, Homo sapiens
ccagcagaaggtaaccaacttctatgtggcaaaaacatatggtacctctccatataccagtgtaaagaggaatccagtgttgaagataaatatctgccccaaagaggtctagaattcacatttttattatcagtagtaaaagtcttcctctaccaaggacgaggatatctggctccctttaaggactgtaatgtgtcttaccactacaaggagtactcctaatctatattctgtagaaagggtttttagagtgagtgggtagctcagtttagagtatacttaaagatcatcttgaacaaaatggatgatgtgggacttgagcagattcttctcttcctaccctacacaggctctccccctgacacgtttccaggcagtggtggctttagctgtgggacgtctggcagacaagtcagtgctagtatgtaaaaatgccatccagctgctggccagttttctagccaataatcctttctcctgcaaggtaagtagacttggtccaccaaaagagaaggaattaaatggaaacagggatgaaattatgtcatttactgaccctgctattcattttacctgatagcttagtgatgctgaccttgccggaccactgcagaaggagacccagaaattacaagagatgagggcccagaggcgaactgcagcagcttgtaagtagttactgccttggagtcctaatgccagacaggcttctccttgcagtcagaaactctagtgaaagagactaagtgacactctcatttagctgcagtgctggacccagaggaggagtgggaagccatgctgccagagttgaagtctaccctgcagcagcttctacagcttccccagggagaggaggagattcctgagcaaattgccaatacagagacaactgaagatgtgaaaggacgcatctatcaactgcttgccaaagctagttacaagtaggcaaaagaatgggatattcttcgtgatctgtttatgtttagagttaacctttgagaaacttacataatgtgtcttttaaattaactgcacacagatatgctgccaccaggtgatggtagatgttttcatgtagtaatggtctgaccataggcctagtccacaattaagcatgtgtttctactttataaatgtttaaaaaaactactgaaacaattaaatgttaacagtattataatcaaacatgagtcctccttcaattgaagaagagcacctataaataagttctagttgtatgatcttgaataagttgcttaactttctgtgcctcggtttcattatctataaaataagaaattgattagatcttatgatctctaaggactttctaattctaaatttcatgaactaataatatcaaacatgcttaatactaccttaatcttcaaacctagtatgaatcctgatcttagagaaaagatttctcctagtgtttttgtgactctagaacttaacaacaaaagcccttacagccgtcaacaagttttttttttttttttttttttttttttttgagatggagtctcactcactctgttgcccaggctgcagtacagtgacacgatcttggctcactgcaacctctgcctcccaggttcaagcaattctcgtgcctcagcctcccaagtagctgggaccacaggcgcgcaccaccacaccgcactaatttttttatttttagtagagacagggtttcaccatattggccaggctggtcttgaactcctgacctcaggtgatccacccatctcagcctcccaaagtgccatgattacaggcgtgagccaccgcactcggctgccaacaagtattcttaaacctcagccacaagttatttgttatttatttacttcttacctaattgggctgaattttttttttggagacggagtcttgctctgttgcccaggctggagtgcagtggtgcgatcttggctcactgcaacctccacctcctgggttcacgccattctcctgcctcagcctcccgagtagctgggactacaggcgcccgccaccacgcccggctaatttttttttttatatttttagtagagacggggtttcaccgtgttagccaggatggtctcaatctcctgacctcgtgatccgcctgcctcggcctcccaaagtgctgggattacaggcttgagccaccgtgcccggcttgggctgtttttagaaggctagagagtggcttgtttgccctatgactcccttatgttactttagtgtctctctttttattttgctaaagcaaaaatagagactatagttttataagtgcatgttccaccaagcattctagtattttctcctgtcaattagaaaaggattgtttgtttttgagacagaatctcactgttgcccaggctggagtacagtagcgcaatcacagctcactgcagcctctcactgtagcctcaaccctgctgggctcaagcgatctcccacattagcctcctgagtagcctggttaatttatttataatttgtagctgggattacaggtacacaccaccaggcctggcctttgccagcctgggcaacgtggcaagaagataacatgtagacaagcagtcaaacatgtattctttttttcccccttttatatgactgatagaattctctgcccactgatctaccatcttgtttttttcacttaactatgtgtctcagtggtttttaaaaatatttatggctgggtgcaatggctcatgcctgtaatcccagctacttgggaggctgaggcaggagaattgcttgaacccaggaagcagaggttgcagtgagctgagattgctccgctacactctaccctgggtgacagaggaagagtccatctcaaaaaaaaaaaaaaatttatagatggccaggtgcagtggctcacacctgtaatcccagcaccttgggagcccaaagctggtggatctcttgaggccaggagtttgaggccagcctggccaacgtggcgaaatggcgaaacccatctctgctaaaattacaaaaattggccaggtatggtggcacgtacctgtaatcctagctatttggggagctgaggcatgagaatcactcaaacctaggaagcagaggttatagtgagccaagatcatgccactacacttcagcctgggtgacagaacaagactctgtctctaaaaaaaaaaatatatatatatatatacacatatatatttatacataaatagtttcccactctcctctttttttgagagagagagtgtctcactcttttgcccatgctggagtacagtggtatgatcacaactcactgcagctttgatctcccaggctcaagtgatcctcccacctcagctccctcgagtagctgagaccacaggcacacaccattacacccacaggcacacaccatcacacccacaggcacacaccatcacacccacaggcatacaccatcacacccacaggcacacaccatcacacccggctaactttttttactttttgtatagttgggtctccctgtgttgcccagactgatctcaaattcctgggctcacgtgtccccattattttttatgactacatagaatcttattgtctggatgtgcctgaattaactaattattgaaagtttattgtttctaaacttaggaaagtttttaaacaggtgtttggagtaggtttatgattttaaaactttaaaaagccttattggagtttttttgaagactgtagtaatgccttgtaggttcagaaataggaaaagtgtttgcagatgagcagtcaggggaaaaaaataggcaaagtgttttgagccctaccccttagtaggtgctgtaacaactttttaagcatgttaagtgctccttttctctgggcagtaggtccagggacttgatagaatcatgaggtaagctcccttacaaacggctgcagtgacattcttctgggtactgacaggctggtgttctttcagaaaggccatcattctcactcgagaagccacaggccacttccaggagtccgaacccttcagtcatatagacccagaggagtcagaggagaccaggctcttgaatatcttaggacttatcttcaaaggtaatcattttccttcttcagtcaataaataacacatgtcaactggtatttactgagcattaactttatgccatcattggcctggttaacagaacctggtgctgaagagcccagagatgaattggcattacttttgctctggaatggaagcagcccacgggcctaagattgatagtcacagggtgactgtccagaccatagcggtctttaggtatggtttttgagaaatttagatattttagagtaagttttaatttcatatcttcacattgtgaaaagagatatccagggccagatgtcgtggcttatgcctgtaatcctaacactttgggaggccaaggcaggaggattgcttgagcccaggagttgaaaatcagcctgagcaacatgacgaaacccccatctctacaagggataccaaaaaaaaattagccaggtgcggtggcacgcacctgtagtcccaactgctcaggagctgaagtgagagaatcaccttagcccggggaagttgaggctgcagtgagcggtgatcattgccactgcacagcctaggcaacagagtgagaccccatctcaaaagaaaagaagaaggaaaataaataagtaaatatccaggaatgttgacagctgttggattcccctgtatccccttgaacgaaaccatcctgtacttctctaactccttaggcccagcagcttccacacaagaaaagaatccccgggagtctacaggaaacatggtcacaggacagactgtctgtaaaaataaacccaatatgtcggatcctgaggaatccaggggaaatgatgaactagtgaagcaggagatgctggtacagtatctgcaggatgcctacagcttctcccggaagattacagaggccattggcatcatcagcaagatgatgtatgaaaacacaactacaggtatgccagagtccctttctataaggacagccttggggttcttttggattttttaattttttaaatttttattaacaatagagatggggccttcctttgttgctcaggctggtctccaactcctgggctcaggcaattcttctgcgtcagcctcccaaagtgctggtattacaggtgtgagccactgcacccggccatggatcttggagttcttttccatattttattgatatatctatctgctcctttaaaaggcaggggttctcggctgggcgcgatggctcatgcctgtaatccctacaaaactgggaggccaaagcaggaagacaggttgaggccaggagttcgagagcagcctgggcaacatagcaagaccccatctctacaaagaaacaaaaactaactgggcgtgatggcacgcacctgtagttccagctactcggaaggctgggcaggaggattgcttgagcccgggagtttgaggctacagtgagctgtggtcatgccactgcactctagccggagcaacagaataagaacctgtgtcttaagaaaagaaaaaaaaaaggcaggggttctttttttctgtttgcttcctctagccacttacagcttatacattttaatgcatatagtatttcatgataaggcatcataggaggagtcgacattctcagggaaaatgcggaaggcctccatttgcatcttgctacattcagaaaggttctgtcgttaggtattgggggagttttgtgaagtagataggtgacatttgtacatgttctctcagtggtgcaggaggtgattgaattctttgtgatggtcttccaatttggggtaccccaggccctgtttggggtgcgccgtatgctgcctctcatctggtctaaggagcctggtgtccgggaagccgtgcttaatgcctaccgccaactctacctcaaccccaaaggggactctgccaggtatatggggtgc

SEQ ID NO: 1704 - DNA, 6000 bp, Homo sapiens
cttagaacaagctctggtgattgaggaacagctgcgccgggctgcttacttgaacatgtcagaagacccttctcacccttccatggccctcaacacccgctttgctgaggtggagtgtttggcggaaagtcatcagcacctgtccaaggagtcaatggcaggaaacaagccagccaatgcagtcctgcacaaaggtagccagtggctcccctgcctcctgccgattcggcctccctgatctgactgcatcctaatgtacatatatttgttttcaaactttcagagctcctttgtctgggagtttaggaggtgctagggatctttgccatccttgggaggttagtatcttagaggcaatcaaggacagtagttctttgcctttttttttttttaaagagatggactcctggccgggcgcggtggctcacgcctctaatcccagcactttgggaggccaaggcaggtggatcacgaggtcaggagttcgagaccagcctggccaacatggtgaaaccccgtctctactaaaaatagaaaaattagctgggcatgtggcgcaacgcacgcttataatcctagctactcaggaggctgaggcaggagaatcgcttggaacccgggaggcggagtttgcagtgagccaagattgtgccattgcacaggctatcagcctgggcaacatagtgagactccagaaaaaaaagagatgggctctcaccattttgcccaggtgggtcttgaactcctggattcaagtgatcctccggcctcagcctcctgagtagctgggactacaaatatgtgccactgtacctggccacctcttttttttttttttttctgagatagagtctagctctgttgcccaggctggagtgcagtggtgtgatcttggcccaccacaacctctgcctcctgggttcaagcaattctcctgcctcagcctcccgagtagctgggactacaggcatgcgccaccacttgtggctaatttttgtatttttagtagagatggagtttcaccatgttggcaaggctggtctcaaactgacttcaagtgatccacccgcctccgcctcccaaagtgctgggattataggtgtgagccactgtgctccgccctggccaccttttttttttggaggtggaattttgctcttgttgcccaggctggggtgcaatggcgtgatctcggctcactgcaacctccgcctcctgtgttcaggtgattctcctgcctcagcctcctgagtagctgggactacaggcatgcccggctaattttgggtttttttgtttgttttttgagatggagttttgctcttgttgcccaggctggagagcaatggcgcgatctcagttcaccacaatctccgcctcccgggttcaagcgattctcctgcctcagcttcccaagttgctgggattacaggcgcctgccaccatgcccagctaattttttgtatttttagtagagatggggtttcaccatgttggccaggctggtcttgaactcctgatctcaggtgatccaccgcctctgcctcccaaagtgctgggattataggcatgagccactgcgccccagctaattttgtatttttagtagagatggggtttctccatgttggttagcctagtcttgtactcccgacctcaggtgacccgcctgccttggcctcccaaagtgctgggattacaggtgtgagccactgcacccggccacctcttttaactttaaacatattcaggttcttgagatggaaagcaaagcagaataatacagtgtcatttgcgatactttagaggtaacttcaggtgataaaagatcccttcaaattctagacccctttcaacattttgtttctaattaaagtaaaaggttatgaggaggcggagggtgaaataaggaaaagaatgctgttataatggaggtggggagacagattctgaaggtagagaagagaaaaaacgaataagctcaagaagaggaaatacaataatagtaagggatagtgaaggtttaggtgactttaaaaagcacaaaatcatggacagttggaactggaatatgaggagtaggaatttgaacatggtggaggtcaggtcagatgacagaagacaatacatcacagttacttggtcactgagaagtgatggggggctggtccactagggtagagggagctcagtctgggccaccacagctcaccacctctttttctccctatgcagttctgaaacagctggaagaactgctgagtgacatgaaagctgatgtgactcgactcccagctaccattgcccgaattcccccagttgctgtgaggttacagatgtcagagcgtaacattctcagccgcctggcaaaccgggcacccgaacctaccccacagcaggtaggaccattttcttcttgacaccacctcttcctgcagaaccattctggagcttgtaactttgctgtatgtccctagctttacatactgggtgggtggcctatcagtgaattcccttgagattgggtggattcctatcatctggaattctgactcctcgggtctccttctctaggtagcccagcagcagtgaagatgcagactgataccacctccaccgctgagcagtgaccttcctcactttctcttgtcccagcttctcccctgggggcctgagagaccctcaccttccttctgcccatcttccatgttgtaaaggaacagccccagtgcactgggggaggggagggagtgaggggcagtggtgcccttcctgcagaagagacatgcagcagtagcgctggcgccatctgcaggagctggcgggctggccttctggaccctggcttctccccactgtaacgcctgttacacacaaactgttgtgggttcctgccaggcttgaagaaaatgatctgaattttttcctccttttggttttattttgttggtttattttgtgttttcttttctcctttttggggggtattcagagtgggctgggcccctgggcgagacacagctacctctgttggcatctttttaataccaggaacccagcggctctagccactgagcggctaaatgaaataaagtggaaaaaaaaaaaaaggaaaaaaccaaaagcataaaaaaccacagcaaatttcttgatgaaaattgaaaataaaagtttccttgtattttagtgctctggttcagtgtgggtgtaggtgcaggtggatgagtgtgtgcggcaggagcctggcacctgtatagttgaaaattaagggctacgtggtgtcctgataccccactgagtaactgggttctgtgtgtgggtgcagtatgtgccttgccaacgttgacttccacctgtggaaaatgagaggctgcaaaactgcgggcaccgccgcttaatggctctgtgaccttgagcaagttgtttaactttggtgggatgcagatatctcatgtatacctcatacggttgtcaagttaaaccagtgaagtacatggaacggttttaacacctaaccactaccttaatgttagtttctaggaaggctgaggggggttttcttgctaagttgtgcaaaattgggatgcaatttgtggaagaacacagcctcaatcccacacccccggaggcccgacctaacgtcctccaaccttgaaacccttgtagttcaccccttctcatgtcccagaccaggtcagccttgcaacccgttgtttcccaactaattgtagacccacctgaaagcgagttccggcgaagaggccccctgcgaatgaggtgcagtgcagcaccttaattgaggggctgagcaggggtcagcatcaaggaaggtgctgggagggcggggcacggtggctcacagcctgtaatctcagcacaaaggtgggggcaggaggatcgcttaagcccaggagttctagaccagccctggcaatatagtgagacgccaccccctacaacccgtctctataaaaagatttttaaaaaaggggcaaagaggaggaggtaagtggcatggaattccacggttttttttgtttgtttgttttgagatggagtctcgctttgttgccaggctggagtacagtggcgcgatctcagctcactgcaacctccccctcccgggttcaagcgattctcctgcctcagcctcccgagtagctgggactacacgcgtgcgccagccaccatgcccaactaatttttgtatttttaatagagacaaggttggccaagatggtctcggatttcttgacctcgtgatccgcccgcctcgacctcccaaagtgctgggattacaggcgtgagccaccgagcccggctggtttttttgttttttttttttgaggtggagtttcgctcttggtgaggcttaagtggcacgatctcggcttactgcaacctccgcctcccgggctcaagcaattctgcctcagcctctcgagtagctgggattataggcgcccgccaccacgcccggctaattttgtatttttagtagaagcagggtttcaccatattggccaggctggtctcgaactcctgacctcaagtgatccacccacctcagcctcccaaagtgctgggattacaggcgtgagccactgcgcccagcctggaattccgtgatcttgacgctggactagggcagtggatgcgagggagagggctccaatgtcgggccctggttcgaggagaaggtgcggctttcacccaacagaaaccggccgtgaggctaaaagccaactccatgagggaaggtcggtcaagctcaatggtttcgtcacattgctccctccacccgccgcgggtgtaagctgcgcgtctccttcgaattgccccctactcgccgccgccggctccgctggcgttcccagggcgagcgtaagttccgggtgcggcggccgactaggcgcaacaggaagaggcggggccgcgaggctagcgctacccgtgcgcctgcgtggaacgattctgtggcgagtgccggccgaaagctaggtccggattgcacgtggagggccgcccgaagggcactctcggacattaacccgcattctggtgggtctagaggaaattgggggacgaagagtggcagcactgacctggtctgggacgtggggagaagggtgcgctacctgggtttcaggtgggagggcgttcggtcgggcctccagggggatagcgggggtgcttgagtcgcgggtgctgagtcgggagtgctgagtgagttgcgggtgctgagttgaggctgtgccctttcccactataatacgccaagcgtgcgttctgccgttccctccgacacgcgcgacgccaccttctcccatttctgcctgccacagtaccatggggcgcaagttggaccctacgaaggagaagcgggggccaggccgaaaggcccggaagcagaagggtgccgagacagaactcgtcagattcttgcctgcaggtaaggattagttgtggcctcctgatccctcagcttttgcagtattctgtattataacctcttctcttttttagtttctgttcattttatatttaagtggaatcttctctgtatgagttactaggaggtatgaatgaaacagccgtttagattgtagggaactgtttaggtcgtagagatgtgaagacacggacacaactattattcatgcaagggaaaagtgtgatttaaaacaattgtgagttcagaggaagggggagcccatgcagaactgtaaaagtttttgttaagctgggttttgaaaaatgggtaacattgtagcaagaggaagtagtgaaggggaggggtcagtcactgatttgccttttggaaggggtggaaatggaaaagcacggatctggctgcttcatgccgagtagtagtatactgtgtggaagactggtgggaggtaacactggaccgggagtttgtgttgggcattggataaaggatgcagtttattgagatagtaggaagtcctgggcactgtattaaacttgttggtcatg

SEQ ID NO: 1705 - DNA, 6000 bp, Homo sapiens
cgcaaacacaacccgcctgatcttcagcaacaggtgcaggcagcagcagcagcggcagcagtggcccaggcccaggctcaagctcaagcccaggctcaggctcaggctcaagcccaggcccaggcccaggcctcccaggcatcacagcagcagcagcagcagcagcagcagcagcagcagcagcagcaacagccaccaccacacttccagtctcctggggcagccccccagggtgggggtggtggggacagcaatcccaaccctccaccccagtgttcctttgacctgaccccgtataagacggcggagcatcataaggacatctgcctcactgtcaccaccagcaccatccaggtggagcacctggccagctcttagagatccgtgctgccacccactgggaagaggaagaagtagtcctggtgtcttctttctccaactcttggtgggaaaagtccttttcttccttgacaggccttggctccatctccttgggcctctgtcacggctttccttcacaggataccatcctttttctgaactcttcttcaaaaggaacatcagccctcctgattgcaaaggaatactgagctgatggtgtcatccagcagcctcccctcccaagcaaagcttctaaaactgggggtcggtgctcaagggaaggatttgctatgacctcatagaaccttgtccagtgtggccacttaccctatccttaccctccttatcctcaaagtttgggctgatgtaagactagaggctggccctcccagataacagagaaaagggagccccaaatgcaaccagcctcttgttctattcttgcctgcaaaagaacagaggtttctcaaatgcctcagtccctgagagccatttcttcccctacatcgtctcactttgcttcctattgactgctggtagaaggagatttggggtaggggctagacctccttttatttgaagggggcaagggctgagatgtggtccccaaggggccagaaattcccaagttggtcacaggtggcttagaagtgtgtgttatggttttacggatttccttgaagcctctctccttctctgcctacaaagaccctatactctcagtctccccaacccacccccaaggagctgtgggaggctttgtgttatctgtgaaactccaaaacaggggtgttgcggagaagggagagttcaaggcaaacgcaaggactggacttagctccctaggtgccacagtcagatgccggacacggatttatatataaatatatatatataaatatattatactcactcatcacggccatctttgttgtaaccatttctgtgtttataaatgcattatctctgagaattttcatatttgatgttttgtttatttttgtcctttttttccctctctccacccctgtcctctagccacagcatttttctttttgtcttttttttttttttttaaatcatggcagatttcagaggaaaggaaattaaaaaaaaaatcaggaaaccagttgttataaagtaatttaaaaatgaagaaaaaaagaaaaaaacttatgtacaaaccaaggggtgtttttagaacattgtatagaaataaattcatgtaaaaggatcagaggcagtggagctactgatgtgagcgagcatgcggaaaaggtatttggggagatgtccaagaacagtactgaggatttataccagagtgtgtgtgtgatgaacaagtgcttgtgtgatgatgccccatttgtgcaattctccagtcatggaagggtacagtttcatgatgtctccagtgaaatcctggtttatgaggacttctacatacacattctgtcatggggattgcattgcctaaatatgtgagagcaaggctttggttatgtgttaacaaaacagctaagctccctatggaagaaaaatggaagcctcttgaaaggacctacactcctgcctgagtctgtggaagaggggcttgcagttggcaatgtgtatacatatgtgtatttgttaccttgtggaaatcataaccggttaaggggtgcaagattgatttatgcaggagagctgtagtactatggagtagaatgtggtcatgaaacctggacttcagccctttgcctaccatcaaccagtgttggccagggtgcttcttcaactgttagtgaagggattggactagataactctgaagataccttttttgagaattaagtaacttgctttaaggctgggtgcggtggctcacgcctgtaatcccagcattttgggagggcgaggcaggcagactacttgacgtcaggagttcaagaccagcctggccaacatggtgaaaccccatctctactaaaaatacaaaaattgatggccgtgcacggtggctcacgcctgtaatcccagcactttgggaggccgagacaggtgaatcatgaggttaggagctcgagaccagcctggccagtatggtgaaaccccgtctctactgaaaatacaaaaaataagctaggcatagtggtgggcgcctgcaatcccagctactcaggaggctgaggcaggagaatcttttgaacctaggaggcagaggttgcagtgagccaagatcgtgccatggcactccagcctgggcgacagagtgagactctctctcaaaaaagtaaaataaaaatacaaaaattagccaggtgtggtggcacgcgcctgtagtcccagctgcaggctgaggcagaagaatgacttgaacctgggaggcggaggttgcagtgagccgggattgcaccactgcactccagcctgggccacagagcgagattctgtctggaaaaaaaaaaaaaaacaaaaaaaaaaaaaccttgctttaagcaccgaaaaagttgtgaaagttgtgaccaagctcccacatcctgagaactctgggactgctggccaatagtacttgttatgtagttgggctgggataaataaagcccacttaatttagtgctagatatcctgtgtgggcacctaagatggtgtctcaatatgttgtgtaataccaatgaatgtatcacatatgaccaaatatgccaatgtttcttagctccctgcatatttactgctttttcctcccactctcaccaactcttgaaaaggccctaatggccctaacttcatcaccagtattagaactagaatctactctttttatggatacactcacactcacttattccaacaaccctatgagggaggtagtagtctcattgtatagtaaaacaggcacagagatcaagttaccgaaaagcatgacttttgtaattagagcagtttcccggattctattgctgtatcttactacctgcacactagtaaacctggggtttacaggctacagatcctttcagctctgatacccccaccactctacagcccctgaaccccctcctccagcctgctcttactgtccagataatgtttcaaatacatccctgcatccatctcgaagcaaaacaaagcaacttccaatccgccccgggttggaagttcctcttctccacatatttggtagaaattatatagctgaaagtctgtctctttaaaaacttgccgtaagacattggtaattcttatgaaggatgtgtgagggtacgaaaagtgtgaggggtggcagctatctctaaaatactatcttactaacaccactattaggttatggcctttgtgttggcagtgtgttgacagcctagtgtgttggcagcctctcatacccttgactgcttcccattctgatgaaaaccatagaaatcactctaccatagctgactagagtgatggctagcaactaactagccaactagcccagtagtgatactgctgcatccctcaatcccttcagaattatgatgctaacatcacatataaacaaaaggaaaacaaaaacacgagatttcccccttagagagtagcaagaggggccaggcacagtggttcgcacctgtaatcccagcactttgagaggctgaggtgggcagatcacctgaggtcggaagttcgagaccagcctcaccgacatggagaaaccccatctctactaaaaatacaaaattagtctggcgtgatggtgcatacctgtaatcccagctacacgggaggctgagacagaagaatcacttgaacccgggaggtggaggttgcggtgagccatgatcacgccattgcactccagcctgggcaataagagtgaaaattctgtctcaaaaaaaaaaaaaaaaaagcaagagggcaaggcaggaagtaatattttatatgtgaaagtgtattctagtgtaacgtacaggagctctgacaaaagatgtgcagaattatagctttattatgagtcattctttgtatttataagtagaaaggtgatcatctttctcaagttaaaaaaataatgctgggggagatggtgtttgtgtgagtgaatagaaattcagacggtttaaatgtctcaaggcctgatactcttccccaacttccttaagaaactaactggcttgaaaaaagtcattctgcaaaagagggaaaaaaagttggatcttccagttgctgagaaggtatgtttacgcaatatgagcctaaagtgaacagttacccctgcacggattaccatacattcccgttttggagggaaaaaagtttgctagagaatgcaaaatggcgacctccagtgacgtcatacctgtctcggtcgcgtcctggggtgtctgtaagggcggaagcgggctacagccgcctcactgtgggcggtcgtggctaccatgcaaaaggaaaagtttcagtgtcgggcggatgtgtaccggcggtaatatagtaagggcggaagttctcctttaagggcggaagttctccttttaagggcggaagttctccttttaagggcggaaaggctttagccgcaaaatggcttcggcccctgtcgcgttacagtcacttccggggcggatcggaagttgctttgttttgcttcgagatggctgcggggatgtatttggaacattatctggacagtaagagcaggctggaggtgggggtcggggctgcagagtggtgcggggatcagggatgagaggatctgtagcccttaagttccagtgacgagaaggtcacaattatgaagcggttctgtggcaggaaatattggagggtgcggagaaagagggggcggggcagcaggatcgaggccccgctgatgggtgtagacgagggaggggtgcggtgtgggggttagagacgtgtcttgaagggctagtgtgcatggccaggaagatagttgctgcccccattctccagggtctccagcctcggtagatttttttccccatagtcgttcagaatcgttatcacacactgccatttggagaagcggtaaagacctctcctccactccattcttcctcaaaagtggcttctcatggggttgagagtggtggtgatgagtgaccactgtcagatgatgaactagaacgcttctcttcatggagtaaagatctaattcccatcaaatgaaaatctggtgtttatgcgatttatgtaaaccacccctgcagaaagcctattgctctgtgcgcttacatttgttttagggcccggagtcatttattcaacaaatatttattgaggtcctgctatgggtcagacataatggcaggcactagggatagaaaaatgagtaagacaaggctcctgccctcaagaagctcacgatctagtaggaaacagattctgcaaataattataaaacactgtgacaagtgagataatggaaatacattaaaaaggacacttggtaggcaaccctggagaaaaggggggtaattacctggggatgtaggaaaagctttacagcggaggtgatgtttgaatagggtcttgaaggttatttgccagtgaggagagaaaaaaggaattccaggttggggaaagcatccgcaaaggtactgtgatgggtttgtggcaaggtcaagggtgtttgatatttat

SEQ ID NO: 1706 - DNA, 6000 bp, Homo sapiens
caaactattctaggtgtaaaagcaaaggcgaggccgggtgcggtggcttacacctgtaatcccagcactttgggaggccaacacaggtgaatcacgaggtcaggaattttagactagccgggccaagatggtgaaaccctgtctctactaaaaatacaaaaattaactgggcgcagtggcgggtgcctgtaatcccagctactcaggaggctgaggcaggaggagaacttgaacccgggagacagaggttgcagtgagccgagattgcgccactgcactccagcctggggaatagagcaagactctctctcggaaaaaaaaaaaaaaaaggcaaaggcattcccgaaggagggcagggggaataagaaaagccaatcaagattctgaagaagggcccacgtggtggttcacgcctataatggaggctgaggtgggtgtatggcttgagcccaggggttccagaccagtctgagcaacatggtgaaacccgatctctatgaaaaataaaaaaattagccaggtgtggtggggcgtctccagtcctagctactgaggctgaggtgggaggatcacttgagcccctggaggcagaggttgcagcgagctaagatcgtgctactgtgctccagcctgggtgacagagtgagaccctgtcccaaaaaaaaaaaaaaagaatctgaaggagaggtacaaaggtgaaacccattctttttttactggggagaaatttcatggagaaaagtaggaaaaccacaaaaactttggttgtgatgttcaaaacataaaagagacttccaaccaggacatcttcccagtagttactgggaagatctcaagtcagacggagggaagccagtatcctggcagcatggtgtgttttcccagcttccttgaagaaggttgagagagctgtgagattgagtccaaaatggtgccactgggctaggaaatagatggtttattgagctttcttgtttgtccctggtgtggtgttagatactatgccacaggagacattagtatgggtggaagaccaaggaaggcgattgggtgttgagaacaacatatgggaaaaagggatacgggtctgcaaagtcaggaggaatcagggaggcactgcagaaaaggagtacccacggagacgggacgcatgatggatgtgccttaatgttgcctggaagatcatctctccttatttttaacacccatggaggtaacacactcaatcatgatccggccaggtgcgatgactcatgcccgtactcccagcactttgggaggccgaggtgggcagatcacctgaggtcaagagttcgacaccagcttggccaacatagtgaaaccccgtctctactgaaaatacaaaattatccaggtgtggtggcacatgcctgtaatcccagctgcttgggaggctgaggcatgagagttgcttgaacccaggaggcagaggttgtagtgagtggagattgtgccactgcactgcagcctgggtgacagagtgagactctgtctcaagacaacaataataaaaaaacatgatcgaagttaggctaatttaggtcttcctctaggactccatctcctctcaactctccactgactttcgttttgaaaagttttagattgaaaataaaaaaagcaaaggaaaatggggtaaatgggggatagaaaatgaggtcactgggaatggaatggggataaagtaaaacgaggagtggagatagcccccccaactttcaggtctctgtcttccaaggccttgaatgataactaggccttccttaccccttaaccaacaggagaaataggcacactgaaaaaatccaggaagctggagagggggaagaattcaccaagaatgagatggaaataactagaattgaacacttcccacacatggtatcaaggtaaatttctaggatgtcaggccagaagtcatcgtttccagggggctcagaccttccttgttctcacctggtcacctttttcccgctttcagaaaatgtgtaagaagcacatgcttcccccattcaactagtgggagaaattctcaattggactgtagagtaaggtaattctaggaataggcaagcctccacaaagcctcagaaatagttccacagagaaaagcaaacacaggccatttagcaccgttggccccagaggctctgaggctaacccctaggactgtcgggtggctttcagatcccactcactccacattcatcccaagtctcacttccagcttctttctcatgaagccaagacttcagaagactggtttgttgtccaaccagagagagatggctaaaggatgcttcatccaccaggaaaggaattcgatccaggcctccagctttctagatcttttccctggggtccctcggaccctagtgttcaagctcttagattctcaaggcactcccttgggctttggggcaggattcccattctctgcctctccatctctctggaattttccactgcagctgcctctgctcccagacacccctccctgggcaaaattcccggctccctccgcctccccttccctaatcacacctcattcccacccccagccctgaggcccagcccacagtccggcccacagcccacgctaaccctggtggtcccagttagagaagtgggaggccaggtcccttatggaagggtgagagggagtgtcccagcctctctttagggcggggagaagggacactggaggggctggtcccctgtggggctggagttgggggagtggccctcctcacatccccatataaggcagggcaagcagttaggcttctggattggctgattcaaatgagcattccacctggcaacagggtttctattggctatcaggaaaaataggaggaaggtggatggaggttgttggtggcggtgattggaggggggagaggagtggaggtgaccggagtggggggcggttaccagggcaacagggtaagagcccagcagggtgtccgagacagcaggcggggctgggaggtggagtggagggaagaggaaaggaaggcgggagggagaggaaagagcctgatggggagggagcgagactgggagactgggttgttggttgggcgggggggggagtagcaaaggatcgaggagagggagataaatgaagcaagaggagtacagagatggagacggtgagagacggctgaagacatcagccagtgagtcagagaaacagattgagagagggacatggaaagatctcagaaaagatggacagagtccggcaaggaaaaatcctgggtggggccccaagatttttgaggagactgagactgaaatattgatagaaaagtcagaaagagaaactgggaggcgtgtacatcaagggaccaaaagatggtgtatttaagcactcaaacacaaaataatgataatgatcatcaacgtagttttttattaataaaatgaaaataataagatgaggaataatgataatgacagacaaatatgggagtgcacgcacaccaaaggtctttttccaaaccccagccttccactctgtccaccttcctgacctttaatacacaacccagcccctgttcccttctgaaatcccaagcttttcaaaatgactcaaagataccgagattgagggcgaggagctgaggatgtgtggaatagggtggggctggaactccagacctggacctgtattatatttgcaaaggaggcaaatataacccagaaaggctagggaagatggcagcagaggaatgagaaaagctgaaggatggaaaatgtaaaaaatgaggacagaaagaggagttgaggaaagccagccaagaatagagggccaggtgcctgactcagataagacaagagcagggttgtctgggaaagatagggaaagagaccagaggtggaagggcagaagagagtcagtgaggagtggagaagaggtgagagaagaatgggagcgattcgagttataattggttgtgaaggaggggtctaggtacagatgactgaggacggatgaagagaaatagaaggaccaggcgaataaaagtgaggtgagacgggcgaataagagaggtagaagatggaagagagctggaagacagcaaaggagaccagggggcctgactccccccggctcacagcacggggccaggaagggaggcacccggcaagggtcacaagtgtcaatctggcgggacagaaggctgggccgccctttctgccctcccatccctcctcaaggccatccagagaatgtggatggaggatgagagggggaaatccggcgtggtgtggaaggagcgcccgaaccctcttcctcttctttaagcttttggtttctcaaatacctgccctatcttcccatctgctcccctcaccccaccccttggcaaaatcccagggctttttttggggtcagtaggattctggccacctctccagtccgcccccaaaagccagactccacattcgcaggcagtaggttgggatttggaaaggtgcctccccgcaggaaccccaccccttcccacctcctcgccccactctttctccgcggccgtcagtctctccatttccccctcctggtctcgtcctccctcccgactccctagctctccctcccctcgctttcatcctcctatccccacctctccaacctcctctttcatccccctcccctctcctctcctccccgctcccgcctgccccacccctgggaagcccctcccgtcgggcagcgccgccttataagcgggttcccttcccgggggcggcagcggctggtcggcggcagctctgctggtgcgggggcggcgagcccgggatcgagctaccgcggccgagcgcgccggccaccgcctgcaccgcccttccgcccgccctccggacggccgcagccctgcgggtctccgctccagacccacccccgccccaccccgcgcgcctctgccgcctcttccagagacccagcttgccgagcggccgccgctgccgctgtcgccgccgccgccgccaccgcgccaggttccggccgcggccaccctccgccgtccagggcccctccgtctcggccccgggaccccggctccccgccagccccggccccggccccggcaccatgtcggagaaaagcgtggaggcagcggccgagttgagcgccaaggtacgggcgggggcggcggcggcccggacctcgcgcagccctggggcccggcgcggtccttcgccccaggccgcccccgacggccccgcgcggcccttgcgcccgggtcctggcggaccccactgcgccctcccaccgctccccggcccggagctcctttcccggctccgcgcggctagcgccagcgccctctagctgccctgcgcgcaccacggcgcccggcctcgccgctccggtcgcgccgtcccccgcagccgtccccacccctcttcggccccacctcgctgaccggatcccgtccggcttcccgtccgaacgccccgagtctcactttgccgcgccccctccctgcgccccgctgccgcgtctttgcttgcaacctgacctcacctttcctcgctaagcggtttgagatcctcaagtgtaaacaggactctccctggaggctgctcctccgggcccctccccgcggcccgaccgtcgctcgcttctctccccggacggcggccgcctctgttttctcgttccctcccctcagctggctttcagctttcttttctcttcatcgtccccttcccgcatacacactgaaagaatctcgaattcctaaaaattagaagcggggcaggactagccttcgaaaaagccgaggctgggcattgcatggcattgcgtcgagctgtcctcgccctcatcagctcccttccccggccccatccgttcgcccttgcctctcttccagccttcctctaatttccccagggaacctgcggagtgtcgctttgggaaattaacgcggccggggtttgggggctgggagccctatc

SEQ ID NO: 1707 - DNA, 6000 bp, Homo sapiens
cccagacacccctccctgggcaaaattcccggctccctccgcctccccttccctaatcacacctcattcccacccccagccctgaggcccagcccacagtccggcccacagcccacgctaaccctggtggtcccagttagagaagtgggaggccaggtcccttatggaagggtgagagggagtgtcccagcctctctttagggcggggagaagggacactggaggggctggtcccctgtggggctggagttgggggagtggccctcctcacatccccatataaggcagggcaagcagttaggcttctggattggctgattcaaatgagcattccacctggcaacagggtttctattggctatcaggaaaaataggaggaaggtggatggaggttgttggtggcggtgattggaggggggagaggagtggaggtgaccggagtggggggcggttaccagggcaacagggtaagagcccagcagggtgtccgagacagcaggcggggctgggaggtggagtggagggaagaggaaaggaaggcgggagggagaggaaagagcctgatggggagggagcgagactgggagactgggttgttggttgggcgggggggggagtagcaaaggatcgaggagagggagataaatgaagcaagaggagtacagagatggagacggtgagagacggctgaagacatcagccagtgagtcagagaaacagattgagagagggacatggaaagatctcagaaaagatggacagagtccggcaaggaaaaatcctgggtggggccccaagatttttgaggagactgagactgaaatattgatagaaaagtcagaaagagaaactgggaggcgtgtacatcaagggaccaaaagatggtgtatttaagcactcaaacacaaaataatgataatgatcatcaacgtagttttttattaataaaatgaaaataataagatgaggaataatgataatgacagacaaatatgggagtgcacgcacaccaaaggtctttttccaaaccccagccttccactctgtccaccttcctgacctttaatacacaacccagcccctgttcccttctgaaatcccaagcttttcaaaatgactcaaagataccgagattgagggcgaggagctgaggatgtgtggaatagggtggggctggaactccagacctggacctgtattatatttgcaaaggaggcaaatataacccagaaaggctagggaagatggcagcagaggaatgagaaaagctgaaggatggaaaatgtaaaaaatgaggacagaaagaggagttgaggaaagccagccaagaatagagggccaggtgcctgactcagataagacaagagcagggttgtctgggaaagatagggaaagagaccagaggtggaagggcagaagagagtcagtgaggagtggagaagaggtgagagaagaatgggagcgattcgagttataattggttgtgaaggaggggtctaggtacagatgactgaggacggatgaagagaaatagaaggaccaggcgaataaaagtgaggtgagacgggcgaataagagaggtagaagatggaagagagctggaagacagcaaaggagaccagggggcctgactccccccggctcacagcacggggccaggaagggaggcacccggcaagggtcacaagtgtcaatctggcgggacagaaggctgggccgccctttctgccctcccatccctcctcaaggccatccagagaatgtggatggaggatgagagggggaaatccggcgtggtgtggaaggagcgcccgaaccctcttcctcttctttaagcttttggtttctcaaatacctgccctatcttcccatctgctcccctcaccccaccccttggcaaaatcccagggctttttttggggtcagtaggattctggccacctctccagtccgcccccaaaagccagactccacattcgcaggcagtaggttgggatttggaaaggtgcctccccgcaggaaccccaccccttcccacctcctcgccccactctttctccgcggccgtcagtctctccatttccccctcctggtctcgtcctccctcccgactccctagctctccctcccctcgctttcatcctcctatccccacctctccaacctcctctttcatccccctcccctctcctctcctccccgctcccgcctgccccacccctgggaagcccctcccgtcgggcagcgccgccttataagcgggttcccttcccgggggcggcagcggctggtcggcggcagctctgctggtgcgggggcggcgagcccgggatcgagctaccgcggccgagcgcgccggccaccgcctgcaccgcccttccgcccgccctccggacggccgcagccctgcgggtctccgctccagacccacccccgccccaccccgcgcgcctctgccgcctcttccagagacccagcttgccgagcggccgccgctgccgctgtcgccgccgccgccgccaccgcgccaggttccggccgcggccaccctccgccgtccagggcccctccgtctcggccccgggaccccggctccccgccagccccggccccggccccggcaccatgtcggagaaaagcgtggaggcagcggccgagttgagcgccaaggtacgggcgggggcggcggcggcccggacctcgcgcagccctggggcccggcgcggtccttcgccccaggccgcccccgacggccccgcgcggcccttgcgcccgggtcctggcggaccccactgcgccctcccaccgctccccggcccggagctcctttcccggctccgcgcggctagcgccagcgccctctagctgccctgcgcgcaccacggcgcccggcctcgccgctccggtcgcgccgtcccccgcagccgtccccacccctcttcggccccacctcgctgaccggatcccgtccggcttcccgtccgaacgccccgagtctcactttgccgcgccccctccctgcgccccgctgccgcgtctttgcttgcaacctgacctcacctttcctcgctaagcggtttgagatcctcaagtgtaaacaggactctccctggaggctgctcctccgggcccctccccgcggcccgaccgtcgctcgcttctctccccggacggcggccgcctctgttttctcgttccctcccctcagctggctttcagctttcttttctcttcatcgtccccttcccgcatacacactgaaagaatctcgaattcctaaaaattagaagcggggcaggactagccttcgaaaaagccgaggctgggcattgcatggcattgcgtcgagctgtcctcgccctcatcagctcccttccccggccccatccgttcgcccttgcctctcttccagccttcctctaatttccccagggaacctgcggagtgtcgctttgggaaattaacgcggccggggtttgggggctgggagccctatcttgtgtgtgtatgtgtatggcggggggggggggcgcggtggttgctgaggggccgtcacacaggtctcccggaggcccgcggagtgaaacggggggagccaatgggattaacggcggtgggagaggggctgtgtgcgatctgccaaggtgcgcccgtgtggccctccggcgggctgtgcggtggcatgtgacttcactgagtaggtgtctttgtatgtctgaaatccagcgagtgtgtgggactgcccgtgtcagttacatgtgtgcatgtggagacgtagatgttctggagccatgttgtcgctttgtgagtgctgagtggctccgctgtgctcccgtgctgtctcaagagtgtggaccagaatggcccaacgctgggccatgtgtctcccatcgcgtgggtgctcctctctaactgtgtctgtgcatggctgtcggccggtgtcggtgtgtgtgcctgtgttgagtaaatgaggccagagggctgcttagcagaagacctagggcccaggtcacatattctcctggaaaagggatcatggaaggacagtgaccagaaggacagaacaggggaggagagggcccggccccttgaactttggtctctggtattctccctccctgcatcagcccagatgggaaagtcaggccagggccatacagacttttggtgctggggcccccagagagaagctgaccagctctttgctctcctggcccaggacgtagggaagagccccctaggtagtggaaatgccatactgaccttgtggcacagaaatgaagacctcacggtggggtggaagggcaccctctctggagtgagagtgaagagttctgagctacccttaaagggagaagggaattgagtgccccccagggcagccgttctgcaccaggctcctctcctatcccctatcctgttccagaaaggacccccccgcccagggtgatctcacacaggagacttccattcacatggaatcagatacacagcgtggcacaccaacaccagatcagatcacacaaggacacctaccgtgttacactgtgcctgccaaggagtgggtggggagagcactggaatctgaattgggaggctagtgtagtgtccagaagggactcagatgtgccatatcagcacaggacgtcaacctatgcctgctaggatcttggggtgaaggagaggggctggctggtgggagggtctcctagactggtccctccctcttctccattcctatcccaccccagtcacagaccttgtttgttgctctctccttgtttcccacgcctgctactcttcccctccttgttttctcttctacttcacctacatttccaccgtaaatggctacttccactacacccatgcatacaccatgggaggcagggatagaggaaactacttgaactgttttggggcggggagggcagaaagtgggaggggtgctgggaatgtgctaaggtgtagtgtttggccaagtaggggcctgaggattagggagacacagatggagagaaacaaagaccttagaagctgaaggggaagctgggagggatgcccaggagagagagtcctcaggaaaaggccccagaggtagacaaaaggcagagctgggcgggcagtggcggggcaggcaagggaggcggagggacacaggagggggcggggcactgaggctgcaagcagatggagaggatttgctttgctgagctgaactcttcagccagtgaggtttgggagaacttgatgggggtggggatcattaccctggttgcccgctcctgcttcttcatccctttcccacctcaccttgggtcttggggaaggaggtgtttggtctcaaccccttcatggccctaatgtaaggaccctagggcccctattctgtctctaagctgtggccaccttattcagttcacacacctctaagctcactacagagggagaactggggctgcagggacttaggggctgcaagccatttgtggtgagaaaggtgacctctttctcctttgcaggacctgaaggagaagaaggagaaggtggaggagaaggcaagccggaaagagcgaaagaaagaagtggtggaggtgtggaggggtgggggagaggaccacatctgccctaccatcttccctcccaatcatctcatccttcctctgctttccttccgagggtgctgggtcctgccgttcccctgagccctgtcacccttgctgccccaccctgtggcccatcccaagcccttttatcacccaggctccagtcccattggtggtgatggtgggcaaggcatgcagccagcctgaggctactccctctcctggtccccacaggaggaggagaacggggctgaggaggaagaagaagaaactgccgaggatggagaggaggaagatgaaggggaagaagaaggtggggaggggcaggggaggctgggctggcaaagtctgggctcaaaggagagcagagtcagggtgggtttgaagacctgaa

SEQ ID NO: 1708 - DNA, 6000 bp, Homo sapiens
cttattcttcaagatctgactcatatatcacttcttccatgaggccttcctctttctccttgctttgtacttcatagcatcatgtttttctatgtattgctttctacctctagtttatttatttgagacaatgtcttgctctatcacccaggctggagtgcaatggcatgatcatagctcactgcagcctcgacctgggctcaagtgatcctcccacctctgctttctgagttgctggggctacaggtgcaggccaccaggcctggttccaacctctagtttttgtgcacatggtatatactccccacaggcaaggactctgacaaatatttcttcacttcccacattgctgagaataatgccttggacaataccttacacatggtattgatcactgcttaaaacctcctaatgccccaatggctttccatatcgccaggccaataataaaagccctacctatgcctacctggtcctatctgatctgatgcgctttttttttttttttttttttttaagacagagtctcactctgtctctcccgggctggagtgcagtggcacgatcttggctcactataacctccgcctcccaggttcaagcaattctcctgcctcagccttccgactagctgggatcacaggcgtgtgccaccatgtccagctaatttttgtattattagtagagacagggtttcaccatgttggccaggctggtcttgaactcctgacctcaagtgatccacccaccttggccttccaaagtgctaggattataggcgtgagcaccgtgcccagccctgatgctcctgttaccactccccacttgctccgccctatccaccatgggcccccctgctgttccttgaacacattaggcaagatcccacctcagagacacttcatttgctctttccccagatagctgtatggctgctctctcatgtcttcagggcttctctcaaaggccaccttttttgtgtgtgtgagatggagtctcactctgtcttccaggctggtgtgcagtggcaagatcttggctcactgcaacctccgcctcctgtgttcaagtcattatcctgcctcagcctcctgagtagctgggattacaggcctgcactaccatgcccagctaatgtttgtatttgtagtagagatgagtttcatcatgttggccaggctggtcttgaactcctgacatcaagtgatccacctgcctctgcctcccaaagtgctgggattacaggtgtgagccactgcacctggcctcaaaggccactttctccatgaggccttccctgaccacttattcacattgtgatccttgaaacacttccttttccctctccgcttattgtttctccatagcatttttcacctccttacatagtatgtacttctttcatgtgctgtgttcattttctgtctcctctcccctttttggaatgtcagcatcattctagtttaaatctgtttgtttacttctgtgttcccagagcctaaggataatgtctggcatagaggaggcactcaataaatatttgttgaaagaaagaaggaataagcaaattaatagaaggtgctccgtaaatatttgtgaaattgaattaaaagtgtcagaaggagatgactgtgaaattcccaaagtctaaaaatatgtgagcttagaagaatggtggagttgagtgctgcctcattataaacatcctcgaggaaggactgaaactgtgtgcttgcggtgggaggggcagctgggcaaggaaccgtgaaccttcgcagaaacatttggggctgcagaacttgggtgagagcgctgcatctgggagctggcgacgctggcggcttgctcattcaccccatctgaacacttgtctatgacacaggtgttttctcttaagttattttggtctttgcctctctcctcaggttgtgaagattacagaaatctgggatggcttatgggacgcttctcagccctaagtaggaaaacagcagtgaaaatggcaaccaaaacatcacgcaggactgggggttttggggaaacagctcactttagagcagtgcagtgtagagctttccgtcttttaccagggtccacctttaacactgtttatctgaaaattttccccctggcttactcgcttgcagctgcccactttgcagaaggatggcgctctgatctctacgctccctgttccttcagggactccatagtattttttttcacgcgtcgtcgctactacagcagacgcctgcgttctcattatttgctgtacagatctccggtgccttgactgtaaacaaaacactttagatcattgtgaggtcgatgtaagcacagcctttctgctggcagccagacttcttaaggtggtgtgactgtgacttgcttacttttcgagatcaacaacaacaaagcgacaaaatggtgctcctacatattagttgaaagattcagcatgtgaaggggatcgaagtgtttattttccacttccatataagacatgaattccatgagtaaaatcaaacttctgtggcaaggtgaactactctagaatgtctccatttacatacatgtggtagtttgggtgtttatgcatatggatagatgcacatatatagagttcctgtgttgtctagcaattgttttaaaatttggacaattatctaatttctagggtaaggtataaattatggtagggaggcctaccctaattttcctgttccttttcccccagtctgcagtccaataaattgacagccttaaaagtagaaaaactaaagaggatgagacctcttgcttgatcctaggtgaattcttttctgtcagttaggtaggaagtcctgacttgaaaactagttctgggcactgccccctttactgttctctgggtatcaacccctgtccttcaattttagttgaactagtggatggtgataccacaggctcaagacagctgcatttaaatatcagtgaccacaggccacatcaaggaaacatctgcaggcaacccagggcctgggaaggagccattttcagtcacttgtaagacagcaggacctgcagactacagcacaatcaaactcagacaaaaccctgaaccagtgagaaccattaggaaggaaaggaacagaaaatgaaccaacctgagtgttaggagacttgcatctagtcctgactccggtaccaaccgaatgcatgtccctggacaggaaacctctctgagtctcgatttcctccgtggtaaaaaggagagggttaaaccacagggtcccgagggtcccttccagctgtcacattctggagcgtatgagatgaggtaggcacacaaagtggacaagatgtggctaagaaaacaagctacacatcaagctcatctgtagcataggtgcttaagaaaactttgctgctgtgtaatattagaacggaaggttggtttccagtaaaatgcattaactttggctcaaaccaagatgatgggtaccgggcatgggggtggggaggcagttgaagatccactgagctttgtctcagggcagccctgctcatcgtcctactttaccttccaccacggtgctcaagcccacactgagagagaaatttccagctgcaaaagggagaagagaaacgctggaatactagtatcggacgttaggacatggttgtggtgttttaaaaatcatttcatcatctggagtttgaccccgaggggagtattttcacccttcagccctctgaaagcattcactagcatctgaatattgttctgagtttgttggagcagtgaaatctggtgagagagaagggtggaggaaggaaggagctgttgtatttggcggctggactcaggtagaggaaactgctacaatcccgggaaagaacagaaaagtagaaagggacgagttcccacacgcagccaatgtccatggccttaactgtgcttgggaaggaagatcctgggccaggggtgtaccctcgtttttcaaaactaaacgtgtctgagacagctacaaagtttattaagggacttgagagactagagttttttgttttttttttttaatcttgagttcctttcttattttcattgagggagagcttgagttcatgataagtgccgcgtctactcctggctaatttctaaaagaaagacgttcgctttggcttcttccctaggcccccagcctccccagggatggcagaaacttctgggttaaggctgagcgaaccattgcccactgcctccaccagcccccagcaaaggcacgccggcgggggggcgcccagcccccccagcaaacgctccgcggcctcccccgcagaccacgaggtgggggccgctggggagggccgagctgggggcagctcgccaccccggctcctagcgagctgccggcgaccttcgcggtcctctggtccaggtcccggcttcccgggcgaggagcgggagggaggtcggggcttaggcgccgcggcgaacccgccaacgcagcgccgggccccgaacctcaggccccgccccaggttcccggccgtttggctagtttgtttgtcttaattttaatttctccgaggccagccagagcaggtttgttggcagcagtacccctccagcagtcacgcgaccagccaatctcccggcggcgctcggggaggcggcgcgctcgggaacgaggggaggtggcggaaccgcgccggggccaccttaaggccgcgctcgccagcctcggcggggcggctcccgccgccgcaaccaatggatctcctcctctgtttaaatagactcgccgtgtcaatcattttcttcttcgtcagcctcccttccaccgccatattgggccactaaaaaaagggggctcgtcttttcggggtgtttttctccccctcccctgtccccgcttgctcacggctctgcgactccgacgccggcaaggtttggagagcggctgggttcgcgggacccgcgggcttgcacccgcccagactcggacgggctttgccaccctctccgcttgcctggtcccctctcctctccgccctcccgctcgccagtccatttgatcagcggagactcggcggccgggccggggcttccccgcagcccctgcgcgctcctagagctcgggccgtggctcgtcggggtctgtgtcttttggctccgagggcagtcgctgggcttccgagaggggttcgggctgcgtaggggcgctttgttttgttcggttttgtttttttgagagtgcgagagaggcggtcgtgcagacccgggagaaagatgtcaaacgtgcgagtgtctaacgggagccctagcctggagcggatggacgccaggcaggcggagcaccccaagccctcggcctgcaggaacctcttcggcccggtggaccacgaagagttaacccgggacttggagaagcactgcagagacatggaagaggcgagccagcgcaagtggaatttcgattttcagaatcacaaacccctagagggcaagtacgagtggcaagaggtggagaagggcagcttgcccgagttctactacagacccccgcggccccccaaaggtgcctgcaaggtgccggcgcaggagagccaggatgtcagcgggagccgcccggcggcgcctttaattggggctccggctaactctgaggacacgcatttggtggacccaaagactgatccgtcggacagccagacggggttagcggagcaatgcgcaggaataaggaagcgacctgcaaccgacggtaatgaccctttcccaaccatagaatgtgtttggggccccgctttgcctgctggagggtgttaaccttagcttgcttttcggcgtattctgatttagctttgggagagctaactttattggtcttaggtgttcagtgctacctggcccactgcttgtctgtttgtgacttttaagtcagaaactggagatggtaagatccgataatttccctaacttaatacatcgcggtccctctcactagcaactcc

SEQ ID NO: 1709 - DNA, 6000 bp, Homo sapiens
gtcacagtcattaagcaagttaactcaatgagaaatgataatgaaaaggcatgtacctaaatagataaaggacctataccagctatgaatttgagttcagcaataattgtaaaatttgtaattcttttcaggtatttggtttttaaaaaactccctatgtatgcttttatcttatgttttatatggtgtccctcttttcctctctttctctctaatccagtttttaatgtgaacatgtttaatgtgaaaatgttgttcaaagcagaagcgaaccttttgtgtaaccttggcggtattaagtttgtttgtaagctatttctgccctgttagcttctgtactgaaacacgttttcttgcttttgttgcagtatggaagagaagagagcgactggacaattgtgctatcctgaatggaaaatagaggatacaatggaaaatagaggataccaactgtatgctactgggacagactgttgcatttgaattgtgatagatttctttggctacctgtgcataatgtagtttgtagtatcaatgtgttacaagagtgattgtttcttcatgccagagaaaatgaattgcaatcatcaaatggtgtttcataacttggtagtagtaacttaccttaccttacctagaaaaacattaatgtaagccatataacatgggattttcctcaatgattttagtgcctccttttgtacttcactcagatactaaatagtagtttattctttaatataagttacattctgctcctcaaacaaatgcaattttttgtgtgtgtttgaaagctaatttgagaaaatttcataggttacatttcctgcagcctatctttatccacagaaagtgttttcttttttttaaatcaagacttttaaaactggatttcctcccatcactgttttttgaaggtcctccaagtccgtgttaaggtaaatatctgttttcttcctgatgtcacagcctgagcatactctgtgcattaggaagacctgagtgcatttcccaccattgtcctttccacattatgttgtagctggctggctgtcaggcgactacaagactgagggtcttgtgccttatagatctttgtatcccccatggctgacatatagtaggtactcagtaaatggttttataatgaatcagtgaacattttgcttctatagaagtgtaccttctttgtttctatattatgaaacctctttattagaatttgtgattgattctgacagtgtatagatttaccttatattgtctttattttccatgagctactaagtcattagagatactctgaagcatagttagtttaggaaatcacttcatattgattgtattagaattatcttggaattgaagatatatccctagagcaggggaccccaacccccaggccatgggccacacagcaggaagaggtgagtggtgggccattgaggagcttcatctgtatttatggctacttcccatcactcgaattaccacctgaactccacctcttgtcagctcagtggcagcattagattctcataggagcacaaatcctattgtgaactctgcatgcaagggatctaggctatgcgctccttatgagaatctaatgcttgatgacctgaggtgtaacagtttcatcctgaaaccacccttcaccctgcagtctgtggaaaaattgtcttccacaaaactggtccctggtgccaaaaatgttggggaccactgctctagagagaggtcatgatatcataccaaccaaatggaaatgacaaatgttttatgtcaagtgttaattgcagaaataaatcttttttttttttttttggtagaaaacaaagaggcatactctgatttttatactctgtttttgcaggtgctcttttctttgaatggagatttgatgagcaagtggttaggatgcagggagagctactatgggtgatattttccttgtttaggagctgtgagttaaaattgtatcctttgtggtttatctaaggaaagtcaaatcttgacagaaaacatttttccttggaaggtcaactctcagacattgtattttggtttccctcagtcctcataacttccttcttgctgaacatattttattctcttttcagagaaggaaaataaaaaggattctaaaagtttgatgcattggaaaaatttccttgaggcatttagcaacacatagaaaatgggctttgattcttttccaaaacttttagccatagggtcttttatagacagggatagtaaaatgaaaattgagaaatataagatgaaaaggaatgataaaaatatcttttagggggcttttaattggtgatctgaaatcttgggagaagctgttcttttcaggcctgaggtgctcttgactgtcgcctgcgcactgtgtaccccgagcaacattctaagggtgtgctttcgccttggctaactcctttgacctcattcttcatatagtagtctaggaaaaagttgcaggtaatttaaactgtctagtggtacatagtaactaaatttctattcctatgagaaatgagaattatttatttgccatcaacacattttatactttgcatctccaaatttattgtggcgagacttgtccattgtgaaagttagagaacattatgtttgtatcatttctttcataaaacctcaagagcatttttaagcccttttcatcagacccagtgaaaactaaggatagatgtttaaaaactggaggtctcctgataaggagaacacaatccaccattgtcatttaagtaataagacaggaaattgaccttgacgctttcttgttaaatagatttaacaggaacatctgcacatcttttttccttgtgcactatttgtttaattgcagtggattaatacagcaagagtgccacattataactaggcaattatccattcttcaagacttagttattgtcacactaattgatcgtttaaggcataagatggtctagcattaggaacatgtgaagctaatctgctcaaaaagatcaacaaattaatattgttgctgatatttgcataattggctgcaattatttaatgtttaattgggttgatcaaatgagattcagcaattcacaagtgcattaatataaacagaactggtggcacttaaaatgataatgattaacttatattgcatgttctcttcctttcacttttttcagtttctacatttcagaccgagcttgtcagcttttttgaaaacacatcagtagaaaccaagattttaaaatgaagtgtcaagacaaaggcaaaacctgagcagttcctaaaaagatttgctgttagaaattttctttgtggcagtcatttattaaggattcaactcgtgatacaccaaaagaagagttgacttcagagatgtgttccatgctctctagcacaggaatgaataaatttataacacctgctttagcctttgttttcaaaagcacaaaggaaaagtgaaagggaaagagaaacaagtgactgagaagtcttgttaaggaatcaggttttttctacctggtaaacattctctattcttttctcaaaagattgctgtaagaaaaaatgtaagacaaaaaaaaaaaaaaaaaacaaacagaggcagaggcaggcagtagcaagaaagcagagcgtaacatcagctagatggtaacatgcaatgtcagctctcttgaagacatgggaaacctaagttacaccttgggttaaaattcttcaccatattagttttgttgcttcataaaatttacctaagcaagtggtcttgcttgcctcaaatccaagcagtcttgaacacttggaggcaattaatgagtatatcttagtcaaaagaattgttggagctttttattaaagctacagtttcagttctgcttttggggaattgtgctatgaaagcagctgccaaaataagctcatttattttcttcaatcccactcagtgctcagtcactatattctgtttcctttttttttttcaagttgcatatttggtttccccttatgattgggaaagatgaattttcagcagaaaacattgtttgttcactttcaaagagtgatagtttctaaaacatttagagcaataaatattcatcagaggtaccaagtaagccggcagaagagttaagggttagagaaatcccttatttcatgtcttgactctaaaattatcaaagtacttttccttgtaatgtggatttcttcttatgcggatatgcaaaaacttcagttatacgtagtaatgctagcaggtaattttagtagacattttataacaactgtcactttgtttcgccacatgtagagtttgttcagctattttccagatatctccccacaaaaggaggcaaagggtaccagcttttcaatgagcattacctattacttggcaaagatgatgaagactctattaatagttcatttgataaatgttgacataaccaacaatagagattaggaagttagttttaagaaatcaatggcatatagacattaccctcatggagtttgtattctactacttgaactgattgtagctataaaagcatagttagatagctgaatagttagatcataagcaaagaaggccagaacacatctcttatcaagaaatcaatgaatagtttatctcatttttaaagcaactttatccttctttaattccttcctttcttctagtgcaaaactacttaataaggttggtgtttaggttagtgttcacaccattcctcatctggtgtgaattaccttctctttctttactatttactaccaacctagtacatgtgttgactgaattcttttcaaacaatgttgagttatcatggtgcacctaataaattaacaccacagattacagcatccttgctgattttctcagcaaagccagattagatggaaataaacaaagaaaatgatcctagagtgaatttttctagaaaatatctattatgaaccatgctgtttaaagtattagcttgaaggtgatggatccagctattcagaaaataactttcatataaccatgattttgcacagtatgaggtcttaaatgtgtggaaagagataaattttttatcattaccacaaaccccttttaaagattcaaaggtggaagaaagtgatttattttttctcttcagcatacatatataaaagacttgtcagatgtttaatttggggaggttgataatgaaacatatcaacagagtatagtagttatagtagtgtttgtgggtaaataatttcctggggtcagacatatataaacatatttgcttcaaaatgataaaggcatgaaatcagtcttaaaaattgaaatgggggtgatgggggagaaaaagaagaacaaatttgaagtgccctttcaaatctgctggatacaagtattgaagttttaagtcatcttattctgtctgaaagtgtatttttcattctacaatagacccaatcaacaagacgtataacttgagttgcatgatgttcagtttatgtaatctactgttgggatggtaagaattgatgtaggctgtggtgtaagaatgaattaaaatatagtttcactggcttttctctacatatccactatcacaatggctaggtttcctgttgctcactattggattctggagaaaaatttaatgaaagatgatatcagaggaagaataagtggaggtagagaagaaaggaatgatagaggaggggaaaaaaacaaaacatatttttgtgttatccaaaggagctttttccttattctgtcaagcattgagatcttcttcagctttcaatgtagttgctaaatacaaataatgctactaggtagtgactaaatatagcaaacacttcatcagatattagaattaggtcacactattgaggttataatctgaaggttgtgttacatagaaaccactttagattattatcaacttggactaggctttattttataatagcatagtaagtaatatctat

SEQ ID NO: 1710 - DNA, 6000 bp, Homo sapiens
tgcatcatgttttacatttcattacttttggcatgacatgggagcatggatgttttctacaaagtgctctgataaattgaagaagaggccaacaacagccaccgaaaaaaccttcaagattcttgccagtatggctcaggggaaaaattccctcataaccacagatttgacttttcaacttctgtacttctgcatatgagtaataatctctgaggttaagtattcatcccatttagctaattgtccacataactccctgggtcttagattgctctataaatacctcctaagagaagaatttttcaaatgacagtttcgtttttcctttttcttcttttaaagcaacaaagaaaagcacgtctgtgtttatatttaaccaaacttaaacttggagagcattggccgtgttgtcgacgtgtttcttttctctactgttaaattccttactgttccagttactcaccatcatactcacctttgcctctgccacttggggtcctctgttctgcagttgtgttctgctctctgatgcctccaggttttgctgcaccttctagaaattgctcacctggataaggccttggctgtcctttatgactcatctcgttcagaagccttttgaatctctcttgaagaatattccctttgctcagtccaaatacacattcactcacttgaatgctgcttcttcctccagtttcacagtgctggggatgatcccgtaaggcctttaaattacattataattagtcatgcacttctctctgctctggggctgtttgaatcgttcactctctttatacctccagtgttcagcacagagcctagggtataatgcgtatgcagtaatgtttcttgaaggagtgaatgggcaagtgaaacaccaaacaaatactaaagagcaaaacatgtattgctcttgtatattaacacattccgagaagagatgggaggaaggtcttgaataatatcaaattatttcttaagagatcttgatttagatttttttcaaaatgagatacatgttgacactgctgtcaacaaataatcacataaaagctagagcctggcttttaagtatcagggggagcatgtgtgaataatcagcattgctgctgttgaagctccataaagtgggaagcagcgactgcaaagatccagagatggacatctgaagcataggaaaggggcagcttgaatgagataggagcaggatctgtattgattgcaggtcaccagatagaattaaaaaaatctatgttctcactagtggctacagttttcaaggacaaatgactattagtggttattgtatttttcttgttttcaatggagcagctccatgacttagttacataagaagttaaaggctccacccccttccctaccaatgtcttaagctgtcctccgtgtgcatacaaactttgtttccagactgccctcgtgtgactcagtccctggaccagcttcccagccccttctgtttccagcacatcctcctccacgtgttacaggattacaaagctttgcacagcctttcaatagggtttagagcaagaatgacagattgctacctggtaggcagcactgactatagttttattggcgttgcgtagagtgactgcatgacatgcaggttgtgcttttgttttgccaggaatttaaaggcatttagcaaagccgtatgaaattatctgccttatgtacctcgaatgtgaggtaatgaacttgtcattagtcgtgttttagtttagtgttctcgctggaatttgcaaaagattaaaattctgcacatttcattaagtcttccacatgggctcaaaataccatcccgcaggctcgacctgacttgccacgttgctttgacaccatctctgattccagtgaacaaaactaagtaagtgtgacttacagccgccctaccaaacattgaaggtgtgagcctgcactgttgttttgtaatgacaatgacaagagtataatgacaagagtataatgacatcctagtccatgaagacatgttttctcttttccctccctctatgtatacttacttactcttaaggaaataatataatttctatttctgcttaaatctgccatctctacttagaattattttcccttgaaaaattaaattgcattatccatcagccaaatggaaaatctgattactaaatgcctacttctagacattatgaattacctgtaatatcacatttcttgggcacttctcagaatgctatgattttacataaaagcataaattacagaatgagaagagtaaagcttagtgcatattatgcaggttcgcagagtgatatgtggcctacgactgtcattgtaatcaaaattgatttttgatcatttataaaactaaaacaactaattgaaagcaaatttactttaactgatgaaattcaagatgaagtgacagtagtcatgaatcacagttctgtagatctgctaaaatgccaatgaactgttattaatggtgaaagtgtttaatatattaatgggaatccaagtaaggaaaataaaacacatattttgcccttaccttaagtcatgttgacatcatacataaatcaggtagaatttgaagatgtttcatccagcattcatcatgaagcaacagagtcaatagcgggcagttacagtctgtaggcaatgctttctggtgtggattatgcaagaaacttacagtcatttggcttcctttattcccctttgcatgtaaactaccaggtggtaggtagacccattcttggctgccagtatttttaccacttggatagattctgctctctgaggtctttaagacaaacacagcacatgtacattgtgatataggagaaagaacatcagacagaggcagagaactgggcttgtcaaaattaagggtgacctagagccttagtgtccttatatgtaagatgagaagcttggattaaaattcattgctccttacacttgatttttatgcagcagaactttcttcaaaagagatcactcctggaatcccaatatacaaaatggataaaagtaggattgttctgaagtaaagaagtaaaatccagagccccacttatttgagtcatctcctaccttttagatggttattaacattgtttctagttcagaaattctgatgttttatattaatttaaactaaagttaaattaggactagaagagccatttcgtgtgaaaatagacatagtctgagtgatttaggcaaacccatagtgacagatttagtggcctgatacactggcttggaaagatctgttccaagtcagtctcaatacacaaggctcggtgaacacatggcgagcagtcttggtggtggtcaagaacatggaatttgctgtgagagagagcttggttagggtctgggctcttccatctgttaactgcaaacttgagcaagttattcaatctccctaatattcagttttctcattcataaaatggattgataatggtaccttctatgtacagttactgtgggtattaaatgaggtaataagcctgtaaaactcctggcatgatgacattggcctacattaattgctcacagagtgagaacttattataaacacaggcatttttgttgaatgactgactgattgaatgaatgaatatagaactagctttctatttgtgatgtatggaatatctctatttcatttaatttcattttgaatattaaaattcaggcttgcttttaaaccaaagtatttgctgatgcaaagaatgaaattctgactatgatacagttacataacttttgaagaaataagaaaaatgctaacacagcatgaacaactttgatttagagaacagagtctctgttaaaatccatgggacttgtcaacttcatatttttgtttatgagcataaaacactctttagtgcatgtcggaatcatttgatgcttgctgaatcacaggttgctggaacccatccccagattctgattcagtctgagatgaggtctgggaatttgcatttttaacttgttgtctggtgatgctgatgctagtggtctgagaatacactttgaggatcactttttcacagtaaaagtcacagtcattaagcaagttaactcaatgagaaatgataatgaaaaggcatgtacctaaatagataaaggacctataccagctatgaatttgagttcagcaataattgtaaaatttgtaattcttttcaggtatttggtttttaaaaaactccctatgtatgcttttatcttatgttttatatggtgtccctcttttcctctctttctctctaatccagtttttaatgtgaacatgtttaatgtgaaaatgttgttcaaagcagaagcgaaccttttgtgtaaccttggcggtattaagtttgtttgtaagctatttctgccctgttagcttctgtactgaaacacgttttcttgcttttgttgcagtatggaagagaagagagcgactggacaattgtgctatcctgaatggaaaatagaggatacaatggaaaatagaggataccaactgtatgctactgggacagactgttgcatttgaattgtgatagatttctttggctacctgtgcataatgtagtttgtagtatcaatgtgttacaagagtgattgtttcttcatgccagagaaaatgaattgcaatcatcaaatggtgtttcataacttggtagtagtaacttaccttaccttacctagaaaaacattaatgtaagccatataacatgggattttcctcaatgattttagtgcctccttttgtacttcactcagatactaaatagtagtttattctttaatataagttacattctgctcctcaaacaaatgcaattttttgtgtgtgtttgaaagctaatttgagaaaatttcataggttacatttcctgcagcctatctttatccacagaaagtgttttcttttttttaaatcaagacttttaaaactggatttcctcccatcactgttttttgaaggtcctccaagtccgtgttaaggtaaatatctgttttcttcctgatgtcacagcctgagcatactctgtgcattaggaagacctgagtgcatttcccaccattgtcctttccacattatgttgtagctggctggctgtcaggcgactacaagactgagggtcttgtgccttatagatctttgtatcccccatggctgacatatagtaggtactcagtaaatggttttataatgaatcagtgaacattttgcttctatagaagtgtaccttctttgtttctatattatgaaacctctttattagaatttgtgattgattctgacagtgtatagatttaccttatattgtctttattttccatgagctactaagtcattagagatactctgaagcatagttagtttaggaaatcacttcatattgattgtattagaattatcttggaattgaagatatatccctagagcaggggaccccaacccccaggccatgggccacacagcaggaagaggtgagtggtgggccattgaggagcttcatctgtatttatggctacttcccatcactcgaattaccacctgaactccacctcttgtcagctcagtggcagcattagattctcataggagcacaaatcctattgtgaactctgcatgcaagggatctaggctatgcgctccttatgagaatctaatgcttgatgacctgaggtgtaacagtttcatcctgaaaccacccttcaccctgcagtctgtggaaaaattgtcttccacaaaactggtccctggtgccaaaaatgttggggaccactgctctagagagaggtcatgatatcataccaaccaaatggaaatgacaaatgttttatgtcaagtgttaattgcagaaataaatcttttttttttttttttggtagaaaacaaagaggcatactctgatttttatactctgtttttgcaggtgctcttttctttgaatggagatttgatgagca

SEQ ID NO: 1711 - DNA, 6000 bp, Homo sapiens
aaggaaggatgacagtgcctggcaaaggcagggaatgttacaggtatttgggcacctgtgagaaggcctgatgtccgaaaggactgaaataaattaaatgtgtggggggagagagaaagaaagagcctagcaaaaggtgagctggagagtcagaggcagaaggcagaatctgggatgggctgggagcttgccaatcattttgtcaaatgggtgatgtgaagccttgaaggttttttgaccaagaggagatgtcttcagatttgcgtttgagacattttcactggttgtcatgctaagaatggcttaaagagaagcaaggctggggtcagaggagctgcttggaagctgtttggtactaggatgcggataacatggttggagaaatggcaactgtcagggtatttggagcaagaatggatagacattggtgatcatcacttggatgcatttgagggacaactgctatgtttctactagagcaactacatagagcaggagtaagcaacttacagtccacagaccacatttgctctgtcccgtttttcaaatacagtttaatggaaacagagccatgcccgttctttcacctattctgcatggctgacatcaggcatggttctaagtaatatacataagtttcatatattaatgctcatctatcccagttgacaaacatgaagtgttgctattgtctcattttacagcggagaaaactgacatagagattctctttcgcacccatagcttcagttaccacctctatgccaatgattcaataatacctctaatccagacctcttctctgagcttcagacaggcagatctctcacagccagtcttggagacacttcagaaatcataggtcccaaaccagactcctcctcatcccctcaaacacattctttttcaacattccttttttcttagtgaacatcaccaaatagataagcaagtcagatccaaggaggcctccttggcacttctctcatccttgtcccaccttatatcatctatttttctttttctttttttttgagatggtgtctcactgtgtcacccaggcaagtgcagtggtgtgatcctggcccactgcagcctcaacctcaccaagttcaggtaatcctctcaccttaatcccgtgagtagctgggactacaggcacatgccaccgagcccggctaatttttgtatttttaccagagacagggttttgccatgttgcccaggctgccaccttatctccattcttgctgaaatctggctgtttctctccacttctattaccaaccaccagccaaatctgacttattaaaaggatcatctcgtatgtgggttctgtaatagcttcttcaaaatccattcctctccacccagaccctcttccaatctccaaactgcagccaataccttcaattctgtcaccgctcctgcatactccacctaatccttaacctttcaatggtttctcttgcccctaggttaagctaaattgaaaactgctaaagctacagcttcttagtgtaactagtaagtacagtgactactatgtctggtttacttcagctgttgctgactaatagcacttcttgaatgaagaaattatattaccgtactgtagggaaaaatttgtacttcaatggaaaactgaattatttagagcaaacctttaaggttatctgattctgattccatgggccctttcattgggtcttacattgtttcattgtttttgagttattttacagatgactgatagaaatgcaaaataattattgcatgcagtcatgcaagtaaaatctgaaggtcagggttcaattaacttctctcccctactgtggaagaagccaatttcatttgcatattcatttcaatatttctgacctataaacatgcctgttctttgaaccagtttttatatctgcctggtaacttcattaaatgatttaaataaactctataatttagtttattttatacctgtatgacagtcaggcttttaccttatttttgctttttaaaattattctttagctctccctaaggcactacttggctggccctttggctactcactagcccaagctccatcctcttctgtctaccgcagccccaggctctcttttggccctttgttccagccctcctcagagaagttcttttgtcctggaactcactttcataccaggtgctcttcatcccttcttcctttagtaaatttctttaatctttcagatttctgctcaaggatcacttgctgaaagcctttccaggcctttctgagtcaatacaatccattattagaggctcttagagcacaggcagcacttgttataattttacatctgtctgtgggattccttaacactttctaacacaattaacacttttctctctggctgggggcaatgcatgataacaggatgatggtatgctctcaaccctcccccagcaactagcccagtgcttcgaacatggtggatagatacaccgtttttattttagacagatttttgagtagcaagtacctactgctcaggagacagatggactgaaaaaatatatttgggagtcatcagcacataggtgcagccatgaaaatgcacgagaagcaaaaccattggcaggaacaaaatgaaggctattagagaccttatttaggtggaataattggacagaagcccttaatggggaggaaatagaagcagttaatacagatggaggccgggcgccgtggctcacgcctgtaatcctagcactttgggaggctgagataggtgggtggcttgagtccaggagtttgagagcagcctgggcaacatagcaaaacccggtctctacaaaaaatacaaaaattagcccggcgtggtggcgcaggcctgtagtcccggctactggggaggctgagatgggagaattgcttgaaccggggaggcggatgttgcaattagacgagatcgcgccactgcactccagcctgggcgacagagcgagactccgtctcaaaacaacaaggacaaaacttatcttataagcgaccctggacttccagggacactcgccgctctatggtggtacgtgacctgcctggactctgtggtctttggagcttgggaccccaccccagcgtaagaggcctttctgtgccttgtataaaggagaggaaaagtgtaggttttctgagttgataagattagagctacagtatattatcagtagcgttgtatgaaaccatttaaaaaaccaaaccggatttaaccgctttcacccagaataaactgccctccccctctttccaagatcaagtcagccccagttaccacttcctattaatttaaaaaccaggaaggctcataatttaggctgacgttgccccaggcgaacactgcatataagacaatagctattccaatcctcctttccctttctaaaccgaatagtacttctaacatcacttttccagtcctctttctaaatattgcgatcacgagcctacatcggaaaactatgaaaacagtatgattggagctcttgatggtctgctttgcctgaaaacgatgaaaggcattgagatctttgggcagaaatggcccttagggaatgcgagcctggtagccccataacaccccgagttacaaattcggtttgggtaggtggcgcagggaaatctaaaagctggattcacgttctcccccttcagtttgcacatagcggtcagtggcagacaagagcagacgcacaaatgtcaatccccgcccgcaaactctcgagggcagaaactgctttttgtcagttggatttggagtcggtggaaaagctgccctaatgtagtttctccgaggtttccttagccttgaccgaggggcgcttcccggccattcacctagaggttgtttaataaacaaggatgctcgcgaaatatctgcgcttggaaaggcgctcgttcgtggcgcgcattctcgggcctccgcaagcgaccccggtgacagggacaaccgcttcggttttagcgactgcagacagactgggacgagacggttggaggctcctccccaagggatgctggaggggttgcgtcgtaccctgcgcctggccctggcgcgcggccccaggtcgtggtacccagcgccctatgggccgtgcgccggggcttggccacaccgcctgctttcgcttccagccgcgcgctccgtgccactgccgctctctgcagccccgcgtccccgcagcctccccatggccagcccgcttcgctccgctgcggcccttgcccgccaggtacctcgaacccgggcgtttgcggaaggggggaggattggaacccgggtctcggtagctcgcgggcctggccgggcgccttgtcgccgtttcctgcaccatcctccttcgccttgccctccattccgcctccagcgaggcgtcttcccttccccgcatccctgcccgaaatctggagtcccagcctgcaatctccacctcttcgaggttcccgctgcccaggtctagcaccctcatgggtaacccgctccggagcgtggcgaggaccgccacgggggacgtgagggtagctatggactcgctctgagggaggaggcgggagctgaatctctgggctgccagaacccacagccacatcctacgtgactctgccaccccaaaatattttgaccgcagccttctgcctccttggatctcttccttccccacccccacccccgtagttatttagcagattacgcattaaaacaaatgtctgcaggttttcccaattagtcccgcttccctgtgtctttatcttttaaattgcccactaataccatgaggtttaaggtgtggggtggatgctgcggcatcggaggaccctgctggtggaggaaatggttcacgcccgtccccgttccctttgcaggcttgctattgtgcgtctgtgattgacaagaccacgaggctgagcgcgccctggagatttttctataaatggcttaacaccccagtctagactatttgctcggatataagggagacaattgtttttttgttctttgccggcgaaccctggctctgtagggctgacctggaatttaaccagtcttccctgagccggcggaggaggacaaaaaccgccgcgaccccggcagggtgggaagtgcagggcagcgctcccaagacacgcttgttggaggttcgggcctgggtgcttggttgtctgagcctccttttttgtgtttgcctgggtcctggagaggagcgcacggtatcatggtgagcgtcacgtaggttaccccgggtcccgcttacccacctgcatttacttaatggtggtttaattcttctttaaggattgcagtaacggatgctccgcagagtgtaccggagaaggaggatcaaaagaggtggtggggacttttaaggtaagttgcttgccagaggcttagtgtctaaagcaacgttcaactgaataaatccatttcttgttgagattcggggaaattttcactgtgtgggttacccagttcctaggttgtgttgccagacttttaaaattccactcttagaggaaaaaaagccatttagagagtgacagtacattcatcacaacaaaaattatctagcagctaattgctgattttattttgagtcatatatttttcttgaaaaatagtcaatgcgtaaatattaaactagttgtttatcagattccataatacgtacaaaccttcagtctacttgtagaaaaagttaaactgtgatttttctctttcagtagcacataacactctacagtgaaagtgttgcattttcttcttttctatctgaattgcggggtttatatagtaaatagctcatacttcaaacagtgagaaacaaagcacgttgaaaactgtacaaatacaaatgtaagatgtaatattattttttctataagtctatctcctaccctccctcctcgtggaggttttagcttcttctttttatgcctagtgctgctcttctgcctgtttg

SEQ ID NO: 1712 - DNA, 6000 bp, Homo sapiens
ctgcagttcaacagatttttaactctccacagcatgtccggcactgggtgaggtgggatggctaggtgaataatataggcattgtcatgtgtgttcgtgtgaagagaccaccaaacaggctttgtgtgagcaataaagctttttaatcacctgggtacaggcgggccgagtctgaaaagagagtcagcaaagggtggtgggattataattagttcttagaggtttgggataggcggtggagtaggaacaattttttgtgggcaggggatggatcttacaaagtacattctcaagggcgaggagaatattacaaagtaccttaagggcagggaaggatattacaaagtaccttctcaagggtggggagggtgtatcatacaaagtgcattcacaagggtggggaaatatcacaaagtacattatcgcaagggcagggagggtgtattgtcacaaagtcaattgatcggttagggtggggcaggaacaaatcacaacagtggaatgtcatcagttaaggcaggaacctgctattttcacttttgttgatcttcagttgcttcaggccatctggatgtatacgtgcaggtcacaggggatatgatggattagcttgggctcagaggcctgacagacatgaacttcccatcataaaattagaagagcattaatcaaatgattagaataaaatattaccattattttgaaatggcaagcattgtatgtaaataaacagcagaggaacccactgtagcctagacagggttcagagacgttcctgccaaggacatggcacagggactgaacaaggaaggatgacagtgcctggcaaaggcagggaatgttacaggtatttgggcacctgtgagaaggcctgatgtccgaaaggactgaaataaattaaatgtgtggggggagagagaaagaaagagcctagcaaaaggtgagctggagagtcagaggcagaaggcagaatctgggatgggctgggagcttgccaatcattttgtcaaatgggtgatgtgaagccttgaaggttttttgaccaagaggagatgtcttcagatttgcgtttgagacattttcactggttgtcatgctaagaatggcttaaagagaagcaaggctggggtcagaggagctgcttggaagctgtttggtactaggatgcggataacatggttggagaaatggcaactgtcagggtatttggagcaagaatggatagacattggtgatcatcacttggatgcatttgagggacaactgctatgtttctactagagcaactacatagagcaggagtaagcaacttacagtccacagaccacatttgctctgtcccgtttttcaaatacagtttaatggaaacagagccatgcccgttctttcacctattctgcatggctgacatcaggcatggttctaagtaatatacataagtttcatatattaatgctcatctatcccagttgacaaacatgaagtgttgctattgtctcattttacagcggagaaaactgacatagagattctctttcgcacccatagcttcagttaccacctctatgccaatgattcaataatacctctaatccagacctcttctctgagcttcagacaggcagatctctcacagccagtcttggagacacttcagaaatcataggtcccaaaccagactcctcctcatcccctcaaacacattctttttcaacattccttttttcttagtgaacatcaccaaatagataagcaagtcagatccaaggaggcctccttggcacttctctcatccttgtcccaccttatatcatctatttttctttttctttttttttgagatggtgtctcactgtgtcacccaggcaagtgcagtggtgtgatcctggcccactgcagcctcaacctcaccaagttcaggtaatcctctcaccttaatcccgtgagtagctgggactacaggcacatgccaccgagcccggctaatttttgtatttttaccagagacagggttttgccatgttgcccaggctgccaccttatctccattcttgctgaaatctggctgtttctctccacttctattaccaaccaccagccaaatctgacttattaaaaggatcatctcgtatgtgggttctgtaatagcttcttcaaaatccattcctctccacccagaccctcttccaatctccaaactgcagccaataccttcaattctgtcaccgctcctgcatactccacctaatccttaacctttcaatggtttctcttgcccctaggttaagctaaattgaaaactgctaaagctacagcttcttagtgtaactagtaagtacagtgactactatgtctggtttacttcagctgttgctgactaatagcacttcttgaatgaagaaattatattaccgtactgtagggaaaaatttgtacttcaatggaaaactgaattatttagagcaaacctttaaggttatctgattctgattccatgggccctttcattgggtcttacattgtttcattgtttttgagttattttacagatgactgatagaaatgcaaaataattattgcatgcagtcatgcaagtaaaatctgaaggtcagggttcaattaacttctctcccctactgtggaagaagccaatttcatttgcatattcatttcaatatttctgacctataaacatgcctgttctttgaaccagtttttatatctgcctggtaacttcattaaatgatttaaataaactctataatttagtttattttatacctgtatgacagtcaggcttttaccttatttttgctttttaaaattattctttagctctccctaaggcactacttggctggccctttggctactcactagcccaagctccatcctcttctgtctaccgcagccccaggctctcttttggccctttgttccagccctcctcagagaagttcttttgtcctggaactcactttcataccaggtgctcttcatcccttcttcctttagtaaatttctttaatctttcagatttctgctcaaggatcacttgctgaaagcctttccaggcctttctgagtcaatacaatccattattagaggctcttagagcacaggcagcacttgttataattttacatctgtctgtgggattccttaacactttctaacacaattaacacttttctctctggctgggggcaatgcatgataacaggatgatggtatgctctcaaccctcccccagcaactagcccagtgcttcgaacatggtggatagatacaccgtttttattttagacagatttttgagtagcaagtacctactgctcaggagacagatggactgaaaaaatatatttgggagtcatcagcacataggtgcagccatgaaaatgcacgagaagcaaaaccattggcaggaacaaaatgaaggctattagagaccttatttaggtggaataattggacagaagcccttaatggggaggaaatagaagcagttaatacagatggaggccgggcgccgtggctcacgcctgtaatcctagcactttgggaggctgagataggtgggtggcttgagtccaggagtttgagagcagcctgggcaacatagcaaaacccggtctctacaaaaaatacaaaaattagcccggcgtggtggcgcaggcctgtagtcccggctactggggaggctgagatgggagaattgcttgaaccggggaggcggatgttgcaattagacgagatcgcgccactgcactccagcctgggcgacagagcgagactccgtctcaaaacaacaaggacaaaacttatcttataagcgaccctggacttccagggacactcgccgctctatggtggtacgtgacctgcctggactctgtggtctttggagcttgggaccccaccccagcgtaagaggcctttctgtgccttgtataaaggagaggaaaagtgtaggttttctgagttgataagattagagctacagtatattatcagtagcgttgtatgaaaccatttaaaaaaccaaaccggatttaaccgctttcacccagaataaactgccctccccctctttccaagatcaagtcagccccagttaccacttcctattaatttaaaaaccaggaaggctcataatttaggctgacgttgccccaggcgaacactgcatataagacaatagctattccaatcctcctttccctttctaaaccgaatagtacttctaacatcacttttccagtcctctttctaaatattgcgatcacgagcctacatcggaaaactatgaaaacagtatgattggagctcttgatggtctgctttgcctgaaaacgatgaaaggcattgagatctttgggcagaaatggcccttagggaatgcgagcctggtagccccataacaccccgagttacaaattcggtttgggtaggtggcgcagggaaatctaaaagctggattcacgttctcccccttcagtttgcacatagcggtcagtggcagacaagagcagacgcacaaatgtcaatccccgcccgcaaactctcgagggcagaaactgctttttgtcagttggatttggagtcggtggaaaagctgccctaatgtagtttctccgaggtttccttagccttgaccgaggggcgcttcccggccattcacctagaggttgtttaataaacaaggatgctcgcgaaatatctgcgcttggaaaggcgctcgttcgtggcgcgcattctcgggcctccgcaagcgaccccggtgacagggacaaccgcttcggttttagcgactgcagacagactgggacgagacggttggaggctcctccccaagggatgctggaggggttgcgtcgtaccctgcgcctggccctggcgcgcggccccaggtcgtggtacccagcgccctatgggccgtgcgccggggcttggccacaccgcctgctttcgcttccagccgcgcgctccgtgccactgccgctctctgcagccccgcgtccccgcagcctccccatggccagcccgcttcgctccgctgcggcccttgcccgccaggtacctcgaacccgggcgtttgcggaaggggggaggattggaacccgggtctcggtagctcgcgggcctggccgggcgccttgtcgccgtttcctgcaccatcctccttcgccttgccctccattccgcctccagcgaggcgtcttcccttccccgcatccctgcccgaaatctggagtcccagcctgcaatctccacctcttcgaggttcccgctgcccaggtctagcaccctcatgggtaacccgctccggagcgtggcgaggaccgccacgggggacgtgagggtagctatggactcgctctgagggaggaggcgggagctgaatctctgggctgccagaacccacagccacatcctacgtgactctgccaccccaaaatattttgaccgcagccttctgcctccttggatctcttccttccccacccccacccccgtagttatttagcagattacgcattaaaacaaatgtctgcaggttttcccaattagtcccgcttccctgtgtctttatcttttaaattgcccactaataccatgaggtttaaggtgtggggtggatgctgcggcatcggaggaccctgctggtggaggaaatggttcacgcccgtccccgttccctttgcaggcttgctattgtgcgtctgtgattgacaagaccacgaggctgagcgcgccctggagatttttctataaatggcttaacaccccagtctagactatttgctcggatataagggagacaattgtttttttgttctttgccggcgaaccctggctctgtagggctgacctggaatttaaccagtcttccctgagccggcggaggaggacaaaaaccgccgcgaccccggcagggtgggaagtgcagggcagcgctcccaagacacgcttgttggaggttcgggcctgggtgct

SEQ ID NO: 1713 - DNA, 6000 bp, Homo sapiens
cctgccagagaggctggaggagattcagaatcctatcgtggaagggaggagtttcaaggagaaggaggatagctttgtgcgtcagggtggaaagtaccctgagaggttctagagaactagcagaaagaagactttacaatatcctttcaaaatagataggaattaatttatttttatttttatttttttgagatggagtcttgctctgtcgcccaggctggagtgcagtggtgcgatctcggctcactgcaagctccacctcccgggttcaagccattctcctgcctcagcctcccggtagctgggactacaggtgcctgccaccaagcctggctaattttttgtatttttagtacagactgggtttcaccgtgttagccaggatggtctcgatctcctgacctcgtgatccgcccacctcggcctcccaaagtgctgggattacaggcataagccaccgcgcccaacccagtaaatctaattttacatggggattaggtactagagtgtgtacaacaaggataaaaataaatccagtgagtcaaaattgtcatgggaaatttcccaaaaagtacagtataaatgattttcgagtattgaacttggtgtgtgtctgtgtgtgtatgcatgtgtgtgtgcacatgtatgtaatgggcaatgaatgcaagtattataggaaatataaaaacagtacaattttgaagtattttttactatgagaaatagagaaagagaatgacattgttttctgagtgtgtagagtagaattttagagtagattttcctcttttaagacagagtatcattgccttatgtaaactctcctattcaaattccaggaactgttaataactcaaggcagagaatatttgtgagtttctgctttcctagagaaaatttagtaagatacagggaagacattctgcaggtagttggcacatatttttcataatgatggcaataaaagcctttgttaataacagtgaggacaaaatgaagctggactgtctggcgctctggagtcaacctcaaaattagtgtctattagaaatcttagaaatgctgtctcttcttcagtaaaagacactgcccatagatgggtatatggtatatatccagtttggatccagttttccttaaatatcttttactgtgacttgtttgaagtacagtgccactgtcagagtaacaaccttcgttgatcatgagcctcatcatttgggaaaagcatgtgtgttgtctgggagagaagctttgggagtttacagttgacaatgagggagaactgtggggcccttctatcaacactaaagggaaatgggaggagagacatagctagattgttcttatattctttttttttctttttttttttttttttttggagatgatgtctcactctgtcacccaggctggagtgcagtgaagtatgaagtgatcacagctcactgcagcctggatctcctgggctccagtgatccttccacctcagccttgggagtagcttagactgcaggcacataccaccacaaacagctaatttttgcattttttgtaaagactggcttttgctatgttgcccaggctggtcttgaactcctgctttgacgtcccaaagtgctgggattataggcgtgaacgcccggccctcatattcttctgtggatgttaattccctaactttctcacttcccttcaagctctttttttttttttttttttaaatatatactaccttctctcttcctttgttgctaacatcaaaagaatccttaagtaggggtaacagcaacagggttggaggtgaaactgtaccttcaagccaaaaacagcctgaaggctgaaagaccagactgctggtcctggatgaaatccatgacgcagagtgagaatttctgttcctgtttgcctgcccctcccctattctgagccgataaaaagccccaggactcagcctcatggaggagactttcctgccttcgggtagggggaccacccccgcttccctctctgctgaaagctgtttcatccctcagtaaaactccccgccttgctcactcttcaattgtcagcacatcttcatttttcttgggcatggggcaagaactcaggaaccaatgtgcaaggcaaacttgtctcaggcgggcaaattgcgtggggtgcctcctgcagcaggtagtatgccccgagctaggcctccggcattgccggctagaggtccttgactggcaaagggactgagaaaaatcctgcattgagggagaggggggcgaggggcggtcgttggatctaggagtaattgccaggcttgctctagaacttattaatgcatttatatctatgaccccatcactctctatccccttattactctttctcataaaatttaccacatggtacctgtttttttttttttttttttttttttgagactgagtcttgctctattgcccaggctggaatgcagtggcatgatcttggctcacagcaacctctctgcctcccaggttcaagcgattcttgtgactcagccttgtgagtagctgggattacaggcaccccgcaaccacgcccggctaatttttagtagagacggggtttcaccatgttggccaggctggtctcgaactcccgacctcaagtgatctgtctgcctcagcctcccaaagtgctgagattacaggtgtgagccaccatgccgggccatagagtaacatctttattgagatataattcacataacatacaattcacctatttaaagggtataattcagtggtttttagtgtgttcacagggttgtgtaaccattaccacaatctaatttgagaacattttaatcaattcaaaaagaaatccaacgcccatgaacattcactctgcattccaccctgtccccagattgaaaacaactatgtgttttctgtctctatggattttcctgttctgcacatttcagataagtggaatcatataatatgtagtcatttgtgagacgcttctttcactttgcatagttttcaaggttcatccatgtgactgcatgtaatcagtacttcatttctttttattgcagaatataataatattccattgtatggatgataccatgttttatttagccattcctcagttgataaacattttgctacctgatttaaagcttactttctgtttctcacactagtatatgagcttaatgagggtaagaacatttttgttgtttcccactcagtccctagcattttgcacattgcctgtctcatgtcagtgtcaggttcaaatctatctagctgtgctttcactgacgggggccaggaggtttcacaaggactcaatggctgattaaatgcttacagatacagatttctcagggcagaacttctgcaagcattttggctgtggtcagttactttcaggttttcattactttttggttttcacagcatccgcaagtgcccatagccattatctcagctgcctctctctttactctcttgccaatggtgccaggccacagcaggtgttatcttatcacctcagtccaccatacatatgcttatcaatttgaggggtcagcaatttcactggaggctgaaacccttgtcataaatggctccattttgagacatttcagattacaaaccactgttatataccagcctagcatgtagaaatcactcagtacatttattgaacacataatttaaccattcattcacctgaccaacagtcattaagcactgacacatttgttttcaacactccctctcttccacggcaggccacttggtatgggagataaatatgacaaaggatctgcccttacgaatctcataatccactgaagtgacaactgtgcaaacaaataattaaagtaaaattaagaagctgggcacagtctcacatctgtaatcccagcaatttgggaggcggaggcgaggggattgctgaggccaggagttcaagaccagcttggccaatttagtgagaccccatctccattaaaaaatgataaaataaaataattgattttgagaaaggatgtggacaaagtgcagcacatagaccaagggcccagttctgtttgagggcattggaagcaacttccacagcaaagacttgggttgaaatttacaaaaataggagtttgccagcttgacagagaggcagcggaggtcaaccagcagcacacttaagcagtcatggaggctgacctaggcgctggacatggaaaagtagcaatcctggagctttgtatagatgtggggagggaacttacaggggaccaactaggctactgggcaatttcacattataaagaattttatatgctcaaattaaaggattaaaaattttcccccatgtacataataaattggcaaaaatggttatatttgagggtgactaaggaactctgggaaagagatcggcaaaccaggcacatgttcttgactactgcaaaagtacatttaaagtagccgcgggggatacatgtatacttttgggcaggattgtgccgtggtcctctcagcatgcagcaaagttactttggggacagtagggaggtgggcaggagccagtgatgacggaatggcaatcacatttgacctctgatctgtttatttcctcctccttgacgtctccatataaatgttacacgggcatccccacactcggatacgcacccacagtggctgattcgggggtaaccgtgtcatttgcttgcaacactggcacctctgccctgcaccccgggagtgagcagtgagtgaggctcgggtctgggcgctggctccgaatcttcgggctgggagagactccaccatctgggggcggcctgggggagcagccttagtgtcttcctgctgatgcaatccgctaggtcgcgagtctccgccgcgagagggccggtctgcaatccagcccgccacgtgtactcgccgccgcctcgggcactgccccaggtcttgctgcagccgggaccgcgctctgcagccgcagacccggtccacacggccaggggctacgacccttgggatctgccctccgctcagctcgagcttccctcgtggccgacggaacaatgaaggtaactacttatggttttgtccgtgttttacaaaaatgtgtgcgtgaatcgaaccggcgatttctccaagaaacatagttggcagggaggggaggaaggcgagacaaccatggcttatatcccccgcaaacgtctcagtatcttctttatcaatcgtagtttgcggggaccgtgcattctgttcagatttcggtttaacctccactcgcaggacgtgccttctcggactttttcacattcgcttttgggaacggaggtgaaagtctgctacagctccctcccctgcttgtgaagtttggaaaggaagtgagggcttctctcagtttctcctatgcacaggaggtggggaattttggagaggaggtctggggatgtcccgggctgtaaatgcgctttcctgcagcgtgtgttcgtgatgcaggagggagcggctggaagagttgacccgggtggagaggggagggagaacgatcttttcactgttaaaagcagaaggcccctcttattttgtttcttgtggaaattaaagcttctaggagttacaaatgatagacgcctaagggcattcatttgttaaaccagtgagcaccctaatggctctgatcttgctaatcaaggataattagcctagctgcctattatttctgactatttaggtgtagggatgtacaccgttgagtgttttgttttcctagtttcacacactggaaaactgcaatcgcatataaaacccgaagagcaactttttccaaggaaagtgaaggatgggcagatattcttgccatctaacattttggaattgagatgaccataatgcaatctgaacttctggtaggaataaagcctcgtttcagagtttctaaggagggagatgaagcgtggttctcaactgctcttatctacaaccc

SEQ ID NO: 1714 - DNA, 6000 bp, Homo sapiens
tcattgctctgtgtaggttgtgacatttccttcacgattgaaattaattaatttttttttattacttatttatttttaaaatagagacaggttcttgctgtgttgcccaggctggtctcaaactcctggcctcaagcagttctcctgcctcagcctcccaaattgctgtgactgtaggtgtgagccactgcactgggccaaaattacttaattttaacaagatgatgtagagaggagagttcattgcaacataagcctagaatctttgtcagaatcttaggaagtaatgttttcaaattctgtgttttcaccataaaatgtgtcttctctgtgtccatcacatggtttttcattgttttctgctttaccattttagtaccattggcatttttcttcattgtaaaagtagtagaaatggagtagattacataaggatgtgatcagagggaatttattcattcagggtaagggagttagatcctcttttaagattctatcacattctaagggtttatgattctaaactgtcaagtaaattgtcaagtgctggcaagctacagaataatttttattgtatcattggaaattttcccctctatatgtgttaaagagtttagcctgaagggatacatacacatacatatatgtaatcaaaccttgatggtattgtattgctgataaattatttcttaccacttttcctttctcctgtgggagaaacaaaagcatatgtttgtgtagtatcagtaatgatattagagagtgggaaacatcagtgagtgcagtttggggactttattggagactttcactagtgctcaaataaataatgctggtttttatcctactgtttgcttaatgtggactagcctcttattcccattctatgtttacctctcttaaaatattggtcacgctttcttgaattatagatctattaggaaaattcatgaactgtagctaattttcattgttcatgctccagatttattttgaaatatcgttaatcttagtagtacagtaaaggagaaataccacttaacattttttgtttttttttctttgagacagagtcatgctctgtcacccagtctggagtgcagtggtgctatctcggctcactgcaatgcacttcgcctctccgggttcagcaattctcctgcctcagcctcctgagtagctgggattacaggcacctgctaccacacccagctaatttttgtatttttagtagagacagggtttcaccatgttggccaggctggtctgaaactcctcacctcaagtgatccacccgtcttggcctcccaaagtgctgggattacaggcttgagccaccgcaccccgcccacttaacattttaaattaatttcaagataatatcacttgaatatttttacacatataatttttttaatacatttatttacacagtttataatatcctacaaagtgattacaatgagtaaaaacccagttttcattgttcctaaagtggcttgatttatacaacttaatgtgttgggtatttgtttctaagactccctctgctgtctaggtttggaagtattgtgaggttaacagattttctttttatagttactactcagttgaacaggctttaaaatacagagagaatcatattttttcttcattttttgcttttatttatatttttcttttaattggagacatgacaagaattgacttgtgtatggatcttgcataatttaagtactgcaggtttaaaatctactaccagtttgagagtgccatttttcacactgtagattattaggttgaaaagtattatggcttaaaatcgcttttagccattaaatttaaataaccttgctttaatcataaatagatggtggtcacaatgactaactgttaaactctttgaagacaggatatttggctttatatggcaagcttttgaatacaacagaaattaaaactttatgggatagaaagaatctcctccaaattggtaaactataagacctttcaaatgatttagctaatttctccacaaatctgaggtattagtgttttttttaaagtggtattctcctgtgttggggtcactttaaacctttttcttaatgataaatatatgaattgaaactaatcccttaatatatatcatttgaaaactgaaataatatgtttagatactgtttacttgttgataaattattggaataggatgttcgaatactgtttacttcttggtaaatttttaaatccaatggattttacgtaagtatagaactggagctcaaatactgttactgtgtgtgaagatatatgaacatagtttacagttgcatggcttatatctaaagtccagaaacataaggacaattaagtgtacacacacacacatgcatttggattttgatgacttaggtttgccaatgtggaaaaaatagtagcaaattaagttctcctgtgaaaaagtcgttaccttatttaaaattctgtgccattggttatccttgtcttttgtgaaaattagtgttcctgtttataatattgacaaaacacctatgcggatgacatttaagaattctaaaagtcctaatatatgtaatatatattcagttgcctgaagagaaacataaagaatcctttcttaatattttttccattaatgaaatttgttacctgtacacatgaagccatcgtatatattcacattttaatactttttatgtatttcagggtgttgatgatgccttctatacattagttcgagaaattcgaaaacataaagaaaagatgagcaaagatggtaaaaagaagaaaaagaagtcaaagacaaagtgtgtaattatgtaaatacaatttgtacttttttcttaaggcatactagtacaagtggtaatttttgtacattacactaaattattagcatttgttttagcattacctaatttttttcctgctccatgcagactgttagcttttaccttaaatgcttattttaaaatgacagtggaagtttttttttcctctaagtgccagtattcccagagttttggtttttgaactagcaatgcctgtgaaaaagaaactgaatacctaagatttctgtcttggggcttttggtgcatgcagttgattacttcttatttttcttaccaattgtgaatgttggtgtgaaacaaattaatgaagcttttgaatcatccctattctgtgttttatctagtcacataaatggattaattactaatttcagttgagaccttctaattggtttttactgaaacattgagggaacacaaatttatgggcttcctgatgatgattcttctaggcatcatgtcctatagtttgtcatccctgatgaatgtaaagttacactgttcacaaaggttttgtctcctttccactgctattagtcatggtcactctccccaaaatattatattttttctataaaaagaaaaaaatggaaaaaaattacaaggcaatggaaactattataaggccatttccttttcacattagataaattactataaagactcctaatagcttttcctgttaaggcagacccagtatgaaatggggattattatagcaaccattttggggctatatttacatgctactaaatttttataataattgaaaagattttaacaagtataaaaaattctcataggaattaaatgtagtctccctgtgtcagactgctctttcatagtataactttaaatcttttcttcaacttgagtctttgaagatagttttaattctgcttgtgacattaaaagattatttgggccagttatagcttattaggtgttgaagagaccaaggttgcaaggccaggccctgtgtgaacctttgagctttcatagagagtttcacagcatggactgtgtccccacggtcatccagtgttgtcatgcattggttagtcaaaatggggagggactagggcagtttggatagctcaacaagatacaatctcactctgtggtggtcctgctgacaaatcaagagcattgcttttgtttcttaagaaaacaaactcttttttaaaaattacttttaaatattaactcaaaagttgagattttggggtggtggtgtgccaagacattaattttttttttaaacaatgaagtgaaaaagttttacaatctctaggtttggctagttctcttaacactggttaaattaacattgcataaacacttttcaagtctgatccatatttaataatgctttaaaataaaaataaaaacaatccttttgataaatttaaaatgttacttattttaaaataaatgaagtgagatggcatggtgaggtgaaagtatcactggactaggaagaaggtgacttaggttctagataggtgtcttttaggactctgattttgaggacatcacttactatccatttcttcatgttaaaagaagtcatctcaaactcttagttttttttttttacaactatgtaatttatattccatttacataaggatacacttatttgtcaagctcagcacaatctgtaaatttttaacctatgttacaccatcttcagtgccagtcttgggcaaaattgtgcaagaggtgaagtttatatttgaatatccattctcgttttaggactcttcttccatattagtgtcatcttgcctccctaccttccacatgccccatgacttgatgcagttttaatacttgtaattcccctaaccataagatttactgctgctgtggatatctccatgaagttttcccactgagtcacatcagaaatgccctacatcttatttcctcagggctcaagagaatctgacagataccataaagggatttgacctaatcactaattttcaggtggtggctgatgctttgaacatctctttgctgcccaatccattagcgacagtaggatttttcaaacctggtatgaatagacagaaccctatccagtggaaggagaatttaataaagatagtgctgaaagaattccttaggtaatctataactaggactactcctggtaacagtaatacattccattgttttagtaaccagaaatcttcatgcaatgaaaaatactttaattcatgaagcttactttttttttttggtgtcagagtctcgctcttgtcacccaggctggaatgcagtggcgccatctcagctcactgcaacctccatctcccaggttcaagcgattctcgtgcctcggcctcctgagtagctgggattacaggcgtgtgccactacactcaactaatttttgtatttttaggagagacggggtttcaccctgttggccaggctggtctcgaactcctgacctcaagtgattcacccaccttggcctcataaacctgttttgcagaactcatttattcagcaaatatttattgagtgcctaccagatgccagtcaccacacaaggcactgggtatatggtatccccaaacaagagacataatcccggtccttaggtagtgctagtgtggtctgtaatatcttactaaggcctttggtatacgacccagagataacacgatgcgtattttagttttgcaaagaaggggtttggtctctgtgccagctctataattgttttgctacgattccactgaaactcttcgatcaagctactttatgtaaatcacttcattgttttaaaggaataaacttgattatattgtttttttatttggcataactgtgattcttttaggacaattactgtacacattaaggtgtatgtcagatattcatattgacccaaatgtgtaatattccagttttctctgcataagtaattaaaatatacttaaaaattaatagttttatctgggtacaaataaacaggtgcctgaactagttcacagacaaggaaacttctatgtaaaaatcactatgatttctgaattgctatgtgaaactacagatctttggaacactgtttaggtagggtgttaagacttacacagtacctcgt

SEQ ID NO: 1715 - DNA, 6000 bp, Homo sapiens
ggtatagagaggggattcactcaaggaggggagaccatctatctgctttgagaagctgggaaacaaagtcatagggtcaggatggtgcctgactatggatgctctcaaaagctaggcaccaaggatttggactggattcagctggatataagaagttattacagacttggaagcaagattaagtctccgggaaggggagacttaactgggaccagagatcattttcccctataattttaaaggtacttatcatctttaggtactcattaggtacttagcttgtaactctttccactgttcaaatatatacccagtatgcatgtagcctatatggagcaggcacagagtaaatgtttgatgatgataaaagacatgcggaagaaaggttaatttggcaacatcataaaactgaattgagacaaagaaagccaggaggtaggaaagtcaatgaagaagttattccagaaatgtagctgagaaggaaggaatacagaagaggcagatatgggaaaatactcaggaagtataattaaaaggagctgtgactaattttaataaggactgggttaaaaattaagttttcatgtctaaatgttctggaggaccatgatgtcactcaggtaagatggaggaattgagagagggaattcgttagagggaataacatggggaatttggctttggacaggcatttgccatgataacagaatattcatttagaaatggtccaggaaattggtttgatgagaatgaagtgcctgtgaagagagaggactgaagcttgttataatttcattcacttcaggaatatttacagaggacccaaatgtgctaagaactatgaaaacatagaattaaaagaaatgggcctggaataatttacaacctagtaaagcagttatgggaaaacatatttgcaaaaaaggtatacaaagtataatgaaataagtgtccagtaaggataaagtgcagagtaagtgaattaagcagcacccattcatgtgttcaaattcctgccagagtcaaaaggttgtgctgaagtagagtccatgaaagcatcgtagatggctcctcctgctcaagttcccctgctctgcgtcctgctactctggccacaaccgtctggacccagggttgacacacaaacaaacacaataatcttttagccagacataaagaaggccagccaccaatcaggaaaattgtgtcccataaaggcccttcctattgaacagtgaatgacagacatggccagatcttctctcttggaatgctttgaatgttagtcacagagagtgaccactagaagcacagatagcagtagaagctaagactacatgaaaaagcagtggacagatggtgatttatgagaatggcaaaattactagagtcataggcaatggatacttgttaatgaagggatgagcagggccccacagcctgttgctggctcacaagtgcagttgattgctggactgaacagcagctctccgcctgatgatagggttttttaaagtgtccttattgccttaaagtaaatcctcagcatttgcagtgctctgagggtgtcctagcattttataccttttttctaagagcccaggtaacataagggtactcctgttgttctggctttaattctatctgcagaagagggtttcttgtgaaagaaagggtcagtatggtcttttatctgtacagcagataaaaagggtatgtacgtgcacacctttgtacgtggctgccttcccaggacagtctgacagtagagggtagaaacttcagttgtagctgagagcaggcctggaatccccatgcttatactttttatttcctcccccctttcccattgtgatcacaggctacttcagtgtgcttgtccttggagagagcaagggaagggagagccagggagactgttcaagggagccaccaggctcgagaaagaggaacccctgaagacagtagaaagtgcaggtgccaagaatttgaatatctacatcagagtttctcaatgtgcacacagtgaactaccagtttaggatcatttgatttgctaaaaatgaagattactggtctaccttagaccaactgaataaaatatctgggtgaggggcctaggaacttgcatttttggtaggcatggcaggtgattcctaaagcatttacccttgagacctctatgttaaggaaagaaaggtaatgttgcaaggaggtggtgccggcttctaagaaagtacccaggactgaacggcagaaagacctgacataccatatgtataaattgctgtggaagtgaaaaggaaagagaaagtgtctgaggtaaaactggagtgtggggtgcgtggaacaaatggttggatgcagatttgctttacgaatcatgagcctagatgataactgagaccatgtggatggattaggtttctgctaatgccagaatttttataatcagcataaaagtgctatataaagctttcccctcttctatattatagtccttttaagatgtatggaacatcaactataggaagaacatcatattcacagctgtaagaggaaacaagaacttatcatgcacttgatgttgtacaaaataaatctgtgatttatgcttgagtgaccacaaagtagcatacacataagcgcaaattcattcatttaagaattccttgtgtctattatgtacgagataagtatctctgagctgcacggaatgtggcttatcagaaggtgacctaagtttcaaagcagattttgttaagatgaagacagagattgacaggaggtttaagacactctgtctaaagtaaagatttagagtcacagagttcatggattaggatttagaatccacagagggtccacagattcactcattcaacattccataaatatttattgaatgcctttttgtgtcagagactgtcttaggtgctggaaatttagcagtaaatgaaacagaccaaaacccatgccctcatggagcttacattctgatggtagagagacaagaaaacaaaatagatagtgtattattgaaggtgatgagagctctggagaaaaagtaggaaaagagacagatctgggacaagggcgaaattacagtatcaaagatgatctttttagggaagatctccttttaaaaacactttggaacaaagatttaaatgaggtgccagaggggtagcaagtgcatattccctgaggaagacgcctgcctggcattttcaaggaacagccagtaaccaatgtttatctacgtaagtaaggaagggagaacagtaggatgagagttcagagaagagggtaggggatatcaaataatttaaggccatgtaggatttttgagaagaattttgcttttatgtcaagtggaatgagggccactgatgatctgggagtagagtgactatgatccgacatgaagtatactccattttttaactatgtgaacttgtgccaacgttttaacctctaaatctgtttcgtcatttgtaaaacggtaaaaagtattttacctcataaggttgtcgtgatgattaaataagatgatacgataagtgcaaaagatttagcttgtacttaacatagagtaggcacattttctccccttccctgtctttcacttttctcttctgccccttccacctggcgctaggagggggagactggaataaaccttgcagattacagcccgtgtaagagtagaaaggaaaggatgacagttgatgtaaagccttggttaacagacataatagctgggatttaaattcagctttattggtggtttatgatgtggactagaggaatggaactgaaagtctcggaggaggggcgatcctatcaggtacaggcgctgcttttccagccctcaatcctcaagactctcccaagatacatttctaggtagtttatcaacacagactccgggtatgctagcatgtttaattgccccattgtttaatgtcttaactccacgaactttaactgattaatctgtcttctaattaatgtttgaatgactctcctcaggtctaaactaccaaggccatctctacttaaaaacagttgtcttttgtttgtgatttcaggggccctgggtataagcgaagtccctgtttagagaccttgtgatgggttcaaaatatcaagaaagatagcaaaatatcacaagcctcctgacccgagaagattagcgttgaaagggtctgtcgtgtttgtttgggcctggggctaaattcccagcccaagtgctgaggctgataataatcggggcggcgatcagacagccccggtgtgggaaatcgtccgcccggtctccctaagtccccgaagtcgcctcccacttttggtgactgcttgtttatttacatgcagtcaatgatagtaaatggatgcgcgccagtataggccgaccctgagggtggcggggtgctcttcgcagcttctctgtggagaccggtcagcggggcggcgtggccgctcgcggcgtctccctggtggcatccgcacagcccgccgcggtccggtcccgctccgggtcagaattggcggctgcggggacagccttgcggctaggcagggggcgggccgccgcgtgggtccggcagtccctcctcccgccaaggcgccgcccagacccgctctccagccggcccggctcgccaccctagaccgccccagccaccccttcctccgccggcccggcccccgctcctcccccgccggcccggcccggccccctccttctccccgccggcgctcgctgcctccccctcttccctcttcccacaccgccctcagccgctccctctcgtacgcccgtctgaagaagaatcgagcgcggaacgcatcgatagctctgccctctgcggccgcccggccccgaactcatcggtgtgctcggagctcgattttcctaggcggcggccgcggcggcggaggcagcagcggcggcggcagtggcggcggcgaaggtggcggcggctcggccagtactcccggcccccgccatttcggactgggagcgagcgcggcgcaggcactgaaggcggcggcggggccagaggctcagcggctcccaggtgcgggagagaggtacggagcggaccacccctcctgggcccctgcccgggtcccgaccctctttgccggcgccgggcggggccggcggcgagtgaatgaattaggggtccccggaggggcgggtggggggcgcgggcgcggggtcggggcgggctgggtgagaggggtctgcaggggggaggcgcgcggacgcggcggcgcggggagtgaggaatgggcggtgcggggctgaggagggtgaggctggaggcggtcgccgctggtgctgcttcctggacggggaaccccttccttcctcctccccgagagccgcggctggaggcttctggggagaaactcgggccgggccggctgcccctcggagcggtggggtgcggtggaggttactcccgcggcgccccggcctcccctccccctctccccgctcccgcacctcttgcctccctttccagcactcggctgcctcggtccagccttccctgctgcatttggcatctctaggacgaaggtataaacttctccctcgagcgcaggctggacggatagtggtccttttccgtgtgtaggggatgtgtgagtaagaggggaggtcacgttttggaagagcataggaaagtgcttagagaccactgtttgaggttattgtgtttggaaaaaaatgcatctgcctccgagttcctgaatgctcccctcccccatgtatgggctgtgacattgctgtggccacaaaggaggaggtggaggtagagatggtggaagaacaggtggccaacaccctacacgtagagcctgtgacctacagtgaaaaggaaaaagttaatcccagatggtctgttttgcttggtcaagttaaacccgaagaaaacccgcagagcagaagcaaggctttttccttgctagttgagtgtagac

SEQ ID NO: 1716 - DNA, 6000 bp, Homo sapiens
ggagcttgcagtgagccgagatcgtcccactgcactctggcctgggcgacacagcgagactccgtctcaaaaaaaaaaaaaaaagactttaatagaggaagtgactattactcagataaacagagactactctgcccaacttcaaactatgaaaatctctggataggcaaacaggaaaagctagtacggctgctgttaagttgtccttttcagtatctctcactgttcatactcacagtgccagttggactctcaaatatcccaatcttgccagcctccaaaacccggtacagctctgccatgaagtcttcctggatggaatagggtgtgaagggaaaaggaaaatggatggcaccaaccttctgtgtttcattagccatggacctaggaaaaataaatacaacattagggagctctctcatggtccaggaagaagtggcttgaaatctggagcattatttaagagcagtctccacacttattaccaaatttctccttttttctgggaagcagagaccatgttctctccatccttcgcagcaggtccacgtgaggccataccagaatcacgcactccatctagcggcatttaacggctgtagcagaatgcagaccaggaaagcccctaaacccaatctcccctgcatttcaccgtggctccgatacctttctaatgcctctacaaaaggcttagagctctcttctcacagaccagcacccctaagatcaagggtgttgcttataatgacttttgcagctttcttctcccacgtctctgcaatgcacattcacaagccgaagctacttcactttatcccgttgtgaagtcctggaaaatcatgacgcacaggcagaggaccataagcacagcttgttgtttggatagcgcaagttaacatacacgtccctatctttttttttttttttttcgagacagagtctcactctgtcgcccaggctggagtgcagtggcgcaatctcggctcactgcacgctccgcctcccgggttcacaccattctcctgcctcagcctcccgagtagctgggactacaggtgcccgccaccacgcccagctaatttttttttttggtagagacggggtttcaccgtgttagccaggatggtctcgatctcctgacctcgtgatccgcccgccttggcctcccgaagtgctgggattacaggcgtgagccaccgcacccggcctacacgtccttatcttacaagtatctttagtttgcttcttagttcatcctggcctccatttccagcaccgaacagagccaccacctactaacttttctggcctctagacctatgagctttctgtttggttccagacaggagagctctcttcacagccacggggctctggctggaacagcttcccagtactgagaccaggcatttctctttccttgctaggctaaggtctaagaaaaactctgctccacgttgacgtcatctttttttttctcctctcctgaacctaattatctctgagacagtgattcaaggaagaaaggagaagtaaacgctatctggaggcctgactcttccatcctggttcccacacctctctctttggaactcacttctccaagctctttgccaggtctgtctcttctaagcacaaatgttagtaagtcccaaacccattttactaatattagtagatcgagagcccatctttataactttggcctcaataagactagtgatagtgtcactctatttacgaggggaaaggtagttgccacgatgctcttcggtttaggggcaattaaaatgactacagattggtggcagtttatggatttgcacaagaagagagaactcacagaactagcattattttaccctctgtcttcacagaggtatatttggctgttttgttagacattctggggacaagaaaaaatgaaaaaagaaaaacatgactacagaggtagaggaattattacaagaagggtaatcaaaaaacatgatttacaattcaatcctgagagaggggtatgtactgaaaaagctttaacacatgaaggaaaggggaagaaaggtacctaacaaatttttgagtacctcctatgtgttaaacactctacagtggtcttttgcttttattatctcatttaatctgtacaacactataaggatacagctactggatactgatgcttacagaaattaaataattgctcaaagtcacagctaaaaagtggaaaaccagggattcgaatccaggtccaaatgactctgctttagtgaagctcatccggttgcaagagatatccagcataagtgaagggaggttcactgaagggaggttcacaaactgagagtaagaattgaaactatctgggaaagccaaaaacagaggcagactacaagctgcaaggcagctcggacttcaagacagctccaggaacgtcaccagcaaacacacacccacggggttcactctcctgctcagccaggtgccggatacagccacaatctcactccctcagcgcactcggtttctgcttatcccaaactttcgcttacacgtggcctcatcagcccctggacctttcagcttcagctcccactgccaagtaaaaagtcttcatgtctcctcgttctgaatcccaagacaaaaagctgaccagcagctcctctcaagacagagcactggtcagcctgagactggtcaggctcccagcctcatctactcagctcgggccttgcacttgctgctccccttggcctggagaaggagtcctcctcaatatccaggctttggctcacctcctcagagaagcctctccggctgtctggccgctggacagtggtcaaacaccacccccactcctcaccccctagcttgctctaagtcacttttaaaaaatcacattactctgtatttaatttattcatagctcttagcaccatctgaacctatttattcttcctcactggaatatacgttccataaatagaggaaccttgtctgtcttgctcttctctggctccaggactcagaactaggtgcttcgacacctcataggcattcaacaaaaatctgatgaacgaatgagtagccagccagacatcggggctgtaagtgaaggtttctcttccgaggctgggtaacggaggtcccatgacttgaatacctattagttaaatggccagttctttaatggtttcaaaccgttttcagataaccccacaaaaaccctgtgtggtatttttataagctctattttatagagaaagaaactgagactcagtaaacttatatgacttgcccaaggtcactcagcaagtgcttgaactcaggatttgaaccacatctgccagacccccaagccacctgaaactttctatctcctcacttttcctcccaccaggataagtgggataaaaaagacagacttggttaccaaactctagaatgacaacactaaacaatacagaagaaacgtaagtattatttcacttccccatcagtggtaattatggatctcattattccagaagcagcacaggctaaatcatagaggtttagataaatctgagtataacggattcactaagccctattaaaaacatttgcagtgacttgttcagccctcttcaggttggctgtgtggaggacaaccatcacctcccagtgccaaggcacacaccaggacagcaaagctcacgctcataaaacgaggttagagttgtgaaagcacttcaggaacatattagttcttaacgtgttcattttcttcagtccccaattatcactcattactgagtacagactattgttgtgggctcagttgtgtcctccccacattgatcttggacatcccaagcctctgggactgtgagaaaacacatttctgtgtctaagccacccagtttatggtattttgtcatggcagccggggctgaccaagacaactatgtggcaggtactatctaccgtatggccctaaaatgttttaacttcacacacctggaaagcaccacagccccaagaaaaaagcttttccgcactgctgttaagccagggccacacactgcagtactgcggtgctccaccagctggaggatggcctggcccataatacccgcattcccaccttgctctggccctgtgtcccctccaacgtgcatcctgagctcgcaccctgtgtggaacccaaacagctgcttatcagcatttaagtccatttttatgacacttccgtcaacaatctggtcaagtgcactcattcctggcctccgtactgtaccctgctccgcctcgattcccgccctgggggaagctagactcatgcagctaactttatcggctctgggctctgattgccaagtttaggatcccagctgtatccttgctaaagttagcatcgctggggctcagtttccgtaagagacaggtgggttacaagcgctcactcactgttgcagtgtcttatctacgtaagataatccatgaaaagctcaacacagctgggccaaatctaagacccagacacgcggctgctgttaatgcccacttctgcgcaccgcccagttccaccgcaggcacaaccttcctaggcctacccgtccccacacaggggttcccgcttgtcaatcacgctggcccggccctccacttccggaatgttttcccgctccggacgggccacccacctttgcaaataggggtccggcgccggaacagacgcccagtttgcgatttcaccagtctgcccttcctcgtcccgctgctcctcgtcctaaggagctctgctgccacacagcactgcgctcaccttcttcgccggcagaattgctacgctgaaagccaggccccgggaatcagggcaaacgccactgagttagaaactggcgggtcccctcagtgaaaggcagccggaacaacccccgccgctgcgcatgcgcactccgggacgcgcgcgaacacgcagcagcgagaatctacaggggcgtggtttgcgcacgcgggaactgggatctcaaccccagggctaggtgcctcctcccgctgctttccgccagctgcggggtgtgagattaatccccgccgattagcgccaggtgtactaagcgctggatggttccctgaccagatgaaacatcagccgatgttctaatgccggtcccctgggcgctgtccccgagagggaaaacctgttttctgaccccggctctagtcggcctctggaggtctgcagctgggttattttacctttgaaacggacgacacctgccccgtgcaccccagcggctcctccacacggagagatggtgtcagtcaaaggccgtctagatgacgagtttatgaaattgttcctggcccgtgccgggcacgaccttgcagagagcccagaagatgaaaccccagccctgccaggagctcacctgctaattaggaggacaacgaatcacctcacctccctagactttgcttctcctttattcagtgagggattggactagctggtccttgaggacttttcagaaagtctggttctgggagatgaccaatgggatcatcttatgctatgagctttcctggaatgacaggtaattggtgcgccttcccagcagggtcagggagagttgctgggacttgaaggaaaggcttttggggagaggagccagtgttacaaactatcgaaaagcttggaggtgggaaatttacaaaaggtgattccagggtcagcttttttgtcacctgcttccgacttcggcagtttggagagggcgagtaagtaatacccttcagggtcttgggatgtggcccagcaaaatccttagagggactttgaagtcttagttttaagtttagaattaatgggcagagtacttaaatagccatttctccaaagatgtatacaaatggcccacaggcccataaaaatgttgcattccaccctataacatgtttttgcataaaaaagttttaaaataactgttgtctggtaaattgacacctctggaatag

SEQ ID NO: 1717 - DNA, 6000 bp, Homo sapiens
tttttgttgcctgtgctttttggtgtcatagccaaggaatcattgccaaatgcaatgtcataaagcttttcccctctgttttcttctaccagttttatagttttatagcttttaactttaatttttaattttaacttcattttaactttagaaaatccatcttaagttaatttggatatattgtataagacaaggatcctacttcattcttttatatgtggatacctccttccttttggaaacttttcctttcagtaatcttactacctccacagctttagtttagatgttttttgttgttgttgttgtttcccaggggtgatcaaatccatatatccagcttttaccaccttcctgagttctagtccccccattttcaaacaccactgaaaatttagtttgactaagtacatcaacctattatgtgaagaaacaccatgtcccacccccactacggtgtggcttaatgagctaaagtaatatatcaagatagacataataatccaagaaactggggttcagagaagtaaatattattagggtgcatcttgcgctgttccagagtgaggcatatagggttttggggacagaacaatctagtctctgataatgttttctcttatagcacaggcacatttcatgagcctttcccactacctaggtgttccagtttggatgtggtttgtttggcctaagtctcatgttgaaatctgatttccagtgttggaggtggcgtctggtgggcaatgtttggaccatgggggtacatccctcatgaaaggcttgctgcccttatggcagaagtgactcagttctcactcttagttcccaagagaattgcttgttgaaaacaaacttgtacctcctacatgctctccttctagaagaggatctaaggaaatttataataaaagcagaggaacgctgaaaccaaacccaattcatatcagtaatagctaccatttgttaagcttccacaatgacaagtaagatgttaagccctttatgttaccaggattatctcatttatctcataagaattctagaacataggtcctattattatctttattttattcgtgagaaaagcagagactcagaaggcttaagtcataggccaaggtcatccagccagttgaatggtggagtggggaatatctggatccaggcagtcagactgtttttttttgtttttttttttttgagacggagtctcgctctgtcacccaggctggagtgcagtgccgtgatctcggctcactgcaagctccgcctcccaggttcacgccattctcctgcctcagcctcccaagtagctgggactacaggcgcccaccaccacgcccggctaattttttttttttttgtatttttagtagagacggggtttcaccatgttagccaggatggtctcgatctccagacctcgtgatctgcccaccaggcagtcagactttattagaacatgcacttaaaattagcaagaaggaatgagaacaacaacaacaaaattaaaaaatgcttgccaaagaaaactaaaacaatgtgcaatatttagccctgagatcactagcagtgaaggcaaagaagaatgcataatgggtttctacagctctcactgtccggttatagaaaatatttctacattagtacaagcacttttcttcctaagccctgagttttgagagtttatcaagaaggcctctgagttcattcaattaatggcatcatctaaggctgtttaataacaaatgcagaggtagtccacataaggaacttttgcctttacctttgagacaaagcccagggcctcacgttaggagtacagctctctaaatataagcctccagggcagaagcgaggggaggatggagggacacaatgcagatttacagcctggtgggtacggcctttgtcctctccatgtctattgtcactcttgaggtccaagcctctactgcactgcctggtttactgcacaacccaacttggctgcttgcttctggtctctccccaccaaaccatccttcacactgcttccagcttaatatttccaagacactgcatttgcaaatccactcctctgtttaaaaatgtttcagtgacttgcaacttgtctacagtgtgaagtataaatttattagcttgttgtttaaagccttctacaaccagaccccgaccgaccttcacgtcctattgagaggtgacagcctgctggcagccctcgcagccctggctcgctcttggcgcctcctcggccttggcacccactctggccgcgcttgaggagcccctcagcccgcagctgcactgtaggagcccctttctgggctggccaaggccggagccagctccctcagcttgcagggaggtgtggagggagaggcgcaggcgggaaccggggctgcgctcggcgcttgcgggccagcgcgagttcccggtgggcgtgggctcggcgggccccgcaatcggagcagccggcccgccagccccgggcagtgaggggtttagtacctgggccagcagctgccgtgctccatttctcgccgggccttagctgcctccccgcggggcagggctcgggacctgcagcccaccatgactgagcagcccgccatgactgagccgcctgccggcgccccagccatgggctcctacgcggccggagcctccccgacgagcgccgccccctaatccgcggtgcccagtcccatcaacccccaaagggctgaggagtgccggtgcacagcgcgggattggcaggcagctccacctgctgcccgctgccgcatccacttggtgaagccagctgagttcctaagtctagtggggacttggagaacctttatgtctagctaagggattgtaaatacaccaatgggcactctgtatctagctcaaggtttgcaaacacaccaatcagcaccctgtgtctagctcagggtttgtgaatgaaccaatcggcactgtgtatctagttaatctggtggggacttggagaacctttgtctagctaagggattgtgaatgcaccaatcggcactctgtatctagctcaaagtttgtaaatgcaccaatcagcactctgtgtctagctcacggtttgtaaatacaccaatcgacactgtgtatctcgctaatctagtggtgacctggagaacttttgtgtctagctcagggattataaacgcaccaatcagcaccctgtcaaaacggctcaatcagctctctgtaaaacagaccaatcagctctctctaaaatggaccaatcagcaggatgtgggtggggccagagaagagaataaacacaggctgccctaagacagcagcagtaactcactaggattttcttaccacagtatggaagctttgttctttttgttttttaggtctgcactgcctttatgagctgtaacactcactgcaaatgtctgcagcttcactcctgaagctagtgagatacacgaacccaccggggtgaactagcaactccagtacatgccgtcttaaaagctgtaacactcaggcgaaggtctgcagcttcactcctgagccagcaagaccacaaacccaccagaaggaaaaaactccaaacccatcggaacatctgagggaacaaactccagacacaccgcctttaaaaactaacaccgcgagggtctgcagcttcagtcttgcgttagtgagaccaagaacccatcaattctggacacactatcaactttgtttctccaagggtgcttcttaaactggatgatgcacaccctaggagtgtgtgtgtaggatggggtttgaagcagtagggtaaaaaacctagcatacattctattccagaggtgtcaatttaccagacaacagttattttaaaacttttttatgcaaaaacatgttatagggtggaatgcaacatttttatgggcctgtgggccatttgtatacatctttggagaaatggctatttaagtactctgcccattaattctaaacttaaaactaagacttcaaagtccctctaaggattttgctgggccacatcccaagaccctgaagggtattacttactcgccctctccaaactgccgaagtcggaagcaggtgacaaaaaagctgaccctggaatcaccttttgtaaatttcccacctccaagcttttcgatagtttgtaacactggctcctctccccaaaagcctttccttcaagtcccagcaactctccctgaccctgctgggaaggcgcaccaattacctgtcattccaggaaagctcatagcataagatgatcccattggtcatctcccagaaccagactttctgaaaagtcctcaaggaccagctagtccaatccctcactgaataaaggagaagcaaagtctagggaggtgaggtgattcgttgtcctcctaattagcaggtgagctcctggcagggctggggtttcatcttctgggctctctgcaaggtcgtgcccggcacgggccaggaacaatttcataaactcgtcatctagacggcctttgactgacaccatctctccgtgtggaggagccgctggggtgcacggggcaggtgtcgtccgtttcaaaggtaaaataacccagctgcagacctccagaggccgactagagccggggtcagaaaacaggttttccctctcggggacagcgcccaggggaccggcattagaacatcggctgatgtttcatctggtcagggaaccatccagcgcttagtacacctggcgctaatcggcggggattaatctcacaccccgcagctggcggaaagcagcgggaggaggcacctagccctggggttgagatcccagttcccgcgtgcgcaaaccacgcccctgtagattctcgctgctgcgtgttcgcgcgcgtcccggagtgcgcatgcgcagcggcgggggttgttccggctgcctttcactgaggggacccgccagtttctaactcagtggcgtttgccctgattcccggggcctggctttcagcgtagcaattctgccggcgaagaaggtgagcgcagtgctgtgtggcagcagagctccttaggacgaggagcagcgggacgaggaagggcagactggtgaaatcgcaaactgggcgtctgttccggcgccggacccctatttgcaaaggtgggtggcccgtccggagcgggaaaacattccggaagtggagggccgggccagcgtgattgacaagcgggaacccctgtgtggggacgggtaggcctaggaaggttgtgcctgcggtggaactgggcggtgcgcagaagtgggcattaacagcagccgcgtgtctgggtcttagatttggcccagctgtgttgagcttttcatggattatcttacgtagataagacactgcaacagtgagtgagcgcttgtaacccacctgtctcttacggaaactgagccccagcgatgctaactttagcaaggatacagctgggatcctaaacttggcaatcagagcccagagccgataaagttagctgcatgagtctagcttcccccagggcgggaatcgaggcggagcagggtacagtacggaggccaggaatgagtgcacttgaccagattgttgacggaagtgtcataaaaatggacttaaatgctgataagcagctgtttgggttccacacagggtgcgagctcaggatgcacgttggaggggacacagggccagagcaaggtgggaatgcgggtattatgggccaggccatcctccagctggtggagcaccgcagtactgcagtgtgtggccctggcttaacagcagtgcggaaaagcttttttcttggggctgtggtgctttccaggtgtgtgaagttaaaacattttagggccatacggtagatagtacctgccacatagttgtcttggtcagccccggctgccatgacaaaataccataaactgggtggcttagacacagaaatgtgttttctcacagtcccagaggcttgggatgtccaagatcaatgtgggga

SEQ ID NO: 1718 - DNA, 6000 bp, Homo sapiens
ggtgatcaaatccatatatccagcttttaccaccttcctgagttctagtccccccattttcaaacaccactgaaaatttagtttgactaagtacatcaacctattatgtgaagaaacaccatgtcccacccccactacggtgtggcttaatgagctaaagtaatatatcaagatagacataataatccaagaaactggggttcagagaagtaaatattattagggtgcatcttgcgctgttccagagtgaggcatatagggttttggggacagaacaatctagtctctgataatgttttctcttatagcacaggcacatttcatgagcctttcccactacctaggtgttccagtttggatgtggtttgtttggcctaagtctcatgttgaaatctgatttccagtgttggaggtggcgtctggtgggcaatgtttggaccatgggggtacatccctcatgaaaggcttgctgcccttatggcagaagtgactcagttctcactcttagttcccaagagaattgcttgttgaaaacaaacttgtacctcctacatgctctccttctagaagaggatctaaggaaatttataataaaagcagaggaacgctgaaaccaaacccaattcatatcagtaatagctaccatttgttaagcttccacaatgacaagtaagatgttaagccctttatgttaccaggattatctcatttatctcataagaattctagaacataggtcctattattatctttattttattcgtgagaaaagcagagactcagaaggcttaagtcataggccaaggtcatccagccagttgaatggtggagtggggaatatctggatccaggcagtcagactgtttttttttgtttttttttttttgagacggagtctcgctctgtcacccaggctggagtgcagtgccgtgatctcggctcactgcaagctccgcctcccaggttcacgccattctcctgcctcagcctcccaagtagctgggactacaggcgcccaccaccacgcccggctaattttttttttttttgtatttttagtagagacggggtttcaccatgttagccaggatggtctcgatctccagacctcgtgatctgcccaccaggcagtcagactttattagaacatgcacttaaaattagcaagaaggaatgagaacaacaacaacaaaattaaaaaatgcttgccaaagaaaactaaaacaatgtgcaatatttagccctgagatcactagcagtgaaggcaaagaagaatgcataatgggtttctacagctctcactgtccggttatagaaaatatttctacattagtacaagcacttttcttcctaagccctgagttttgagagtttatcaagaaggcctctgagttcattcaattaatggcatcatctaaggctgtttaataacaaatgcagaggtagtccacataaggaacttttgcctttacctttgagacaaagcccagggcctcacgttaggagtacagctctctaaatataagcctccagggcagaagcgaggggaggatggagggacacaatgcagatttacagcctggtgggtacggcctttgtcctctccatgtctattgtcactcttgaggtccaagcctctactgcactgcctggtttactgcacaacccaacttggctgcttgcttctggtctctccccaccaaaccatccttcacactgcttccagcttaatatttccaagacactgcatttgcaaatccactcctctgtttaaaaatgtttcagtgacttgcaacttgtctacagtgtgaagtataaatttattagcttgttgtttaaagccttctacaaccagaccccgaccgaccttcacgtcctattgagaggtgacagcctgctggcagccctcgcagccctggctcgctcttggcgcctcctcggccttggcacccactctggccgcgcttgaggagcccctcagcccgcagctgcactgtaggagcccctttctgggctggccaaggccggagccagctccctcagcttgcagggaggtgtggagggagaggcgcaggcgggaaccggggctgcgctcggcgcttgcgggccagcgcgagttcccggtgggcgtgggctcggcgggccccgcaatcggagcagccggcccgccagccccgggcagtgaggggtttagtacctgggccagcagctgccgtgctccatttctcgccgggccttagctgcctccccgcggggcagggctcgggacctgcagcccaccatgactgagcagcccgccatgactgagccgcctgccggcgccccagccatgggctcctacgcggccggagcctccccgacgagcgccgccccctaatccgcggtgcccagtcccatcaacccccaaagggctgaggagtgccggtgcacagcgcgggattggcaggcagctccacctgctgcccgctgccgcatccacttggtgaagccagctgagttcctaagtctagtggggacttggagaacctttatgtctagctaagggattgtaaatacaccaatgggcactctgtatctagctcaaggtttgcaaacacaccaatcagcaccctgtgtctagctcagggtttgtgaatgaaccaatcggcactgtgtatctagttaatctggtggggacttggagaacctttgtctagctaagggattgtgaatgcaccaatcggcactctgtatctagctcaaagtttgtaaatgcaccaatcagcactctgtgtctagctcacggtttgtaaatacaccaatcgacactgtgtatctcgctaatctagtggtgacctggagaacttttgtgtctagctcagggattataaacgcaccaatcagcaccctgtcaaaacggctcaatcagctctctgtaaaacagaccaatcagctctctctaaaatggaccaatcagcaggatgtgggtggggccagagaagagaataaacacaggctgccctaagacagcagcagtaactcactaggattttcttaccacagtatggaagctttgttctttttgttttttaggtctgcactgcctttatgagctgtaacactcactgcaaatgtctgcagcttcactcctgaagctagtgagatacacgaacccaccggggtgaactagcaactccagtacatgccgtcttaaaagctgtaacactcaggcgaaggtctgcagcttcactcctgagccagcaagaccacaaacccaccagaaggaaaaaactccaaacccatcggaacatctgagggaacaaactccagacacaccgcctttaaaaactaacaccgcgagggtctgcagcttcagtcttgcgttagtgagaccaagaacccatcaattctggacacactatcaactttgtttctccaagggtgcttcttaaactggatgatgcacaccctaggagtgtgtgtgtaggatggggtttgaagcagtagggtaaaaaacctagcatacattctattccagaggtgtcaatttaccagacaacagttattttaaaacttttttatgcaaaaacatgttatagggtggaatgcaacatttttatgggcctgtgggccatttgtatacatctttggagaaatggctatttaagtactctgcccattaattctaaacttaaaactaagacttcaaagtccctctaaggattttgctgggccacatcccaagaccctgaagggtattacttactcgccctctccaaactgccgaagtcggaagcaggtgacaaaaaagctgaccctggaatcaccttttgtaaatttcccacctccaagcttttcgatagtttgtaacactggctcctctccccaaaagcctttccttcaagtcccagcaactctccctgaccctgctgggaaggcgcaccaattacctgtcattccaggaaagctcatagcataagatgatcccattggtcatctcccagaaccagactttctgaaaagtcctcaaggaccagctagtccaatccctcactgaataaaggagaagcaaagtctagggaggtgaggtgattcgttgtcctcctaattagcaggtgagctcctggcagggctggggtttcatcttctgggctctctgcaaggtcgtgcccggcacgggccaggaacaatttcataaactcgtcatctagacggcctttgactgacaccatctctccgtgtggaggagccgctggggtgcacggggcaggtgtcgtccgtttcaaaggtaaaataacccagctgcagacctccagaggccgactagagccggggtcagaaaacaggttttccctctcggggacagcgcccaggggaccggcattagaacatcggctgatgtttcatctggtcagggaaccatccagcgcttagtacacctggcgctaatcggcggggattaatctcacaccccgcagctggcggaaagcagcgggaggaggcacctagccctggggttgagatcccagttcccgcgtgcgcaaaccacgcccctgtagattctcgctgctgcgtgttcgcgcgcgtcccggagtgcgcatgcgcagcggcgggggttgttccggctgcctttcactgaggggacccgccagtttctaactcagtggcgtttgccctgattcccggggcctggctttcagcgtagcaattctgccggcgaagaaggtgagcgcagtgctgtgtggcagcagagctccttaggacgaggagcagcgggacgaggaagggcagactggtgaaatcgcaaactgggcgtctgttccggcgccggacccctatttgcaaaggtgggtggcccgtccggagcgggaaaacattccggaagtggagggccgggccagcgtgattgacaagcgggaacccctgtgtggggacgggtaggcctaggaaggttgtgcctgcggtggaactgggcggtgcgcagaagtgggcattaacagcagccgcgtgtctgggtcttagatttggcccagctgtgttgagcttttcatggattatcttacgtagataagacactgcaacagtgagtgagcgcttgtaacccacctgtctcttacggaaactgagccccagcgatgctaactttagcaaggatacagctgggatcctaaacttggcaatcagagcccagagccgataaagttagctgcatgagtctagcttcccccagggcgggaatcgaggcggagcagggtacagtacggaggccaggaatgagtgcacttgaccagattgttgacggaagtgtcataaaaatggacttaaatgctgataagcagctgtttgggttccacacagggtgcgagctcaggatgcacgttggaggggacacagggccagagcaaggtgggaatgcgggtattatgggccaggccatcctccagctggtggagcaccgcagtactgcagtgtgtggccctggcttaacagcagtgcggaaaagcttttttcttggggctgtggtgctttccaggtgtgtgaagttaaaacattttagggccatacggtagatagtacctgccacatagttgtcttggtcagccccggctgccatgacaaaataccataaactgggtggcttagacacagaaatgtgttttctcacagtcccagaggcttgggatgtccaagatcaatgtggggaggacacaactgagcccacaacaatagtctgtactcagtaatgagtgataattggggactgaagaaaatgaacacgttaagaactaatatgttcctgaagtgctttcacaactctaacctcgttttatgagcgtgagctttgctgtcctggtgtgtgccttggcactgggaggtgatggttgtcctccacacagccaacctgaagagggctgaacaagtcactgcaaatgtttttaatagggcttagtgaatccgttatactcagatttatctaaacctctatgatttagcctgtgctgcttctggaataatgagatc

SEQ ID NO: 1719 - DNA, 6000 bp, Homo sapiens
cccagactcaacccgaatgagaatccggatttcttgggaggcaatgtgaacaaggggtggggcatcaaagccatacattttctactgcgggcggcatctgggtgcacagccatcactgtccctccaggcctcttgatattcgggggacatggcgggcacctccttgctgggctcctgtcttgtgtccatgtcacagtcagggaatgttagagtgaatgccctttaatgacagcctactgcaaacccctctttgcttagtgagaaagccccttgaggggaggtgaattcctgaaagttggtgggaaactggagtacctgccttggtaggaccagaacccatgctagctctgcccctagcagggtgactttggacagggcccttcacctccgagcctcggtttccttatttaggataacaagatagtaatgactaccccccggggccagtggcttgatgtagctgctcatgcacaagtgctgtagatgtaaagattgtggttaggagtggccagcttgggcctggaggctatgatttctgactcctggactggtactttgccacaggcctttccagccctcctcagccccaatccctgaggacagtctgtggctgccccactgggagatgcccagcgttggaattgctgaaggaggcctctccaggaaggcttctccacttgtgtgccctcccatggggccggcctgctcctaccccacccacttccccttctccaggataagcccgctgcaacagctccgtctcccagtgtctcagcctctctggctgctcagcccagcctggtccagctggctatgctggcatggaccctagtctggtggccagttataaatagcccctgcacccacagccttggcagggtgctcctagtgtgggtgcagaggacacttgagaagaggcagccgtgcctgccatcctgaccatgccaggcccagagctgccatggaggcacccaggagcaggcccaaggacacatgggccctatgagctgaggaacctgccctgggcacagggttctgcaggcccaacgtggccggtcagggctggctgtaggcttgaggcatcactttatctcatgactggggatagagcatgggagggtggcgacccagagggcctgtgaggcttggggctggaggcagaacaaagtgggcctgtttgcctgcctgattgcttcctttgagcccaactcattagagggcagctgggcaaatcctctgattccagggagggatgaagggagggagaaggcagggccaagaatgtcctaccataggatctgcagcccatcggagatcactgtagccctcagcccccggcccagggaggagcatgtttagtggaggagcactgtggtggagtcggaagactccgttcaaacaccaccagtgatacagtgttactgtgcacagttcatgtgacttttttctcacgagtaaaatggaattgataatacctaccttgcaggaccacgacaggattaagtgaggaaaaacccccatgagagtgttttgccattgtcaagtgagcctgagggaggctgaggggggatcaggctgtatcatgcccccgaggacaaactttccagtttaccctgctccctctctctgtccctaggctgccccaggccctgtgcagacacaccaggccctcagccgcagcccatggacctgcgggtgggccagcggcccccagtggagcccccaccagagcccacattgctggccctgcagcgtccccagcgcctgcaccaccacctcttcctagcaggcctgcagcagcagcgctcggtggagcccatgagggtaaagatggagctccctgcatgtggggccaccttgagcttggtccccagcctccccgccttcagcatccctagacaccagtctcagtcctcaactccttgtccctttctgggctgccggccctgcccacagctctccatggacacgccgatgcccgagttgcaggtgggaccccaggaacaagagctgcggcagcttctccacaaggacaagagcaagcgaagtaaggaggtggccaccccagcccagcccagccccaccagccaggtgcctgcggctgcctgtgtggcttgtgaggggtgaggtgggagggccgcagccagctgggcctgagccgaggctttccctctgcttgcctgggctctgcctgtgaatgtgtgggggatgtgggggtggggggtggtgtctggaggctctagggaggggtagggcctcgggcttggctcttgcctagggagtccctgggacgcctcctactgaggatggggacagggcagtggccaggtagtgccacgaggccgcctgtccacccacctccagccccctcctgactctgcccctacaggtgctgtagccagcagcgtggtcaagcagaagctagcggaggtgattctgaaaaaacagcaggcggccctagaaagaacagtccatcccaacagccccggcattccctacaggtaacaccctcctcacctgccctcctgtccccacatgcaccctccacccccgcccccgtgttagccatgagcacacacacttgcctccttcctccccagttgccacaaccagtccttacccttcctctaaacataatgcccccgagcccctctctcaactgatacctgccctcctctctttaaattctccccaccccacctgagcccttctcacacacacacacacacacacacacacacacacacacacaccctactggcttttttcttgcacatgagccccttctctctttatattttccctgagcgcaaaaatgtcctggttcccagagcaggttcctagtgcaggtgacagagcccccagtgggctcttcacccacgcaccaagcacctggcttctatgcctaggtcagagctctgcactatagctgctggagcggacaggcggcccactgctgccacctggagatggtccccattcctaccagccccacattgcccagccctgcccgctgcagcctccccctcaggtcccagggcccgtgctcagggcagtgcccgtgcagtgtccccacacctctgaagcagccttggcactcgttctgtagaaccctggagcccctggagacggaaggagccacccgctccatgctcagcagctttttgcctcctgttcccagcctgcccagtgaccccccagagcacttccctctgcgcaagacaggtgagctgaacaaacaggcggacctttcaggcaaaggaagggggaagggcctcggacatgggggaggagtgtgcaggggtgggcgggctgggctgggccaggagatcatcggtaggctaggatcttctttctagttctgccttctctttccttgaccgatagagatgactgggactgaggggttaaagggtggaaaaaagaagggtggtgggggcctgagtgacgctggtgctccctgcagtctctgagcccaacctgaagctgcgctataagcccaagaagtccctggagcggaggaagaatccactgctccgaaaggagagtgcgccccccagcctccggcggcggcccgcagagaccctcggaggtgagggccggctgagccagtgcggttgccatcctcaaacctggctggtcttgtccctttgggtcaggccccacctagacaggggtcccctccttaggactgccatgcgtggttgcatgggggtgtcccacacacttgccgaagcgggggagttggggctgaaacccagtccctgctctgttagctaaggtgacatctcccagaaaagggggcacccttcaaaaaattatgcaaaggtgctgtaggccaaaggtggcctgtcttcttcctgctctgatgggaagaaagcaggaggccgggcgcggtggttcacgcctataatctcagcactttgggaggctgaggcaggtcaatcacctgaggttaggagtttgagaccagcctggacaatatggtgaaaccctgtctctactaaaaatacaaaaattagccaggcacggtggtgcatgcctgtagtcccagctacttgggaggctgagccaggagaatcgcttgaacccaggaggtggaggttgcagtgagccgggatcgtgccattgcactccagcctgggcaacagagcaagactctgtctcaaaaaaaaaaaaaaagaaagcaggaagcaaaggtgctcgttaaggaagggggtgctcccgggtctcctgcaccaggcggcctggctgtaccctcctgcccaccctggcctctgactgcacttccctctctccccaaccctcagactcctccccaagtagtagcagcacgcccgcatcagggtgcagctcccccaatgacagcgagcacggccccaatcccatcctgggctcggaggtaaggccttgccgagactgggctctcctggggcagttctgaggctcagccttcttccagcaggcggccctacctgggctggggctgcagggtctgggcagcccctgccagagcctcctgggtgttctggggaaggtgcgccggggtagaggtctgggaccggtgaccctcgccctgctccctatggcaggcgctcttgggccagcggctgcggctgcaggagacttctgtggccccgttcgccttgccgacagtgtccttgctgcccgcaatcactctggggctgcccgcccctgccagggtgagtggctggggtgcccacccccactccaagcccccccagcttctttcactcccttttcttgctgcctcaccccatcatcttcattgttctctgctggaatcttcttccccgtgacttctcccgcctctcccccaggctgacagtgaccgcaggacccatccgactctgggccctcgggggccaatcctggggagcccccacactcccctcttcctgccccatggcttggagcccgaggctgggggcaccttgccctctcgcctgcagcccattctcctcctggacccctcaggctctcatgccccgctgctgactggtgagtctgctgcttcttcagggaaggggctgggtccctgcaccctgctaagagccaagcttgggatggacccatccttcctccccatctctgtccccctgtcctgcgcattgccctgctgcaccctggccccccaccctataccctcgcttccttccattgctccctgtggttccctccttattccaccccccgattctttccagtgcccgggcttgggcccttgcccttccactttgcccagtccttaatgaccaccgagcggctctctgggtcaggcctccactggccactgagccggactcgctcagagcccctgccccccagtgccaccgctcccccaccgccgggccccatgcagccccgcctggagcagctcaaaactcacgtccaggtgatcaaggtgagaggaattgggcagtggaggtattgagggagtgtttaactggggacttaggggccaaaagaagaggggtacttagaaagggcagggaactggagggcaaaagagggggatgtggcttcttggggcccagagctgcatggcagctggagtcctagcaagatgactggctgcctggcccagcccaccacctcccaccccatgcccctcgctccaccatggcttctcagccaggttctcccctccccagaggtcagccaagccgagtgagaagccccggctgcggcagataccctcggctgaagacctggagacagatggcgggggaccgggccaggtggtggacgatggcctggagcacagggagctgggccatgggcagcctgaggccagaggccccgctcctctccagcagcaccctcaggtatggcagtccccacctgcccctcagaaagtgtcctcagaagactctggggcctggcataagatggggaagggagggagatacgacatcagtgcaacaggcagctctaggacccatggttgccctataagatcctgggtgctggatccac

SEQ ID NO: 1720 - DNA, 6000 bp, Homo sapiens
agcccacaccacagaattcagggtcattaatttttctcctatccagagagtgcatggtgtccggaatctgtggttaccaggggagcaaggcacagagaacctggctctgctcccaagcatgaatgctgctgaccagcccctgggtagggactggggaggtgggacagaattcccaggaggcaggggactcagcctgacacagtctctgggagtgcaccctggagcccagtccagaaacctctgggaggaccaggtcctgcagaagaaagaagaggtactaagaaggcctgggattgggggttaccatgtcgtggggaggggagtttgcctctgaggcccaccaccttgagaaatatgcatgctgtgtctcaggcaggttgtcaggagagagtcattgtatttgatttgtcagctactaacagagcctgccacgtgccctgcgaggtgtttggtgcagatgggcatggcttccacagggcaccacagagatcatgatgaatgaagtgtcaaggtggtagacacagagcgagtgctgtggaaaaggaagaggggagaggtcagggagagcctcccaaggagatggacttgggctggacctcagaggatgggcagaatttaaataggtagagcagcattttcggaccgaactttgttacccaaagcatgggctggtttgaggggcagtcggtgggagtctccctgtgcccaggctgccccctcccccagcagcgcctgcctgcaggaagttctcatttctcggctctgaagaggaactgtggctgcctctgagacacagacccaaaggagcaccccggcagtttctcaaaaaatatcccttctgccccaagtctggccagcagagcgcttctgtgtccacccagtaccccgtccaggcagcctctgggtctcctggcctcctgtccccttgaccctgaactggacagcaagagggaaaggtgtctgtcctggacaggtggcctcaggactcatctctgtcttctccaaccccagctggcctccatgtcccctgggggctttctgctgctgaccagcttgggccctactataggttttcttgctgggcttaggagcctgagagaggtagccatttccaaaagaaaagatttctatctcagattatctgggaaagaggctgagtaggtcccttctctgaggaaacaggcagcaggacataggatggggcagtgggaggaaaagggtctgcactatggggtccttgggctgtgcactcctgaccttatcacttcacagttcccaccagatctgacttgacctccgggccatgacccagtccctcccccactctggaaacctctgtgtcccctcctgctcctttcactcccacctgggaggctctgagcaggccagggtccctctctccaggcctgctcctccctttctcctcctgtccccccagccatccccccagccaggctctcccacctctggccccacctcacctcttggccttcttctttccctcgggcgatgggagcctggtttggctgcccagggaagattgtatctgaccacaggagggagggctgagggcactgctgggtgagctgaggcctccttaggttcttgctgtagtctgagttcaagtcatttagaatgagtgacttgaggaagagggagctgggagcccttttcaccagcagggggactggaggagtcgaatggggtggggtcttctcgttttgattagcttctggtggaggtcccaggctttggcgtgctcaagcttggagtggcagggagcaggcctggcttgaccttctttccttcctgctccctctcctcacccctccctgcagctctttcactccgtctctctctctacagatgggacccaggtgagcccgggtgcccactactgcagccccactggcgcaggtaagagtcaaacccgggggagtccatggtagggagtggaagatgaggggtggaaaggctgtaagaacgcgagaagctgaggggttagagaagcagggtcgctggctgatctgccagagagccaggaggtggcggctccagggaggggcgaggagccggggtaagagaggcagctctggatgctggctgggcacagtgctaggaaacacaacaggaaaaggaaacacaggatgcccgtcttgtccttgctgggagcagtgaaacaggaaggaaagtaagaagctaatatttatactgagacccctaccccatgtcaggcaccaggcaaggtgtgttcttgtgtgtggactcggtcctcacaccggctctgcaaggtgggcatggcagcccttgcaggactgctctgctggaggggaagtgttctctcactgtctgcgcctcctccctctgctggcccgagcctcctctgctgctaggctgccctggggaaggactggacttcctgctgctgctttggtttaggacatgcccatggggccaggtctggactagacgcggtctgcccttcctttagtgtagccagtatcaaccaagggcctactgagtgcaagatatacagcctgatgcctaataattccatatagcagggagaaatggaacccaggtatcctccttgcttcagtcctggctgttgaaaagctaacaggcaggttagggaggaagcacacacaaatacaaagcgaaaaaaaatagaatgcaataatgtgaccagtgcccaatgagaggacactgattcatgagtttatccatttgttcaagaatcattaatgagttctgtctctgtgccagggtactttcctggacattttaggagagacactgatttattcattgattctatgtttgtggagtgcctgtcatgtgctaggtactattccaggtgctaggaataataaacaaagcatgaaaccaactccctgccctatggagcttaactcagacatggtacctgcccacagagcactaatcctggtgtggaacagccatgtgattggagtccaaaagagggagggatgctaggcgctggctgggtccagggatgagggaggactccagctgagctttgagcaaagagtaggatttggaaaagtagaatgtagggatgaggacagcacaggcagggggacattgtgagcaaaaggtcagagaacagaagagatgtggatttgtgacaggtggaagctgatggccaaggtggagggttcatgttcaaatgcagaccaagttgagagaagccaagttaggaccagattgtggagcctcacaaatgctaaagcacctcgaaaagtatttccagggctccaggcagagcccatcctgtattcccttctgctgtggaggcagtggccatgcagagtgtgaggggaagggcccctgctgggggtctgctcacagtccgtatgtggctgaagccactggtcttgggtccaggtcgctggccttggttcccccaagcccctcttgcataatcaggggagtcaccccgggaagccaggacacagaacatggaaggactgaaacctttcctggggcaggagtgttttggtattcgaaacccagactcaacccgaatgagaatccggatttcttgggaggcaatgtgaacaaggggtggggcatcaaagccatacattttctactgcgggcggcatctgggtgcacagccatcactgtccctccaggcctcttgatattcgggggacatggcgggcacctccttgctgggctcctgtcttgtgtccatgtcacagtcagggaatgttagagtgaatgccctttaatgacagcctactgcaaacccctctttgcttagtgagaaagccccttgaggggaggtgaattcctgaaagttggtgggaaactggagtacctgccttggtaggaccagaacccatgctagctctgcccctagcagggtgactttggacagggcccttcacctccgagcctcggtttccttatttaggataacaagatagtaatgactaccccccggggccagtggcttgatgtagctgctcatgcacaagtgctgtagatgtaaagattgtggttaggagtggccagcttgggcctggaggctatgatttctgactcctggactggtactttgccacaggcctttccagccctcctcagccccaatccctgaggacagtctgtggctgccccactgggagatgcccagcgttggaattgctgaaggaggcctctccaggaaggcttctccacttgtgtgccctcccatggggccggcctgctcctaccccacccacttccccttctccaggataagcccgctgcaacagctccgtctcccagtgtctcagcctctctggctgctcagcccagcctggtccagctggctatgctggcatggaccctagtctggtggccagttataaatagcccctgcacccacagccttggcagggtgctcctagtgtgggtgcagaggacacttgagaagaggcagccgtgcctgccatcctgaccatgccaggcccagagctgccatggaggcacccaggagcaggcccaaggacacatgggccctatgagctgaggaacctgccctgggcacagggttctgcaggcccaacgtggccggtcagggctggctgtaggcttgaggcatcactttatctcatgactggggatagagcatgggagggtggcgacccagagggcctgtgaggcttggggctggaggcagaacaaagtgggcctgtttgcctgcctgattgcttcctttgagcccaactcattagagggcagctgggcaaatcctctgattccagggagggatgaagggagggagaaggcagggccaagaatgtcctaccataggatctgcagcccatcggagatcactgtagccctcagcccccggcccagggaggagcatgtttagtggaggagcactgtggtggagtcggaagactccgttcaaacaccaccagtgatacagtgttactgtgcacagttcatgtgacttttttctcacgagtaaaatggaattgataatacctaccttgcaggaccacgacaggattaagtgaggaaaaacccccatgagagtgttttgccattgtcaagtgagcctgagggaggctgaggggggatcaggctgtatcatgcccccgaggacaaactttccagtttaccctgctccctctctctgtccctaggctgccccaggccctgtgcagacacaccaggccctcagccgcagcccatggacctgcgggtgggccagcggcccccagtggagcccccaccagagcccacattgctggccctgcagcgtccccagcgcctgcaccaccacctcttcctagcaggcctgcagcagcagcgctcggtggagcccatgagggtaaagatggagctccctgcatgtggggccaccttgagcttggtccccagcctccccgccttcagcatccctagacaccagtctcagtcctcaactccttgtccctttctgggctgccggccctgcccacagctctccatggacacgccgatgcccgagttgcaggtgggaccccaggaacaagagctgcggcagcttctccacaaggacaagagcaagcgaagtaaggaggtggccaccccagcccagcccagccccaccagccaggtgcctgcggctgcctgtgtggcttgtgaggggtgaggtgggagggccgcagccagctgggcctgagccgaggctttccctctgcttgcctgggctctgcctgtgaatgtgtgggggatgtgggggtggggggtggtgtctggaggctctagggaggggtagggcctcgggcttggctcttgcctagggagtccctgggacgcctcctactgaggatggggacagggcagtggccaggtagtgccacgaggccgcctgtccacccacctccagccccctcctgactctgcccctacaggtgctgtagccagcagcgtggtcaagcagaagctagcggaggtgattctgaaaaaacagcaggcggccctagaaagaac

SEQ ID NO: 1721 - DNA, 6000 bp, Homo sapiens
ggaaaataattctaaaactcacagtggtacaaatcttttcatgtattattcatctgatttcaggccagccctgtgaggtaagtagccaagatattgctatttacaaagcaggaaactgagacttagaaaggtgtgacccaggaagttaatggcagagctgggcctaaaactcaagttccctgactcccagcccaggctcctgatccccacaatgtctcctttctagctctctcctgatgctcctggctggggacctggcatagtcaagggggtgaccgttgccgtcttttcattcatggtaccttctttgtcttgggcttgaggagactgtctggcttcctgcccctccccatcctgtcccagtgctttctccttgtgtcccctgccacatagttggcacatagacacatacatgtatattcagaactgcaggtgtctagggcaacagaccacaggggaaaccacatcacctttgttgactctgtagggagatgggggtaaggggaagggaccagcttagttctctccacctgccccagtccccacagtcatctaccctcccaacctgagaccctggtacttatagccacactgtagcctcttcttgatctagccatccaattctggcccagaaggatttggcacctcttctctcagatcctgacatcctagataggggtctgcctgcctgtaccccaaagtcacacccccaaccctactcagaatacttatacggttcccctgattctgctggtgcagtgcaacagagaaaggtgggaaacagggatgagaccacatggctggggtcagaaacttggcatctggaatgagatgtacagggacctcaaggaagcaggctacactggaacaggagaccctggcaatgcgtccttcattattttgacctgctaggaaattgcacaggctctgaatcagacatacttgggattaagtaacttactggctctgtggccttgggcagatcattttgtctttctgagttttactttgctcatggaaacaatggggataataatgagatttaagtgaaagggctttgaacagcgtgcgatatgtagaacatgctcaataaatcctaaattatctttccttccttctttttcttccactccttccttccctctctccttccctctctccttccctccctccttcctttccttccttccttcctttttttccttttcttccttcctttcttctttccttcctttctcccttcttcctttttttccttttcttccttcctttcttctttccttcccgtacttcttatatctcttatgtctggtcccatgaaaccctttatttggagttggggacctaatctcccttactaatctgcaagtcccaaaccctgagaattggcatttgattccagatccagaaactgaaatgcaagatccaaactaacccaatacaatgagtgtccactgagatctcactgaactgaggccttggggaaggagcactttctggttggctttgtgcgaagtgtgtgaggataagtgcaggctggcggaggaattgtggctatggcccccacatctagaaggttgggaacggagggtatcagaaagtttggataattttctggggctttaaatcctggcacaaagtaggcacccaataatatttgttgaatgaatgaatggccctgtcacttactagttgtgcaactttgatcaggtttcttaaccataaaggccatgctttactcatgagcataacaaggattattgttaagaataaatgatctaatgtttgtccaggggatagcaaggactgctacgcagtaaatggtaaacagtagctaactaaggaaagaaggagaggaaaaggagaagagaaggtcaagtaggcccagagtcccaaagggaagcagattggggtgccctcaggctttgtgctggccggagactctagggaaggctcaggaagccaaggcacgtcttttggggccagtctcttctgctaggtgttcagctgagaaagctatgagaggcctggactcaagagctttttaaaaaaaggctccccacggtaaccaggctagaagagagagaggtagcttgcatttctctgtctcatgtctctaaggttcttggaggctttctaatttatcctggtaggggacatgtgacttagaaactggcttaggactctgccatgaggcggggtctggtaagtaaatctggcaggggaaggagagacacagtccagctttcccagatgcaggttgcacatgctgtctttttctctgactatatgttggaggcagtgagtcctggtgtgtagaaagccacatgttgggcactgtgtggacagacaggcagggagatagcctcttaattcagatcactcaaaactcagtgatgagtttaaaaagagaaagaagactcacaaataaatgtatgcacaatgcacatggtagaaatgagcataaaagggcctggctttactacagaaatagctacagaaaagctacggatatgtgtgtgttgggggttgggatcaattgtggagctagacaagggagatagcaggcatgtcgctgggggtctgcagtaaccaagcagtttttctggagtctgtggacaccaaagaggcatttggaaggaggatgatctggcttggaattgagggctggggatgacatacctaaggtggaacagcatgtgtcttggagagtcagcatgggtagttatggggtgaaagaatgtactgtaggtgtccagctggagaagggttcttgaaagtcatgaacatctgtcccaattcaacaaataactcacatcaagtttgaattctgtgcaagacactacaagaaatgcacccatgaccaaggcagtagctggactcagggatatccactcttgaatgctcttggaaggaagagagttgagacaagtagactaggtgggcgaaggtcaatgtataaagaccacacagttcagggaagaattcctcttggctatgggaatccgggaaagcctcccggagaaagtggtatgccactttctttttcttccagtccttccttccttccttccttccttccctccctccctccctcccactagatagggagtgggtcttgaggattggaaagatttcaacagaaggagaaaggggctgggaggacatttcttttggaggcagcatgatgagcgaaggcaagggagtgtggaagcgtgaggacaggatgggaagcagctagcagcccagtctggcagaaataatgatagtaataatagtgactaacactactgagccctaagtaccaggaggcactgggcagggatgtgtatggagtgtggtgccaggttgtaggaggacttgaatgccaggaaaggcttttgggagggtaagttaacaagcgcagaggggttggatctgcctgccgaaggagaactgggacaaggaaaggggctgaagtaagaagtcccacgctgaatatgccggtagcaacagatagtgagtcccgagctgtgcctgagggaagggaatagaatctatggtttgaagttcaccgccagcatggccaagccctcctaggccactgtgggctcttgcttccaatcagacatgactccacctctggggctgcctcaatttttccttctctggattcttggggtttcttaggattgcgggagatagaatggggtcaggggaagctgctccttggtttacaatggtggcgcctcacgctgcagagagcccagtgttcctgcgtggtggacctctccccttcctaggagcagctccagattgctggaggcagacacggctgaccggctagcccaggaagcacaatggcgaggtccttagcccctgacccctgaatctgaccttctctccagctaaaagcggagggagaggcagggagggccactgcctaaagccggccctgagctgagtttattagctgagggagggctggaggcggctgcattccgactcacagactggaacatttctgtgatccgctgtaatgcactgggggacactgggcacattgctgaagtttgactcatagggaccgggagggggaaagaggggggttgtggagggagaggaatgggaggaagagaggaagaggagaggagggaaggaagtcccttgagaaatttctttaaaaaaagaaaactttcaaaatctgcaccacccccacaccctttttcttttaataggaacaggctggacccttccgttcccctcagcaggcatggtgtgtgtgtgggggtgccagtgggggagggctgggcagtgattcaaatcagatcctggaactttcctgaggcaagtcgtgcttatgtgtgtgtgtgtgtggtggggggtgtccgtctgggattccttgtatgggacatgggacaccacgcgtgtcccactgtgcccgcgtgtggctgcgtgcttgtgggctgtacgggtatgtagtgtgtgcacgggggtccaccccgaagccccagtgtgtgctgtgtaaatgattctgccccttgtaaacatggatgcgtgctcgtgtacgttgtgtatgcgagggtgcgtgcgcccaggtagctgggtttccgggaattgtgcacggctcggagcgcctcgcggcggctggggctcggagccgcggccggcgttccgggttcggcgctgcctccccggcagtgcgccgcgccccgccgcgatctggccgcgcgcggtgtctgcggcccgcctgtgcgccgcgcggtgcagtgtctgccggggtggtgtgtcccagggccgcgagcgcctgccccctccctcccctcccccttggcccgctctcagactcagataaagcatttccttccattgtcatcctacccggccggccgggctgccagggccctccccctcccggccccctcccttcctctcgccgtctcacagtcgctctgcagcctccggcgactggggggatgtgaggccggcgccccagccccccgccccgccatgagccccccgctctgagggccccggcccctggatgcacagccccggcgctggtgagtactgggcggccgccccccgccccgccctgcgcgcggcacccagcgtcgcccgcccaggctcggcctccggccctggccccggctccggctccggctccggctcgggctcccgccagccccgcgggcccagcccggcttgcgccccccgaccgcgcctgtcccgcccggctccgcggggctctggcaggctccgggtcggagctggttccgggggccggagggctcgggcctcccgcggggcgcccacatccgcccgccccggggcagctacaggcccaagggagggagttggaggccccggccgccggtgtgcgggccccacgtcccatcacccctgttcccggggaggacgagccgagggaccggggagggagggacggccgcggtggcccggcgagggggcggtgctccggggcggaaggtttggaagcgcgagggcaaagggcaggacccactgagttggggctgggctttgtggggctggacatcagcgcccccatcccgtggagccgggcagggccctactcagatccttcggcggggaaagaggtcccttggaggggtctctggctgggaggtttctctgagcattgccccccatccttgctcacccatcagggtgaagagacacctgtgccctggtgagctgtggaggtcaatgccggcagcggcgcgggaagcggggcgccgcaggctgtgtgaggggtgggggacaggatgtgcaccccccaggcctggggtctgttggtgttggggagtgtgagagcaggcggcaaatttggcggatgggctgggttcccacgaccagagtttctaggcctgtgggccaggagagagccctctggggcccgcaggccacccagtgccccacccccattgcttcccgctgtggctgcccgtttgggtctgacctccccagccacggctgctcctcactccttctccccgctgg

SEQ ID NO: 1722 - DNA, 6000 bp, Homo sapiens
atacccagaacaagactagtctctagtaaataggaggagtagccctataggtatggcttaaaagaaatggagtaatatttacattttttaaaaaaggaaaattcctctggtttaggattttgtcaattattctttaagagtaatgtatctaaaggttaatgtatgccctaaagagtggcatacttaaccaagatagcagactcaatatggagtcattaatccaagagattaagtggagaaccaagcacaggtcagaaaattagacaacaggaatctggaataaatgatcttggctattgatatggtttggttctatgtccccacccaaatctcatcttgaattgtaactcccacaattcccacatgtcgtgggaggaaactggtgggaggtgatcgaattatggggcaagtctttcctgcactgttatcatgatagttaatgagtctcacgagatctgattgtttttaaaaaatgggagtttgcctgcacaagctctctctttgcctgccaccatccacttaaaatgtgacttgctcctccttgccttcagccatgtggaattgtgagttctccattaaacctctttcctttgtaaattgcccagtcttgggtgtgtctttatcagcagtgtgaaaatggactaatacagtaaattggtaccaggagtggggtgttgatgaaaagatacccaaaaatgtggaagtgactttggaactgggtaacaggcagaagttgaaacagtttagagggctcagaagaagagaggaaaatgtgggaaattttcaaacttcctagagacttgttgaatggctttgaccaaaagcctgatagtgatatagacaataaggtccaggctgaggtggtatcagatggatatgaggaacttgtcgggaactggagcaaaggtgactcttgttatattttagcaaacagactggcagcattttgcccatcctagagatttgtggaattttgaacttgagagagatgatttagggtgtctggccgaagaaatttctaaccagcaaagcattcaagaggtgacttgggtgctgttaaaagcattcagttttataagggaagcagaacataaatgtttgaaaaatttgcagcctgacgtgatagaaaagaaaaacccattttctgaggaaatctgcataactaaagagaagctgaatgttaatacccaagacaatggggaaaatgtctccagggcatgtcagaggccttcatggcagcccctcccatcacaggcccagaggtctaggagaaaatggcttcgtgggccaggcccaaggtccccatgtgtgctgtgtgccacctagggagttggtgccctgcatcccagccactccagccatggctgaaagtggccaacacagagcttgggctgtgatttcagaggtgcaagccccaagccttggcagcttccacatggtgttgagcctgtgagtgcacagaagtcaggaattgggctttgggaacctccgcctagatttcagaagatgtatggaaacatctggatgcccaggcagaagtttgttgcaggggcagggcactcatggagaatctctgctagggcagtgtggaagagaaatgtggggttggagcccccacacagaatccctactgggccactgcctcatggagctgtgagaagagggccatggtcctccggatcccagaatggtagctccattgacagcttgcaccatttacctggaaaagccacaaacagtcaatgccagcctggaaagggagataggagggaggctgtacccttcaaagccacaggggcagagatgcccaagaccatggggacccacctcttggatcagtgtgacctggatgtgagacagggagtcaaaggggatcatcttggagttttaagattcgactgccctgctggatttcggacttgcatggggcctgtagcccctttgttttggccaatttctcccatttggcatggttgtatttacccaatgcctgtaccaccattgtatctatgaagtaactaacttgcttttgattttacaggctcataggtggaaggaacttgcttgtctcggatgagactttggactgtggacttctgagttaatgctgaaatgagttgagactttgggggactgtggggaaggcatgactgtattttgaaatgtgaggacatgagatttgggaggggctgggggcggaatgatatggtttggcactgtgtccctacccaaatctcatcttgaattgcaactcccacaatttccacatatggtaggaggaacccggtgggaggtgattgaattatgggggtgggtctttcctgtgctgttctcatgatagtgaatgagtctcatgagatctgatggttttaaaaaaatgggagtttgcctgcacaagctctctgtttgcctgctgtcatccatgtaagatgtcacttgctcctccttgccttccgccatgattgtgaggcttccccagccacgtggaactgtgagttctccattaaacttctttcctttgtaaattgcccagtcttgggtttgtctttatcagcagcgtgaaaatggactaacacagctgttcaaaagataacatacatgactacataactgaaaaagtgcttattctactaaaaaatctattttgtaagtgcttattctcttaatagtaaagagtctgtgagggaagaaatttgaaatcccaagttcttttactttataactagaagtaagtcatttaaatcttcctgaacctcaatttctccagggtaaaatggagctaatactaactacaggcagtatatggcagaggtgacctgaatggaaagaaatacttctgagaatgaatgacaatcaagcatagtaagatcacccatgcctagaaatgacaaaacccaaaatattatcaaagcaagatgaaggattctaatattatccaaatctatctaaaattacccatatttaatcaaggtaaactgaatatggttccagaaaagcaggaatacagcttgcgtgaatggaaagatcaatggaattagatttaagatctacacttattagtggtgtagtgagggcaaactcccaaagcctcagtttctgtattgtgggtgttttgcacatttatctgacaaagatttatggactatttactagggccagggctttactaggtaagtgccatacaaaaatgaaggcattgctcttgccttcaatttcaatacaatgtaacaaatattataacaataagggctactgaatattttctaagtactaggtactattataaatactttttactcattaaatctttactccctttcactatctaaaacataggtattatcacagaaaagaggcatagagaagttaactatcttgcccagcaccaaacagttatcagaggctggagctgggatgtatctttttttttttttttttttttgagaaggagtctcgcaatgttgcccaggctggagtgcagtggcgcgatttcggcccactgcaacttctgcctcccgggttcaaatgattctcctgcctcagcctcccgagtagctgggagtacaggcgtgcgccaccacgcctggctaatttttgtattttcagtagagatgaggtttcaccatgttggccaggctggtctcgaactcccgacttcaggtgatccacccgccttggcctcccaaagtgctgggattataggcttgagccaccgcgcccggcaaaggagctgggaaatattttgacagagggcaagaacttgctaatctgtgcaagtgaggggtagtggtggaggctttccacactcaaggggcagttttagttcacccattcgcaaacgtacttaaaaattacctcttagagttgtgctgaataaatgaaacagtatatttaagtcagtattgtgcctgggacatgtaagctcttaattaatgttattaatttcattttattcctttaagttggatcactggcgaacaacgtgagaatgttttcatgcctttggctacacattaaagcgacctctccaaatgggttgtcgcattttacattgctaccaacaatgtaacagccttctagttgctttatgctccgatatacgaaagagccccaccatttgattctgtttttcagtttctgacagcctcacctactttctctttcaagttcatctgccacatttttacttattttatttttttgagacggagtctcgctttctcacccaggctggaggctggggtgcagtggcgtgatctcggctcactgcgatctccgcctcccgggttcaagcgattctcctgcctcagcttcccgagtagctgggactacaggcgcgcgacaccacgccggctaattttgtatttttagtagagacgggggtttcaccatattggccaggctggtctcgaactcctgacctcgtgatccgcccgcttcgggctcccaaagtgctgggattacaggcgtgaaccaccgcgcccggcccatctgccccattttacatcaccactgccgtcacaaacaaagttctcgtaagaaccgccaagcggcgcgtgggcggccgccccatcccactataattgcggcctcgcagcctgacccggggcgccaacgctcaatccggttctcgcgggaagatacacggtttttaagaaagaacttctaaccccactccaccgcccaacggtcacgtgacgcgcctgcgtcctcgcctcaaggttttttctggtcgcatattggctgttaactcggctacggggtgtagcgaggtgcattccggaagtaggtcctttgacttttgcttcctctacggaggcaagtaacaacccggcggtcgacgcttagcggaagttcgtcaagtcgcagttgcccccgcacagcggatgtgggtcgcctcttaggtgacgctgggaagtgcctgcagccttcgccgctgccttctggttgaagcactatggagggagagaggaagaacaacaacaaacggtggtatttcactcgagaacagctggaaaatagcccatcccgtcgttttggcgtggacccagataaagaactttcttatcgccagcaggcggccaatctgcttcaggacatggggcagcgtcttaacgtgtatccttgtggcctaggccttcggccttggagttggtcccgccatgctctggcgtccgggtctcaggctctgtgggggggacgaaagtggggaagaaggtgggcagaagctggatgtctagttgggagagcccacgatggggcgggctgaaactcagttagcgctagggaagcgaggcagagttgatttcccgctcgctcacccgtgccgccagccttgctgggaattcgtatccttcccggctttgtgttttaaccagcccttccaactctgtcttcattgtgttctgatctgctctggtgacgttaagattctcattttccgctgtgccctaggggtctaggtctggcagaggtttctctgttgacggctgcctcccaaacctagtgtgtaaatttcgagaaattcagtacctgaaagtgttataaagggtggactagaattaatgcctcagccttggtccaaaatccattcctcatctactagctgtttaagtgacctctcaaatttttggccgtcttgtctataaaatgggataatacctcttgtgtttgattctgtgtccagcacagtgctttgcattcagatgctcagttagtagctactgttttatagaatttcagaggaaagatgttagtttacgtttgtaggggatacccacgaatctaatgttttaaatagtttacaaaataccgggtccttaacttacttagagtgatgatatgtatttcattttcaaaaatgaggtaacggctggatgcggtggctcacgcctgtaatctctgcactttgggaggccgaggcgggtggatcacctgaggtcaggagttcgagaccagcctggccaacatgattaaacccctgtctctactaaaaataca

SEQ ID NO: 1723 - DNA, 6000 bp, Homo sapiens
atagtccaggtaacagataatggataatggggagttggaccaggagaccgtggaaaactggtaagatagggtcacattctggatatattctgaagcagggggttctaccatccacccaggttcttaggccaaaaatctcagtctcatccttgattcttccttttccctcatatcccatatccaatccatcagcaactccttggggttctatttccaaaatgtgccacagtcacagttcctgtccatcttcaccacccccacatgccagctaaaccacctgggtttacctctcacctagatcactgcaatacccttttacctgatctttctgcttcctcttttgccccctgcaatctagtcttcacaagcagccagagggatcattttcaaacttagatcatatcacaggatgcccttgcttgtgatcctttaagagctttgcaatgaaccaagaataaaggccaaaatccatactgagaactacacgggctggcatgggctgccctctgatgactcctctgttctcaactctttccctctttttattgatcgccctgctccagccacaccggggtccttcctgttcctcaaactcaccaaactccttcctgctttggagccagagctatcccctctgatggggtcggtgtaccccaccttattgtatgactggttgcctatcgacatcaaatctcagctcagtcatcacctcttcatagaagaccatcctgagaactttcatctagtatagatactatactatatatactaactatagctagtatagtccaccacgctgtgtaaacagaaaacacaatcttgagcaggaagctgccctttagaaatccctgcatccataccacaagggtgcctaggtttctttttatccaatagtagggaggattgaggaccagaggggaagtttgagtttccaggtaccaaacaggagatgatggtgaccaccacctttccctcgtgacaccttgggggaaggaattacctcaggcagctggaagccaagagttttcctttctcctctttcactcaggaagttgtggctcagtgcagtggcttacgcctgtaatccagcactttgggaggctgaggcgggtggattatttgaggccaggagttcgagacgagcctggccaacatggcgaaaccccgtctctactaaaaatacaaaaataagccaggcaggtggcaggcacctgtaatttcagctacttgtgaggctgaggcaggacaatcacttgaacccaggaggtggaggttgcagtgagccgagattgtgccactgtactccagcctgggtgacagagcgagactctgcctcaaaatcaatcaatcaataaaaagaagttgtgtagaacctattttttttttcattgtaaaatatggccgggcgcagtggctcacacctgtaatcccagcactttgggaggctgaggtgcgtgaatcatttgaggtcaggagtttgagaccatcctggtcaacatagtgaaaccccatctctactaaaaacacaaaaattatccaggcatggtggcgcacacctgcaatcccagctactcaggaggctgaggcatgagaatcgcttgaacccgggaggtgtaggttgcaggagccgagatcgctccactgcactccagcctgggtgacagaggaaggctctgtctcaaaaaaaataaaacaaaatttaaaaaccatgtattaaaaaactggaaaataattagagagaagaattactactactaccacttggacatgtgttaacattctggtgcatttccttcaactgtcttttcctttgtatgtttttaatagttatcatgaattcatatatatttaataacattaatattattaatgttctgtgtaatcactttttataaaaattatttcaggccgggtgctgtggctcatgcctgtaatcccagcactttgggaggccgaggcagcctgatcatgagatcaggagttcaagaccagcctggccaacatggtgaaaacctgtctctacaaaaaaaaaaaaaaaaaaacttagctgggcatggtggcacgtgcctgtaatcctagctactcgggaggctgaggcaggagaattgcctgaaccgagacccgggggccggaggttgcagtgagccgagattgtgccactgcactccagcctgggctatggagcgggactctgtctcaaaaaaaaaaaatttcattggttttctgatattttcacaagtttacataatatatttaatcaagtgcctgttaaaaaataaaacacacactctttcatgggagttaaaataagtacatactcattaaacaagtccacagaacagtaaatgaggttggtactctcgaagcagagggccatagtataccgtcagggccaaaagggccagtctctcatttgacacttgaattccctagcaatgtccatgttatgtgttcttgacacctctgatggacagctttggaactgaatctttcttattctgagctgaagtatgtctctctatagctgctagactttagtacctcgcaaaggaagcataaaacagaattcctcttttagacaacagtctttctagttttccggaacatctctcacagccccaaattcccaatttttccgacaggttcgttctcccaccccaagattccttccaaggcactctcctctgaaggtgcttccattggttttctctcttacctcccggcgaccacaagtggccccagccgtccaggtggggtccggctgacgggaccaagtcgacactactccttctcgcagggtctcttccttctcagtaaagcggcccacgatcctccatccgctcctcagagagcctctctgccctttctgtccgccacatctccctggctacattatctccccgactagtgcctagcaggcgggcctgatagaagtttctctaaaggctctggaggagtcaaacaatgcataaggtcctgtgcaaccctcagactcctatacctcgtgggaatttggaagtcgaaatccagtccgcggtcccgcccctccccgggtcgcctcaattagccccgctcggtctcgccctaagtctcgcctttccctttaaccaacccctcaagccgggttacctctccggtgcctataatccttaacgtttccctatatgctgtcccaactaggaaagcctttactttccgctattggtaaaatatttacactttccgtaccatggccacgcccccttcacacacgttgccaagacgaaccggaagagattgccagccccctggttcgttaaccggaagtagacgtacctcacggaagccggctttggccctgcggctgctaccgtcgccgcggagaaattgttggatctggcagtctaggaatggtgagacctcgcggttcgcctctgagggttctcagaggagttggggatgaaatggagttttgcagagtgccgccggggacgaccaccccccaagtttggggccccgccccagtggcgccccgaaaagctgcgcatgcgtgggccggaccgggttagaatctggctcgaagtgttacgcatgcgcaaaggcatggagaccgtggggtgagaatgggcttgcgagtttacccccacctccccagccaccagcctgtgggtctcaaaccaaggctacttggtgctctgctttgagttgcagaggtgacttcatcaatgctcctaccccgagttcttgagacagacctggaccgatcccctaccttgggtgtgcactcttgggagaacgaggggcggagggtccggtaaggaaggggcacagaccctacctcagtttgccggcaagctcgggccccttcgccctctcctcagatgtcaagattcttagtcgtagcctatggagcggagagcgacaggctcacctggggacagggctagaacactgagctaagagccaccctggttagaagtggggactcacgagaggagcgccccgagaaagtccagtacctgggttctctaggggttgttggggcacagcgtggttgataatcacgcagttcccaaacagtggtttttggtttccacgagatggtatctcatggaaataccacttactaaatcttcagtaaaaaccccaaatggaaaagaaaaacaaaaaaaaaacgagatggactggttggagttttgtctccctttcttttttcctgctttggcctgggaggggaaggctggtgctgctgagctgagtggacagctgaagtaaagaaaaatgtgggccaaagaatcccttgtctcttgctagtttatagtcaaggcgcttaacctaggagataccagtagaattaaagggtctatgaaccctctaaaatagtatgtgtttgcacccttttctgcagtccatagctgttatcatactctgaaaggtgccagtgaccttcacaagactgatgtctaaggctattattggcagagtggggccttatgcctctttcctgtccttatgtcttccctagcttatgggaccctgggggacctgagccagtataaggaagtgaggctggccagttggaaatctgagcctcagggagcctcatttctcctttgcagaatctcctctcagcctttaagctcacctggtcagaatccttggatgagcctgtgggaccgttcctcctagcccggtggtttggaaccagtggctttgggactgtaagaggatggacaaaggtagtatgaggccgggacagctccccaaatgctcgggcgccaagcatctgctgattccactctgtgcctggcacgtgtgtctttcggtcctggctaggccttgccacctccccctgggccagcaccacccatgtacctgtcggcagagccacagttgactgacttgctgttgagctgctgctctttagcacggctgcattttgatggcagagggagcagttatgcccagagcccagcgtgtcggcatcaccagtctgacctgagcaccatgtgctgcacgacatgacacgtggcaccgggggaactgcccagcgtggaaggtctgggccaggtctgagcccagatgggatctggatggccaaggaactctaccttaaaacctcaagtgtcaaggaggcaggggaggggccaagagggctggcaggggaagggggctggggaggggtcccatttgcagaggctctaggatcttaggaggcccgaatccaccatttctctcttgctagattctcaggggctgctagattcatccctgatggcatcaggcactgccagccgctcagaggatgaggagtcactggcagggcagaagcgagcctcctcccaggccttgggcaccatccctaaacggagaagctcctccaggtagtaagggttcggagggccaggaactgggaaagggtagaaggtctgtggcgttaagtgccacatgcctccccatctgttgggaatggctgcctgagcccctctggggccttagtattggcagagccttgtgcttttcctgtccctgctaaatccttccctgtgggactgagggcaggggagggagatcttaggtctctgacgtgaagtctttgtggtgtgataccctgtcatctcagagggctggagtgtagcagttccatggccacaaccaggctgtggcgtaaagtgaaagcaggctggagcagatagcaccctactgggcacctgctctcttttgggggctgggggtgtgtgaatgggtaccagggtggggtaaggagtgttcactgggcaggaccctttacaggttcatcaagaggaagaagttcgatgatgagctggtggagagcagcctggcaaaatcttctacccgggcaaagggggccagtggggtggaaccagggcgctgttcggggagtgaaccctcctccagtgagaagaagaaggtgaggaattgggagacttaggggatgggaggtagtgccagatttcatgtttccccagaacctttgccagctgccaagagccctgcaga

SEQ ID NO: 1724 - DNA, 6000 bp, Homo sapiens
atgttctttttgattgtttagttctacatactcacagagcctatatttttggagggttttttttgtttgtttgtttgtttgttttgagatagggtctcactctgtcgcccaggctggagtgcagtggtgcgatcatggctcactgcagccttgacctctacaggctcaagcagtcctcctacctcagcctcccaaatagctggaaccacaggtgtgtgtcaccacacctggctaatttttgtatttttagtagagaaggggttttgccatgttgcccaggctggtcctgaactcctaaggtcaagtgatctgcccgcctcggcctcccaccatgctgggattataggcgtgagctcccaggtctggtcagagcctatgttcttaaccactgtgttctaatcccccagaagatggagcctggggccctgagcaaagttccaggaggaaccatgaatgtggcctccattgtaaaccacatcagccccagggaaagagtgcctgactatgaaagactactctagagcaggggtccccaacatgtactgggctgtggcctgttgggaactgggctgcacagcaagaggttagcagcaggcgagtgagcattaccacctgagctctgcactccgcctcctgtcagatcagcggtggcattagattctcataggagggagaaacctattgtgaactgcacatgcgagtgatctaggttgcaccatccttatgagaatctaatgcctgatgatctgaggtggaacagtttcatcctgaaaccatgttccccaaccccctgtctgtggaaaaattgtattccacaaaaccagtccctggtgccaaaatgcttggggaccactgttctagagccaggaagagttaactggaagctggataatgggtgccattgctagcttttctttttatccacattcttcttttggtttattttcttgcccctcttcctctgccttgccctaaatgttggcatgtcccatgcaatggtcttgagccctcctcattctcttatccacactctctccttaagcatccacatccagatcttcctgatgatgactccccagtggatatctccagtccaggcctcttccctgacccaactaacgtgcccacctctctattctacagcaccaccaagatgccttacaggcacctcaaacttaacatgtctaaaacagaactttttttctgcccctgtacaaacctgctcctcccacagacttctctgcagtcaatttacataagatacttattcaataaatatttattaagcacctactatagcagtgaacaaaatagacaaaaaccctgccttcctaaagcttacattctactactggaaaacctatagtaaacagaaaaaaataagtaaattagaagataataagggctaaggagaaagccaagaagaggtacagtgagcaggggatgaggactgaaatttttgaaagagcaagtgagaagagcaggaggtgaagtcagagaagcaacagggggtgggccatgagcttttatcctgaggaagatggaggactttgaacagaagcaggatgtgagtagattgccaatgtaataggaataccccagctgctgtgaataaactaaagaagggcagtaaggatgaaagctgggagaccagttagggaactcttgctatagtccaggtaacagataatggataatggggagttggaccaggagaccgtggaaaactggtaagatagggtcacattctggatatattctgaagcagggggttctaccatccacccaggttcttaggccaaaaatctcagtctcatccttgattcttccttttccctcatatcccatatccaatccatcagcaactccttggggttctatttccaaaatgtgccacagtcacagttcctgtccatcttcaccacccccacatgccagctaaaccacctgggtttacctctcacctagatcactgcaatacccttttacctgatctttctgcttcctcttttgccccctgcaatctagtcttcacaagcagccagagggatcattttcaaacttagatcatatcacaggatgcccttgcttgtgatcctttaagagctttgcaatgaaccaagaataaaggccaaaatccatactgagaactacacgggctggcatgggctgccctctgatgactcctctgttctcaactctttccctctttttattgatcgccctgctccagccacaccggggtccttcctgttcctcaaactcaccaaactccttcctgctttggagccagagctatcccctctgatggggtcggtgtaccccaccttattgtatgactggttgcctatcgacatcaaatctcagctcagtcatcacctcttcatagaagaccatcctgagaactttcatctagtatagatactatactatatatactaactatagctagtatagtccaccacgctgtgtaaacagaaaacacaatcttgagcaggaagctgccctttagaaatccctgcatccataccacaagggtgcctaggtttctttttatccaatagtagggaggattgaggaccagaggggaagtttgagtttccaggtaccaaacaggagatgatggtgaccaccacctttccctcgtgacaccttgggggaaggaattacctcaggcagctggaagccaagagttttcctttctcctctttcactcaggaagttgtggctcagtgcagtggcttacgcctgtaatccagcactttgggaggctgaggcgggtggattatttgaggccaggagttcgagacgagcctggccaacatggcgaaaccccgtctctactaaaaatacaaaaataagccaggcaggtggcaggcacctgtaatttcagctacttgtgaggctgaggcaggacaatcacttgaacccaggaggtggaggttgcagtgagccgagattgtgccactgtactccagcctgggtgacagagcgagactctgcctcaaaatcaatcaatcaataaaaagaagttgtgtagaacctattttttttttcattgtaaaatatggccgggcgcagtggctcacacctgtaatcccagcactttgggaggctgaggtgcgtgaatcatttgaggtcaggagtttgagaccatcctggtcaacatagtgaaaccccatctctactaaaaacacaaaaattatccaggcatggtggcgcacacctgcaatcccagctactcaggaggctgaggcatgagaatcgcttgaacccgggaggtgtaggttgcaggagccgagatcgctccactgcactccagcctgggtgacagaggaaggctctgtctcaaaaaaaataaaacaaaatttaaaaaccatgtattaaaaaactggaaaataattagagagaagaattactactactaccacttggacatgtgttaacattctggtgcatttccttcaactgtcttttcctttgtatgtttttaatagttatcatgaattcatatatatttaataacattaatattattaatgttctgtgtaatcactttttataaaaattatttcaggccgggtgctgtggctcatgcctgtaatcccagcactttgggaggccgaggcagcctgatcatgagatcaggagttcaagaccagcctggccaacatggtgaaaacctgtctctacaaaaaaaaaaaaaaaaaaacttagctgggcatggtggcacgtgcctgtaatcctagctactcgggaggctgaggcaggagaattgcctgaaccgagacccgggggccggaggttgcagtgagccgagattgtgccactgcactccagcctgggctatggagcgggactctgtctcaaaaaaaaaaaatttcattggttttctgatattttcacaagtttacataatatatttaatcaagtgcctgttaaaaaataaaacacacactctttcatgggagttaaaataagtacatactcattaaacaagtccacagaacagtaaatgaggttggtactctcgaagcagagggccatagtataccgtcagggccaaaagggccagtctctcatttgacacttgaattccctagcaatgtccatgttatgtgttcttgacacctctgatggacagctttggaactgaatctttcttattctgagctgaagtatgtctctctatagctgctagactttagtacctcgcaaaggaagcataaaacagaattcctcttttagacaacagtctttctagttttccggaacatctctcacagccccaaattcccaatttttccgacaggttcgttctcccaccccaagattccttccaaggcactctcctctgaaggtgcttccattggttttctctcttacctcccggcgaccacaagtggccccagccgtccaggtggggtccggctgacgggaccaagtcgacactactccttctcgcagggtctcttccttctcagtaaagcggcccacgatcctccatccgctcctcagagagcctctctgccctttctgtccgccacatctccctggctacattatctccccgactagtgcctagcaggcgggcctgatagaagtttctctaaaggctctggaggagtcaaacaatgcataaggtcctgtgcaaccctcagactcctatacctcgtgggaatttggaagtcgaaatccagtccgcggtcccgcccctccccgggtcgcctcaattagccccgctcggtctcgccctaagtctcgcctttccctttaaccaacccctcaagccgggttacctctccggtgcctataatccttaacgtttccctatatgctgtcccaactaggaaagcctttactttccgctattggtaaaatatttacactttccgtaccatggccacgcccccttcacacacgttgccaagacgaaccggaagagattgccagccccctggttcgttaaccggaagtagacgtacctcacggaagccggctttggccctgcggctgctaccgtcgccgcggagaaattgttggatctggcagtctaggaatggtgagacctcgcggttcgcctctgagggttctcagaggagttggggatgaaatggagttttgcagagtgccgccggggacgaccaccccccaagtttggggccccgccccagtggcgccccgaaaagctgcgcatgcgtgggccggaccgggttagaatctggctcgaagtgttacgcatgcgcaaaggcatggagaccgtggggtgagaatgggcttgcgagtttacccccacctccccagccaccagcctgtgggtctcaaaccaaggctacttggtgctctgctttgagttgcagaggtgacttcatcaatgctcctaccccgagttcttgagacagacctggaccgatcccctaccttgggtgtgcactcttgggagaacgaggggcggagggtccggtaaggaaggggcacagaccctacctcagtttgccggcaagctcgggccccttcgccctctcctcagatgtcaagattcttagtcgtagcctatggagcggagagcgacaggctcacctggggacagggctagaacactgagctaagagccaccctggttagaagtggggactcacgagaggagcgccccgagaaagtccagtacctgggttctctaggggttgttggggcacagcgtggttgataatcacgcagttcccaaacagtggtttttggtttccacgagatggtatctcatggaaataccacttactaaatcttcagtaaaaaccccaaatggaaaagaaaaacaaaaaaaaaacgagatggactggttggagttttgtctccctttcttttttcctgctttggcctgggaggggaaggctggtgctgctgagctgagtggacagctgaagtaaagaaaaatgtgggccaaagaatcccttgtctcttgctagtttatagtcaaggcgcttaacctaggagataccagta

SEQ ID NO: 1725 - DNA, 6000 bp, Homo sapiens
tttagacagaatctcactctactcactctgtcactcaggcggagtgcagtggtgtattctcggctcactgcaacctctgcctcccgggatgaagaaattcttgtgcctcggcctcccaagtagctgggattacaggcataagctactacacccagttcatttttgtatttttagtagagatagggttttgccatgatggccaggctggtcttgaactcctggcttccagtgatccgcctgccttagcctcccaaagtcctgagattacaggtgcgagccactacacctggccagtcttttttcttttttctttttttttaacaaaaattggatcataccgttcatatttttctgcaacttgttttttatatatcttatttttctttccttaaaagtccacaggaagactgtaacagtcattcatgcatctctgacatctttatatgatgatatgcttgatataggacatgcttttttattttattgttattttattatactttaagttctgggatacacgtgcagaacgtgcaggtttgttacataggtatacacgtaacatggtggtttgctgcacccatcaacccgtcatttacattaagtatttctcctaatgctatccctcccctagccacccatccctcaacaggaccccgtgtgtgatgctcttctccctgtgtccatgtgttcattgttcaactcccactatgagtgagaacatgcggtgtttggttttctgttcttgtgttagtttactaagaatgatcgtttccagcttcatccatgtccctgcaaaggacgtgaactcatcgtttcgtatggctgcatagtagtccatggtgtatatttgctattatttatttatttatttacttattcatttatttttgagatggagtctcgctctgtcgcccaggctggagtgcagtggcacgatggcccttggctcactgcaagctccgcctcccaggttcacgccattctcctgcctcagcctcccaagtagctgggaccacaggcgcccgccaccacgcccggctaattttttgtatttttagtagagatgggatttcaccgtgttagcctagatggtctcaatctcctgacctcgtgatccacccaccttggcctcccaaagtgctgggattacaggcgtgagccaccgcgcctggccaattttttttttttttttgagatggagtctcgctcttgtcacacaggctagagtgcaatggcacaatcgcaactcactgcaacctccacctctgggttcaagcgattctcctgcctcaacctcccaagtagctgggattacaggtgcccaccaccatgcctggctaatttttttttttttgagacagggtctcactccaggctggagtacaatggcatgatctcggctcactgcaacctctgcctcccgggttcaagcgattctcctgcctcagcctccgaagtagctgggattataggtgcccaccactatacccggctaatttttttgtatttttattagagatggggtttcaccatgttagtcaggcaggtctcgaactcctgacctcaggtgatccgcccgcctcggcctcccaaagtgctgggattacaggcgtgagccaccgcgcttggcctcatgctttattttttttgagctgggttcctgctatgttggccagcctggagtgcagtggctattctcaagtgaaatcatagctcactacatccttgaagtcctgggctcaagcaatcctcctgcctcagcctcctcccagcctcagcctcctgagtagctgggatgttaggcatgcaccatcacatccagctattatttatttatttatttatttttggtagagacagggtcccactatgttgcccaggctggtctcaaactcctgggctcaagggatcctctcacctcggcctcccaaagcgttgggattataggtgtaagccactattcctggccaaaacatgttttttttttgtttttttttttttaagacagagtgtcgctctatcgcccaggctggagtgcagtggcgcgatctcagttcactgcaaactctgcctcccaggttcacgccattctcctgcctcagcctcccgagtagctgggactacaggcgcccaccactgcgcccggctaatttttttgtatttttagtagagacggggtttcactgtgttagccaggatggtctcaatcttctgacctcgtgatccacccgcctcagtctcccaaagtgctgggattacagacctgagtcaccgcgccacacgttttttaatgactgccatcatcgttagggtcttcaaggctatctgaggccttcttctatttgaggctaaaagaactcctggaggtagtgaggcttgatgttactgtccccatttcactgagaaggaacaaattagaactggcactagaacctggctcctctgtcctgtctcattttcaaagctctttccatcatcctgtgctgcctctataagtttgtgattcacatgaggaaataatgtgactcaagttcgtattagtcagcatttattgatctgttgatacttaaagtacttcttgtaagaagtagaaaataaaaaagaaaaaagaaaacaaaagcaaaacaaaaaacaaacaaacaagaaataaaaaataataagctctctgcccttgaggagtttagaattaagtaggtatgataggctgggcatggccaggcacggtggctcatgcttgtaatcccggcattttgggaggctgaggcaggtggatcacttgaggtcaggagtttgagaccagcctggccaacatggtgaaactccgtccctactaaaaatacaaaacattagctgggcatggtgatgggtgcctgtaatcccagctacttgggaggctgaggcaggagaatcacttgaacccggaggcagaggttgcagtgagctgagatcacgccattgcactctagcctgggtgacaagagcgaaactccgtctcaaaaaaaaaaaaaaaaaaaggctgggcatagtggctcacgcctgtaattgtagcacattgagaggctaaggccggaggatcacttgagctcaggagttcaagaccaacctgggcatcatagtgagacctcgtttctatcttaaaaaaagaagaaaaaagtaggtataataaaatacgttgggaaaaagtcctagaatgcttgctaaacaataggtaaatgaacactgatagctaaggtgtaagcaagaggaattgagtactgtgatgaataattttcttttgggttttttttgtttgtttgtttgttttttggtttttttttttttgagacagagtcgtctcgctctgtagcccaggctggagtgcagtggcgcgatcttggctcactgcaagctccgcttcccgggttcacgccgttctcctagcgcagcctcccgagtagctgggactacaggagcctgcaaccacgcccggctaattttttgtatttttagtagagacggggtttcaccatgttggccaggattgtctcgatctcctgacctcgtgatccgcccgcctcggtctctcaaagtgctgggattacaggcgtgagccaccgcgcccggccttttttttggttttcttttttgagacagagtcttgctctgtcacccagactgcagtacagtggcgggatctcagctcactgcaacctccgcttcccgggttcaagcgatcctcccaagtagctgggactacaggcccccgatgccacagcagctaatttttgtatttttagtagagatggggtttcaccatgttggtcaggctggttctcaagtgatccacccacctcggcctcctaaagtgctgggattataggcgtgagccaccgcgcccggccttcttttctttctttttacaaaaataatcttccctgctagattctcaactcataaaagagctctatgatgatggagaaggatgagttatccagtagagttcatcagcgacaagctgataaccacttttgagctgaattctttggtggaggaaggaaagagacagctgaatctgtgtttggggaagtggttagtacttaaaaacataagccattaaagactgtgaaatatcccagggaatgaatttccatagttcttcctgctactcacaactcccaccccaccccactaccctctctcccccatcgaagagcaccagatcttgtctttctcatacaaccaatagaaggagtaaggctggaaggcagagagagagctggaggtcgctacgggtactcattgtagttcccctagaaaaccatctttaaaataatttcgtaggaagttgggcgtggcggtgcacgcccgtagtcagcactttgggaggctgaggtgggaggatcacttaagcccgggagtttgaagctgcagtgagctgtgatcacgccactgcactccagcctgtgtgtcagagcaagaccctatcaaaaaaaaaattcgtagaagtctaagccctttttttctagtaacccaaaccgcgtgagttcctaagttctttttgttatttctcttctcttgaaacttaaactcttgcctgagctctgaagataaaggaggaaaaggggtggcattaccgatagcgactaagcgacaggtagctgagaaactgagctctgactggaaaaaagggggaaacccgcacccccaagaggccctaacgcgcagagcagcaagaccctccggggcgccgcgggagcgcgcagcgcggcgggtaaactacaactcccagcgtgccgcgcgcccggcgttgcgccgcgcccgctgattggcagccgcggatatttgaaaggagggtctggcgcggaaaacgaaggttacattttggatcctcgcggagtactggtcaggcggttaagtcctgtacctaggaaagagggcgagctctggggcggtaaggccggaagggactcgtgagcgtgggtacgtgctgaagtgaaggggatccccagcgctgacgcgaggagaggcgtgggtggctcctggagggagtgtcgggaggccttgggactgccccgggccgctgaagggctgggccgaggcctctggggtagcgcggcgagtggtgtggtagtgcggtcggggatctgcccggaggaaggaagagcggaatcgtccttttataacgggagcacggcgtcctggcgtgggttttctccccgatgaaatttctgatgtgattctttgcctccttccacgaccttcagccctcttcccttcctccagttagcttcattaacaatcttctctaattggtctccttttccctagctctccggtgtcatgaggagcttcaaaagagtcaactttgggactctgctaagcagccagaaggaggctgaagagttgctgcccgccttgaaggtgggggtgctgcctggctcgggatacacctggctttccaaactgagctgttttgtgtttgccttttgaagagatggataagtaggcgaccctctctgagtaaccctatttctagttactttctctacctctttcctgcctttgctagccccattcatatctttctctactcctaggagttcctgtccaaccctccagctggttttcccagcagccgatctgatgctgagaggagacaagcttgtgatgccatcctgagggcttgcaaccagcagctgactgctaagctagcttgccctaggcatctggggagcctgctggagctggcagagctggcctgtgatggctacttagtgtctaccccacagcgtcctcccctctacctggaacgaattctctttgtcttactgcggaatgctgctgcacaaggaagcccagaggccacactccgccttgctcagcccctccatgcctgcttggtgcagtgctctcgcgaggctgctccccaggactatgaggccgtggctcggggcagcttttctctgctttggaagggggcagaagccctgttggaacggcgagctgcatttgcagctcggc

SEQ ID NO: 1726 - DNA, 6000 bp, Homo sapiens
aacaaaaattggatcataccgttcatatttttctgcaacttgttttttatatatcttatttttctttccttaaaagtccacaggaagactgtaacagtcattcatgcatctctgacatctttatatgatgatatgcttgatataggacatgcttttttattttattgttattttattatactttaagttctgggatacacgtgcagaacgtgcaggtttgttacataggtatacacgtaacatggtggtttgctgcacccatcaacccgtcatttacattaagtatttctcctaatgctatccctcccctagccacccatccctcaacaggaccccgtgtgtgatgctcttctccctgtgtccatgtgttcattgttcaactcccactatgagtgagaacatgcggtgtttggttttctgttcttgtgttagtttactaagaatgatcgtttccagcttcatccatgtccctgcaaaggacgtgaactcatcgtttcgtatggctgcatagtagtccatggtgtatatttgctattatttatttatttatttacttattcatttatttttgagatggagtctcgctctgtcgcccaggctggagtgcagtggcacgatggcccttggctcactgcaagctccgcctcccaggttcacgccattctcctgcctcagcctcccaagtagctgggaccacaggcgcccgccaccacgcccggctaattttttgtatttttagtagagatgggatttcaccgtgttagcctagatggtctcaatctcctgacctcgtgatccacccaccttggcctcccaaagtgctgggattacaggcgtgagccaccgcgcctggccaattttttttttttttttgagatggagtctcgctcttgtcacacaggctagagtgcaatggcacaatcgcaactcactgcaacctccacctctgggttcaagcgattctcctgcctcaacctcccaagtagctgggattacaggtgcccaccaccatgcctggctaatttttttttttttgagacagggtctcactccaggctggagtacaatggcatgatctcggctcactgcaacctctgcctcccgggttcaagcgattctcctgcctcagcctccgaagtagctgggattataggtgcccaccactatacccggctaatttttttgtatttttattagagatggggtttcaccatgttagtcaggcaggtctcgaactcctgacctcaggtgatccgcccgcctcggcctcccaaagtgctgggattacaggcgtgagccaccgcgcttggcctcatgctttattttttttgagctgggttcctgctatgttggccagcctggagtgcagtggctattctcaagtgaaatcatagctcactacatccttgaagtcctgggctcaagcaatcctcctgcctcagcctcctcccagcctcagcctcctgagtagctgggatgttaggcatgcaccatcacatccagctattatttatttatttatttatttttggtagagacagggtcccactatgttgcccaggctggtctcaaactcctgggctcaagggatcctctcacctcggcctcccaaagcgttgggattataggtgtaagccactattcctggccaaaacatgttttttttttgtttttttttttttaagacagagtgtcgctctatcgcccaggctggagtgcagtggcgcgatctcagttcactgcaaactctgcctcccaggttcacgccattctcctgcctcagcctcccgagtagctgggactacaggcgcccaccactgcgcccggctaatttttttgtatttttagtagagacggggtttcactgtgttagccaggatggtctcaatcttctgacctcgtgatccacccgcctcagtctcccaaagtgctgggattacagacctgagtcaccgcgccacacgttttttaatgactgccatcatcgttagggtcttcaaggctatctgaggccttcttctatttgaggctaaaagaactcctggaggtagtgaggcttgatgttactgtccccatttcactgagaaggaacaaattagaactggcactagaacctggctcctctgtcctgtctcattttcaaagctctttccatcatcctgtgctgcctctataagtttgtgattcacatgaggaaataatgtgactcaagttcgtattagtcagcatttattgatctgttgatacttaaagtacttcttgtaagaagtagaaaataaaaaagaaaaaagaaaacaaaagcaaaacaaaaaacaaacaaacaagaaataaaaaataataagctctctgcccttgaggagtttagaattaagtaggtatgataggctgggcatggccaggcacggtggctcatgcttgtaatcccggcattttgggaggctgaggcaggtggatcacttgaggtcaggagtttgagaccagcctggccaacatggtgaaactccgtccctactaaaaatacaaaacattagctgggcatggtgatgggtgcctgtaatcccagctacttgggaggctgaggcaggagaatcacttgaacccggaggcagaggttgcagtgagctgagatcacgccattgcactctagcctgggtgacaagagcgaaactccgtctcaaaaaaaaaaaaaaaaaaaggctgggcatagtggctcacgcctgtaattgtagcacattgagaggctaaggccggaggatcacttgagctcaggagttcaagaccaacctgggcatcatagtgagacctcgtttctatcttaaaaaaagaagaaaaaagtaggtataataaaatacgttgggaaaaagtcctagaatgcttgctaaacaataggtaaatgaacactgatagctaaggtgtaagcaagaggaattgagtactgtgatgaataattttcttttgggttttttttgtttgtttgtttgttttttggtttttttttttttgagacagagtcgtctcgctctgtagcccaggctggagtgcagtggcgcgatcttggctcactgcaagctccgcttcccgggttcacgccgttctcctagcgcagcctcccgagtagctgggactacaggagcctgcaaccacgcccggctaattttttgtatttttagtagagacggggtttcaccatgttggccaggattgtctcgatctcctgacctcgtgatccgcccgcctcggtctctcaaagtgctgggattacaggcgtgagccaccgcgcccggccttttttttggttttcttttttgagacagagtcttgctctgtcacccagactgcagtacagtggcgggatctcagctcactgcaacctccgcttcccgggttcaagcgatcctcccaagtagctgggactacaggcccccgatgccacagcagctaatttttgtatttttagtagagatggggtttcaccatgttggtcaggctggttctcaagtgatccacccacctcggcctcctaaagtgctgggattataggcgtgagccaccgcgcccggccttcttttctttctttttacaaaaataatcttccctgctagattctcaactcataaaagagctctatgatgatggagaaggatgagttatccagtagagttcatcagcgacaagctgataaccacttttgagctgaattctttggtggaggaaggaaagagacagctgaatctgtgtttggggaagtggttagtacttaaaaacataagccattaaagactgtgaaatatcccagggaatgaatttccatagttcttcctgctactcacaactcccaccccaccccactaccctctctcccccatcgaagagcaccagatcttgtctttctcatacaaccaatagaaggagtaaggctggaaggcagagagagagctggaggtcgctacgggtactcattgtagttcccctagaaaaccatctttaaaataatttcgtaggaagttgggcgtggcggtgcacgcccgtagtcagcactttgggaggctgaggtgggaggatcacttaagcccgggagtttgaagctgcagtgagctgtgatcacgccactgcactccagcctgtgtgtcagagcaagaccctatcaaaaaaaaaattcgtagaagtctaagccctttttttctagtaacccaaaccgcgtgagttcctaagttctttttgttatttctcttctcttgaaacttaaactcttgcctgagctctgaagataaaggaggaaaaggggtggcattaccgatagcgactaagcgacaggtagctgagaaactgagctctgactggaaaaaagggggaaacccgcacccccaagaggccctaacgcgcagagcagcaagaccctccggggcgccgcgggagcgcgcagcgcggcgggtaaactacaactcccagcgtgccgcgcgcccggcgttgcgccgcgcccgctgattggcagccgcggatatttgaaaggagggtctggcgcggaaaacgaaggttacattttggatcctcgcggagtactggtcaggcggttaagtcctgtacctaggaaagagggcgagctctggggcggtaaggccggaagggactcgtgagcgtgggtacgtgctgaagtgaaggggatccccagcgctgacgcgaggagaggcgtgggtggctcctggagggagtgtcgggaggccttgggactgccccgggccgctgaagggctgggccgaggcctctggggtagcgcggcgagtggtgtggtagtgcggtcggggatctgcccggaggaaggaagagcggaatcgtccttttataacgggagcacggcgtcctggcgtgggttttctccccgatgaaatttctgatgtgattctttgcctccttccacgaccttcagccctcttcccttcctccagttagcttcattaacaatcttctctaattggtctccttttccctagctctccggtgtcatgaggagcttcaaaagagtcaactttgggactctgctaagcagccagaaggaggctgaagagttgctgcccgccttgaaggtgggggtgctgcctggctcgggatacacctggctttccaaactgagctgttttgtgtttgccttttgaagagatggataagtaggcgaccctctctgagtaaccctatttctagttactttctctacctctttcctgcctttgctagccccattcatatctttctctactcctaggagttcctgtccaaccctccagctggttttcccagcagccgatctgatgctgagaggagacaagcttgtgatgccatcctgagggcttgcaaccagcagctgactgctaagctagcttgccctaggcatctggggagcctgctggagctggcagagctggcctgtgatggctacttagtgtctaccccacagcgtcctcccctctacctggaacgaattctctttgtcttactgcggaatgctgctgcacaaggaagcccagaggccacactccgccttgctcagcccctccatgcctgcttggtgcagtgctctcgcgaggctgctccccaggactatgaggccgtggctcggggcagcttttctctgctttggaagggggcagaagccctgttggaacggcgagctgcatttgcagctcggctgaaggccttgagcttcctagtactcttggaggatgaaagtaccccttgtgaggttcctcactttgcttctccaacagcctgtcgagcggtagctgcccatcagctatttgatgccagtggccatggtctaaatgaagcagatgctgatttcctagatgacctgctctccaggcacgtgatcagagccttggtgggtgagagagggagctcttctgggcttctttctccccagagggccctctgcctcttggagctcaccttggaacactgccgtcgcttttgctggagccgccaccatgacaaagccatcagcgcagt

SEQ ID NO: 1727 - DNA, 6000 bp, Homo sapiens
accaagacccacgttgacgtcagtcaaaactctcctctatacaaaggagttcccacagacagtaaaaggtcagcagggccccatgactccctccccagggcctttcatggggtcagtcacacagaacctgagacaatgaagttccttcatctgtctcctcgccccctccttccttcccccaaccatggctttgcagatccccaaggctgggtgggtctgggagggggtgaatgtctggggtgccactgacatgtagcaaaggtatcccaagccactcacggggtagggggtagacactgcggtcatcccccaaccttgtgatgcagccacttctagatacgagcacagcgggcagagactctgtcttccatttcttctgtgttccccacagcacctagcatggtgctgggtacccactaggtgcttaacaaatattttttgatgaattgagagaggaatacggacaattgtaaggtaatgcactggggggataaatgcacattacatatgtataggctaatggtctttaagctcttggttacaaccaagataaaagacaataaaacatattgctgatttgaagacagcctactgcaccactgtactgttatattaaaggagatgggagcttctacataaagccaggcttcaaggatccttcagtctgaaaagccagaggttgaaggggaacatgatctaaatctttttttttttttttttttttttttttttgagatggaatctcattctgtcgcccaggctggagtgcagtggtgcaatcttggtcactgcaacctccatctcccgggttcaaccgattctcctgccttggcctcccaagtagctgggattacaggtgtgtaatcccaagtagccacacctggctaatttttgtatttttagtagagacagggttttaacatgttggccaggctggtctcaaactcctgacctcaggtgatccacctacctcagcctcccaaagtgctggtattataggtgtgagccactgcaccctgcctaaatctgcagtttaaatgaaaggtgtgggtaaagtgaccacagttgtcttcactacattgctggcaccatacaacaaggtctacaagccttgaaatgaaggcctgaaataaaagaggcactaaatggaatcattctcccaaatatatgcagactacagctaaaacagctgcagaaatgctttaacttatttcagggataagagatgtataccaggtactaaggctgtttgaggatatcctaacactgtggttgatatcagggcaacagttgcatcctttcccaccattccccttggtgctactttagagagagaaccctgtgatagaagggccataggtctgggccaagaagcagttctgttgttcttggatgtggggaggagagggagggggctgggtggaacttgggcaagcctccataccatctcagcaaagatgcagcccaggctccagatgtccacagctgtggaataatatttgcagcccaggaggatttcaggagctcggtaccacagggtcaccacctgagggacgggaatagggaggggcggggtggtttatagggtatggaaattcccgcatctcagttcctcaacactactctgcttactcttggcctcttaacaagcagtttccttccctccatcatctttcccctcccactgatttccagtccatagttctggactgaacccctaatttgagatcttcctggaaaaacttgagacaaattggtcataattttatttctaaattttttctttttgtagatttgtagagatggggtctcgctatgttgcccatgatggtctcgaactcctgggctcaagtgatcctcccacctcagcctcccaaagtattggtattacaggtgtgggcccagttagcaacacagtatgaattccatgcataccctaagactctttaggatgtcaagagattatttctacctagtaagaaactgttagccagatatttttagtaactttgtgaataccctagttaacacctcttgggaagctcagagaaaaaagacataaagggactcacctcatgggtgtaagtacgaacagggactccaaaagctctggctagtccaaagtctgctagcttgatggccccctctgtgttaataagcagattctgaggtttaaggtctcggtggaggacccgatgagaatggcagaaagctaggccctggagcagctggaacagatagctctgacaaaggagaaagagaggactgtgtttctccattacagtgagcagactgggtttgctctgtgcccctaaaactctactaaagcctttattatgttggattatagttacatatttacaagctatttctcccaatggactgtcagcccagagaggataaggaccaagtcttactcaattttccatcccttttctacatcctgtgcattgaaaaaatgtttgttaatagattgaaagtagctctgggagtgaagaatccagccctaaaatagacaatagggactcactagctaggtcttccaccaaatggaagggctttttggaggaatttaccaagtgctctcaaatcccgtttatctgagtttcatctgacctcccacctgagttgctaggttgactcactagagtttcaactttgattgttcagtccaaccctagggttaatgaatataatgagcagggaaggagacacaaaaagaaggggagtgtgtgtgtataggagatgagggctcagaaggaggccaaaatcataaaatatcaccctgaattgcctgccaccagtcccccaagacatgcccatgatgagaggagctgatgagaagcattaccttgatgaggggaagaggaatgccagtgagagcagaggcatccatgaatttcttgagatcttggtgcagaaattcaaaaaccaggtagagtttattttctgtgtgaatgacatccagcagcctagagaaggaaagtttgaggaaatggaggtgtgtgagagagagaaatgcccacactgtacagacagaacttatcctcctttccagctggatcacctctcagacgcatacttacttgacaatattaggatggttaagctccttaagcagagagatctctcggatggcagtactgggcacaccctcagtctcacttggagaggttgggaaagcagagatgggaatatggttacaaatattcctttcccccccacctagtcatttctttcccccaaggagacaccacccagcaccccctaggaaagtgagagaagagaaagggtgatggtaagagctaattcttgggtagtcagggtgtggtttttggatatattaaggccattatctcctcttttcccaggggtaggtaagtaaagccgcctggtgaaggtgaagcagggagactgtaatggaggggaaaaaatgcaggagtagcccccagcctccccagaggggccagtgaggttcaactgccattctttggaaagaggagagaattctaaggtgagggtggggcagtgaagagggctcttcattcagaaaggcgattctcgccggttcccacataactccactccatggagagtcttggacctcatctcagagacctcctttctctccccgagtctgtagtcgcacatttgggggcacgatccggctcagtttgggaagaaagttttccatggattccacaccaccctatactctccccagggagtataagtatactcttcaccttctactggcccccaacccacctctccacttctaaagaagtccctccctgctctcttccggtccctggacggctacccgcccgtggggggttgggggggacaatcaaggaggtccccagttaggagtcccgggtacagaggccactcacgtgtccaggcggattttcttaagcgccaccacctctcccgtcaacttgtttctggctttgtacacaactccgtacgtgccctctccgatcttttccaccttttggaagttctccatgaagcgccagcgagtcgggtcagcccggccctggagcgggggcctgggaaccctgcagaaggcggaccctggctctcgggggccgaggagggggaaacagggcccagtaccgtggccccgggtcgggatggaacgcagtatacctctcgctcttgtcaatttggccaacttgaaacaatgttgccgcctcccaccgagttcccgaccgccaccagaggccccgcccctgcttcccgcgtttccctggctccgcccccaggcctttctattggtcaacgtcagagccggggggcgagcccagcgctcctccccgcaaatgatcccgccccaggcaagtttggttcttgggggctagacaagtttcttccccggtggggcggctgaacactcttcccaagtacctgctttgggtccaagtttcctacctatgtctctagtctgtagggatttcttgatttctaactcactattttcaccaatcctggggaaaatatgtatcgacctaaggttaaattccacctggcccaggagcctcctttggaaaccaggaagccgggaatctcgttgcaaaggaatcctgggcctcagaggagtcgttgcctctgcctcatagcataccccgacactgtctctgttttgggatgcagggttctgtttctgtctttttgagaagttcctggtttaattcactctcccatgataaactgttgtgtctggtatgtgttacgcagctgcctttcagttagctcttgcccgggagtgcatcaagatgagagtgacccagtgaaaccagaaactgtcattgagtagcaggatgggaaagcaatgtctagggaccaggatccctttgtcagtttttcctttttcctctcctccggcccctcccaggccttctctgagggagaagaggaagggctatgcaaatgagcacccttttcttatataggggcctatcccagtccccccagtgcctttggttgctggagggaagaacacaatggatctggtgctaaaaagatgccttcttcatttggctgtgataggtgctttgctggctgtgggggctacaaaaggtatgtgtggatatgtggacatgagcaggtgtgaacttggggatgaattccccctgctctggtttctgtcctcctaatgggagatagcggcaatatttcaggcgtctcccactcatttgatttagtgaggatgtgggcacctgggctccctccctacatggagatttgggattttgcctgaaaataatctcatatgcttggaggggcagaaggatagaaggtctctgtggcactgattctgaggcttccttggcagtgagctggagcacgggctccaaaggggtgaaatgtgcaggagactcttttaggaaacgtctcttggggtaggagatttaaagtggggagtcagagaatgtggtattgggtaagaacactaaggagatacaatcctctcctcttgggatgggtacgggtgaacacagcccagaccttttgttctggggctggagagataggcagaggggtctcagctgagcatcacatgaaagggctctgggggattgggcctcgtgacaggagcaaggggcgggggtggggtggtgagagggtctggaatgtcccgtgctgctctgaggagagttggaagtggagaaagaatggggtatcttatgacttctcttgttctagtggtgggatgctcaatagatgattccagatcctcccccagcagaatcaactagggttacagcacacattagaaagggaatgaggccgggcgccgtggctcacgcctgtaatcccagcactttgggaggctgaagcaggtggatcacgaggtcaggagttcgagaccagcctggccaatatggtgaaacccccgtctctactaaaagtacaaaaattagctgggcatggtggcacatgcctgtagtcccagctactcagaaggctgaggctggagaatcacttgaaccc

SEQ ID NO: 1728 - DNA, 6000 bp, Homo sapiens
cacactggaggagagggtgagattagggctgggggcttcaagaaggctatcagagtcgaagatggggtactggcttggtcacatcctggaagaaagggtgagccagggctgccttggccgaaatccgcttgttagggtcgtagtgcagcatttgctagagggagagatgcatgttgacttcaatgatgtgatagtggactaaatgggcagcaggtgttcccagaaatcaggaaaccagaactccttctacccaaggcagaattctcacttccatcctcccatagctgaatcagtgtgccaacagggagagcaggaaccagggaaatgaaacactgaggcccagatttcagggtctcatccttccttcatcctggaaaagcccttccctgggagaaatgaatgagggaaaacaggtgcccactctcaccgataacaagctccgtccatcttcatccaggggaggtacaactttactaaaatcttgccgggcccacttggggaaacttggcttgtaatcaggcatagaagtaactcctggccacaccacctcatctggggtccccagagtccgaaagatccggaagagctggtcaatctcagaatctccagggaatagggcccggcgagtcacctgaaaatggggaaagaggaaataccaagacccacgttgacgtcagtcaaaactctcctctatacaaaggagttcccacagacagtaaaaggtcagcagggccccatgactccctccccagggcctttcatggggtcagtcacacagaacctgagacaatgaagttccttcatctgtctcctcgccccctccttccttcccccaaccatggctttgcagatccccaaggctgggtgggtctgggagggggtgaatgtctggggtgccactgacatgtagcaaaggtatcccaagccactcacggggtagggggtagacactgcggtcatcccccaaccttgtgatgcagccacttctagatacgagcacagcgggcagagactctgtcttccatttcttctgtgttccccacagcacctagcatggtgctgggtacccactaggtgcttaacaaatattttttgatgaattgagagaggaatacggacaattgtaaggtaatgcactggggggataaatgcacattacatatgtataggctaatggtctttaagctcttggttacaaccaagataaaagacaataaaacatattgctgatttgaagacagcctactgcaccactgtactgttatattaaaggagatgggagcttctacataaagccaggcttcaaggatccttcagtctgaaaagccagaggttgaaggggaacatgatctaaatctttttttttttttttttttttttttttttgagatggaatctcattctgtcgcccaggctggagtgcagtggtgcaatcttggtcactgcaacctccatctcccgggttcaaccgattctcctgccttggcctcccaagtagctgggattacaggtgtgtaatcccaagtagccacacctggctaatttttgtatttttagtagagacagggttttaacatgttggccaggctggtctcaaactcctgacctcaggtgatccacctacctcagcctcccaaagtgctggtattataggtgtgagccactgcaccctgcctaaatctgcagtttaaatgaaaggtgtgggtaaagtgaccacagttgtcttcactacattgctggcaccatacaacaaggtctacaagccttgaaatgaaggcctgaaataaaagaggcactaaatggaatcattctcccaaatatatgcagactacagctaaaacagctgcagaaatgctttaacttatttcagggataagagatgtataccaggtactaaggctgtttgaggatatcctaacactgtggttgatatcagggcaacagttgcatcctttcccaccattccccttggtgctactttagagagagaaccctgtgatagaagggccataggtctgggccaagaagcagttctgttgttcttggatgtggggaggagagggagggggctgggtggaacttgggcaagcctccataccatctcagcaaagatgcagcccaggctccagatgtccacagctgtggaataatatttgcagcccaggaggatttcaggagctcggtaccacagggtcaccacctgagggacgggaatagggaggggcggggtggtttatagggtatggaaattcccgcatctcagttcctcaacactactctgcttactcttggcctcttaacaagcagtttccttccctccatcatctttcccctcccactgatttccagtccatagttctggactgaacccctaatttgagatcttcctggaaaaacttgagacaaattggtcataattttatttctaaattttttctttttgtagatttgtagagatggggtctcgctatgttgcccatgatggtctcgaactcctgggctcaagtgatcctcccacctcagcctcccaaagtattggtattacaggtgtgggcccagttagcaacacagtatgaattccatgcataccctaagactctttaggatgtcaagagattatttctacctagtaagaaactgttagccagatatttttagtaactttgtgaataccctagttaacacctcttgggaagctcagagaaaaaagacataaagggactcacctcatgggtgtaagtacgaacagggactccaaaagctctggctagtccaaagtctgctagcttgatggccccctctgtgttaataagcagattctgaggtttaaggtctcggtggaggacccgatgagaatggcagaaagctaggccctggagcagctggaacagatagctctgacaaaggagaaagagaggactgtgtttctccattacagtgagcagactgggtttgctctgtgcccctaaaactctactaaagcctttattatgttggattatagttacatatttacaagctatttctcccaatggactgtcagcccagagaggataaggaccaagtcttactcaattttccatcccttttctacatcctgtgcattgaaaaaatgtttgttaatagattgaaagtagctctgggagtgaagaatccagccctaaaatagacaatagggactcactagctaggtcttccaccaaatggaagggctttttggaggaatttaccaagtgctctcaaatcccgtttatctgagtttcatctgacctcccacctgagttgctaggttgactcactagagtttcaactttgattgttcagtccaaccctagggttaatgaatataatgagcagggaaggagacacaaaaagaaggggagtgtgtgtgtataggagatgagggctcagaaggaggccaaaatcataaaatatcaccctgaattgcctgccaccagtcccccaagacatgcccatgatgagaggagctgatgagaagcattaccttgatgaggggaagaggaatgccagtgagagcagaggcatccatgaatttcttgagatcttggtgcagaaattcaaaaaccaggtagagtttattttctgtgtgaatgacatccagcagcctagagaaggaaagtttgaggaaatggaggtgtgtgagagagagaaatgcccacactgtacagacagaacttatcctcctttccagctggatcacctctcagacgcatacttacttgacaatattaggatggttaagctccttaagcagagagatctctcggatggcagtactgggcacaccctcagtctcacttggagaggttgggaaagcagagatgggaatatggttacaaatattcctttcccccccacctagtcatttctttcccccaaggagacaccacccagcaccccctaggaaagtgagagaagagaaagggtgatggtaagagctaattcttgggtagtcagggtgtggtttttggatatattaaggccattatctcctcttttcccaggggtaggtaagtaaagccgcctggtgaaggtgaagcagggagactgtaatggaggggaaaaaatgcaggagtagcccccagcctccccagaggggccagtgaggttcaactgccattctttggaaagaggagagaattctaaggtgagggtggggcagtgaagagggctcttcattcagaaaggcgattctcgccggttcccacataactccactccatggagagtcttggacctcatctcagagacctcctttctctccccgagtctgtagtcgcacatttgggggcacgatccggctcagtttgggaagaaagttttccatggattccacaccaccctatactctccccagggagtataagtatactcttcaccttctactggcccccaacccacctctccacttctaaagaagtccctccctgctctcttccggtccctggacggctacccgcccgtggggggttgggggggacaatcaaggaggtccccagttaggagtcccgggtacagaggccactcacgtgtccaggcggattttcttaagcgccaccacctctcccgtcaacttgtttctggctttgtacacaactccgtacgtgccctctccgatcttttccaccttttggaagttctccatgaagcgccagcgagtcgggtcagcccggccctggagcgggggcctgggaaccctgcagaaggcggaccctggctctcgggggccgaggagggggaaacagggcccagtaccgtggccccgggtcgggatggaacgcagtatacctctcgctcttgtcaatttggccaacttgaaacaatgttgccgcctcccaccgagttcccgaccgccaccagaggccccgcccctgcttcccgcgtttccctggctccgcccccaggcctttctattggtcaacgtcagagccggggggcgagcccagcgctcctccccgcaaatgatcccgccccaggcaagtttggttcttgggggctagacaagtttcttccccggtggggcggctgaacactcttcccaagtacctgctttgggtccaagtttcctacctatgtctctagtctgtagggatttcttgatttctaactcactattttcaccaatcctggggaaaatatgtatcgacctaaggttaaattccacctggcccaggagcctcctttggaaaccaggaagccgggaatctcgttgcaaaggaatcctgggcctcagaggagtcgttgcctctgcctcatagcataccccgacactgtctctgttttgggatgcagggttctgtttctgtctttttgagaagttcctggtttaattcactctcccatgataaactgttgtgtctggtatgtgttacgcagctgcctttcagttagctcttgcccgggagtgcatcaagatgagagtgacccagtgaaaccagaaactgtcattgagtagcaggatgggaaagcaatgtctagggaccaggatccctttgtcagtttttcctttttcctctcctccggcccctcccaggccttctctgagggagaagaggaagggctatgcaaatgagcacccttttcttatataggggcctatcccagtccccccagtgcctttggttgctggagggaagaacacaatggatctggtgctaaaaagatgccttcttcatttggctgtgataggtgctttgctggctgtgggggctacaaaaggtatgtgtggatatgtggacatgagcaggtgtgaacttggggatgaattccccctgctctggtttctgtcctcctaatgggagatagcggcaatatttcaggcgtctcccactcatttgatttagtgaggatgtgggcacctgggctccctccctacatggagatttgggattttgcctgaaaataatctcatatgcttggaggggcagaaggatagaaggtctctgtggcactgattctgaggcttccttggcagtgagc

SEQ ID NO: 1729 - DNA, 6000 bp, Homo sapiens
gcatgatctcggctcattgcaacctctgtctcctgggttcaagcgattctcctgcctcagcctcctgagtagctgggattacaggcatgtgccaccatgccaggctaattttgtatttttagtagagatggggtttctccatgttggttggtctggtctcgaactcccgaccttaggtgatctgcctgctttggcctcccaaagtgctgggattacaggcgtgagccactgcgcccggctgaagtgcatttttaaaactcatttatttggccgggtgtggtggctcacacctgtaatcccagtactttgggaggctgaggcgggtggatcatgaggtcaagagatagagaccatcctggccaacatggggaaaccctgtctctactaaaaatacaaaattagccgggcatggtggtgcgcacctgtagttccagctacttgggaggctgaggcaggagaattgcttgaacccgggaggcagaggttgcagtgagctgagattctgagattgcaccagtgtactccagctggcgatagagtaagactccatctcaaaaaaaaaaaaaaaaaaaaaaacacaaaaaaccccttatttatttgtttatttatttattattactctttttttttttttttttttttttttgagatggagtctcgctctgccccctaggctggaatgcagtggcgtgatcttggctcactatagcctccgcttcctggattcaagcaattctcgttcctcagcctcccaagtagctgggactacaggcacccaccaccacacccaactaatttttgtatttttagtttcgccatgtttcatggtttctccatgttggccaggtttgtctcaaactcctgacctcaagtgatccaaccgcttcggcctcccaaagtgctgggattataggcgtgagccactgcgcctcgcctgttttgttttaaatcaagacataattcacataccataaaatttacttttagccaggcatggtggctcacatctgtaatcccagcactttgagaggccgaggcaggtggatcacaaggtcaggagttcgagaccagcctggccaagtgaaaccctgtctctactaaaaatacaaaaattagccgggcgtggtagtgggcacctgtagttccagctactcagggggctgaggcaggagaattgcttgaacccaggaggcggaggtggcagtgagccgagatcacaccactgcactccagcctgggctacagagcaagactccgtctcaaaaaaaaaaaaaaatttacttttgaacatgatcaaatttgtgttttagaaagatcacgatggcaagcagtgaggaggatggattagaggctggcagagattggggatggggacagggaagacaaaattattgtaactgaccaagagaggtctgagaagaaaaggatatgctggacctccatctgccccacccaggtccaacaactatcaacaccttgccacatttgctttgtttatccttactagttgttgtttttgtttttgttttggctaaagtatgtaaaagcaaatcccagacatcgtgttattttaaccctacaaatttaaaatgtatgagtattttcttgcataagcacaatgtcatttcatgctagacaaaattatcaaactcagtccatataaaatttcatgaatatctggaaaaatgtcttatgatttttaaaatcaggatccaaaatataagtacagtctttttgttaagagccttaggtgggtgggtgtgaacagactctttccaggatacattaaggaatatagtaaaagaaaaagacttgaaactgcagcacagcgaggaaagtcacatcaaggagaacttcctagaaatctgtgacactaaacatctagggagaaagcagggctgggatataatgtatgtatttcagcacagcagaaactaccctcaccccatttttccctttcctgcagaaacctctctcccctccccttccctcccctctcctctcctttctgtatatagttcagcacagcaaaaactaccctcaccccatttttccctttcctgcagaaacttccttccctttcctttccctttcccctttcctttccttttgatacagggttttgctctctcaccctgcgtgcagtggcacgttcatcactcactgcagcctcaaactcctaggctgaagccatcttcctcattagcctcccaagtggctaggaccacaggtgctcaccaccaagcctggctaattttttttttttttttttttgagacagagtttcgctcttgttgcccaggctggaaggctggagtacaatggcacgatctcagcttactacaacctccgcctcccgggttcaagcgattctcctgcctcagcctcctgagtggctgggattacaggcatgcaccaccacgcccagctaattttgtatttttagtagagactgggtttctctatgttggtcaggctggtctcaaactcccaacttcagctgatccacctgccttggtctcgcaaagtgctgggattacaggcgtgagccaccaagcctggcctaggcctggctaatttttttacgtttcgtagagacaaggtctcactatgttgctcaggctggtcttgaactcctgggctcaagcaatcctatgaccacggcctcccaaagtgctgggattacaggtgtgagccactacacccggcctccttatctcttttcttttcttttctttttttatttttttgagacagagtcttgctgttgcccaggctggaatgcaatggtgtgatctcggctcactgcaacctctgcctcccaggttcaagcgattctcatgcctcggcctcccaagtagttgggattacaggtgcgtaccaccatgcccagctaatttttgtatttttagtagagatggagtttcaccatattggccaggctggtctgacctcaagtgatccacccgtctcagcctctcaaagtgctaggattacaggcatgagttactgtgccgggcctcatcccctttctttttttttttttttttgagacggagactcgctctgtcacccaggctggagtgcattggtgtgatcttggctcactgcaacctctgccttctgggttcaagtgattctccagcctcagccttctgagtagctgggactacaggcatgtgccaccatgcccagctaatttttgtacttttagtagagacgggggtttcaccatattggccaggctggtctcgaactcctgacctcgtgatccacctgcttcagcctcccaaagtgctgggattacaggcgtgagccacggcgcccggcctcattccctttctaatgtgtgctgtaaccctagttgattctgctgggggaggatctggaatcatctattgagcatcccaccactagaacaagagaagtcataagataccccattctttctccacttccaactctcctcagagcagcacgggacattccagaccctctcaccaccccacccccgccccttgctcctgtcacgaggcccaatcccccagagccctttcatgtgatgctcagctgagacccctctgcctatctctccagccccagaacaaaaggtctgggctgtgttcacccgtacccatcccaagaggagaggattgtatctccttagtgttcttacccaataccacattctctgactccccactttaaatctcctaccccaagagacgtttcctaaaagagtctcctgcacatttcacccctttggagcccgtgctccagctcactgccaaggaagcctcagaatcagtgccacagagaccttctatccttctgcccctccaagcatatgagattattttcaggcaaaatcccaaatctccatgtagggagggagcccaggtgcccacatcctcactaaatcaaatgagtgggagacgcctgaaatattgccgctatctcccattaggaggacagaaaccagagcagggggaattcatccccaagttcacacctgctcatgtccacatatccacacataccttttgtagcccccacagccagcaaagcacctatcacagccaaatgaagaaggcatctttttagcaccagatccattgtgttcttccctccagcaaccaaaggcactggggggactgggataggcccctatataagaaaagggtgctcatttgcatagcccttcctcttctccctcagagaaggcctgggaggggccggaggagaggaaaaaggaaaaactgacaaagggatcctggtccctagacattgctttcccatcctgctactcaatgacagtttctggtttcactgggtcactctcatcttgatgcactcccgggcaagagctaactgaaaggcagctgcgtaacacataccagacacaacagtttatcatgggagagtgaattaaaccaggaacttctcaaaaagacagaaacagaaccctgcatcccaaaacagagacagtgtcggggtatgctatgaggcagaggcaacgactcctctgaggcccaggattcctttgcaacgagattcccggcttcctggtttccaaaggaggctcctgggccaggtggaatttaaccttaggtcgatacatattttccccaggattggtgaaaatagtgagttagaaatcaagaaatccctacagactagagacataggtaggaaacttggacccaaagcaggtacttgggaagagtgttcagccgccccaccggggaagaaacttgtctagcccccaagaaccaaacttgcctggggcgggatcatttgcggggaggagcgctgggctcgccccccggctctgacgttgaccaatagaaaggcctgggggcggagccagggaaacgcgggaagcaggggcggggcctctggtggcggtcgggaactcggtgggaggcggcaacattgtttcaagttggccaaattgacaagagcgagaggtatactgcgttccatcccgacccggggccacggtactgggccctgtttccccctcctcggcccccgagagccagggtccgccttctgcagggttcccaggcccccgctccagggccgggctgacccgactcgctggcgcttcatggagaacttccaaaaggtggaaaagatcggagagggcacgtacggagttgtgtacaaagccagaaacaagttgacgggagaggtggtggcgcttaagaaaatccgcctggacacgtgagtggcctctgtacccgggactcctaactggggacctccttgattgtcccccccaaccccccacgggcgggtagccgtccagggaccggaagagagcagggagggacttctttagaagtggagaggtgggttgggggccagtagaaggtgaagagtatacttatactccctggggagagtatagggtggtgtggaatccatggaaaactttcttcccaaactgagccggatcgtgcccccaaatgtgcgactacagactcggggagagaaaggaggtctctgagatgaggtccaagactctccatggagtggagttatgtgggaaccggcgagaatcgcctttctgaatgaagagccctcttcactgccccaccctcaccttagaattctctcctctttccaaagaatggcagttgaacctcactggcccctctggggaggctgggggctactcctgcattttttcccctccattacagtctccctgcttcaccttcaccaggcggctttacttacctacccctgggaaaagaggagataatggccttaatatatccaaaaaccacaccctgactacccaagaattagctcttaccatcaccctttctcttctctcactttcctagggggtgctgggtggtgtctccttgggggaaagaaatgactaggtgggggggaaaggaatatttgtaaccatattcccatctctgctttcccaacctctccaagtgagactgagggtgtgcccagtactgccatccgagagat

SEQ ID NO: 1730 - DNA, 6000 bp, Homo sapiens
atgagttcaccaggatggcccgagacccaccacggtatctggtcataaaggtgagtagggagtaggaggtgctaaggaaatttagaaaaaggaggagttggctggaaccaggattccccctaacaatcacctatcgatatagagagagagtgggcctggaatagcccctgggccagagccccatggtctgacaaacaagaagctagaggaagtagagctggagccagaactagacctagacctagacttggaagcagaggaggacaacctggcaaccaccacactgggctccgccctcagcctaccagttggaacacttaatcggccacgtggggtaagacaacttctaattacccaacactttgcaccctgagccctcacaaaccctacagatacccagattaactactcaaaggcccccatggtgaatgtagatttctcccttcatcttaaccttttccttattttttcatcctagagccagagccttttaagtccatcatctggatacatgcccatgaaccagggtaatcttggggagtcttgccaggtaagttctgttgctgagaggctgggttttaggatcagattgatacgagtagtatggaagacattagaaacctctgaggtttaatcagtgtcctgcaaaaaagaaggcagtgagggccgggcgagttggctcacacctgtaatcccagcactttgggaggccagagagagtggatcacctgaggttaggagtttgagaccagcctggccaacatggtgaaaccccgtctctacccaaaatacaaaaattagctgggtgtggtggtgcacacctgtaatcacagctactcaggaggctgagacaggagaatcgcttgaacccgggaggcagaggttgcagtgagctgagattgtaccactgcactccagcctgggtgacagagcaagaccctgtctcttaaaaaaaaaaaaaaaaggccaggtgcggtggctcacgcctgtaatcctagcactttgggaggccgaggtgggcggatcatgaggtcaggagttcgagaccagcctgaccaacatggcaaaaccctgtctgtactaaaaatacaaaaactagctgcacatgatggcaggtgcctgtaatcccagctactcgggaggctgaggcaggagaatcacttgaacagggaagcagaggctgcagtgagccaagataatgccactgcactccagcctgggcgacaagaacaagactccacctcaaaaaaaaaaaaaaaaaaaaaaaaaggcagtgaacaacccaatatccttctaaacaaatctctcttctttcctcatcatgtaaatttccttgcattattttctgtttattttcttccttaggagtctgcagtttctgggagcagtgaacggtgcccccgtccagtctctctacacccaatgccacggggatgcctggcatcagagtcatcagaggggcatgtaacaggctctgaggctgagctccaggagaaagtgtcaatgtgtaggagccggagcaggagccggagcccacggccacgcggagatagcgcctaccattcccagcgccacagtctgctgactcctgttaccccactctccccacccgggttagaggaagaggatgtcaacggttatgtcatgccagatacacacctcaaaggtgcctgactcttcctagggctttcctcaatttttcctcgaattctttccccgggctcctcttttttcttctctgatcatatgcctctctgtcctattaattttttcaaactttcccctaccctcatgaagttcttcacatacctagcctttcttctcaacccccaggtactccctcctcccgggaaggcaccctttcttcagtgggtctcagttctgtcctgggtactgaagaagaagatgaagatgaggagtatgaatacatgaaccggaggagaaggcacagtccacctcatccccctaggccaagttcccttgaggagctgggttatgagtacatggatgtggggtcagacctcagtgcctctctgggcagcacacagagttgcccactccaccctgtacccatcatgcccactgcaggcacaactccagatgaagactatgaatatatgaatcggcaacgagatggaggtggtcctgggggtgattatgcagccatgggggcctgcccagcatctgagcaagggtatgaagagatgagagcttttcaggggcctggacatcaggccccccatgtccattatgcccgcctaaaaactctacgtagcttagaggctacagactctgcctttgataaccctgattactggcatagcaggcttttccccaaggctaatgcccagagaacgtaactcctgctccctgtggcactcagggagcatttaatggcagctagtgcctttagagggtaccgtcttctccctattccctctctctcccaggtcccagccccttttccccagtcccagacaattccattcaatctttggaggcttttaaacattttgacacaaaattcttatggtatgtagccagctgtgcactttcttctctttcccaaccccaggaaaggttttccttattttgtgtgctttcccagtcccattcctcagcttcttcacaggcactcctggagatatgaaggattactctccatatcccttcctctcaggctcttgactacttggaactaggctcttatgtgtgcctttgtttcccatcagactgtcaagaagaggaaagggaggaaacctagcagaggaaagtgtaattttggtttatgactcttaaccccctagaaagacagaagcttaaaatctgtgaagaaagaggttaggagtagatattgattactatcataattcagcacttaactatgagccaggcatcatactaaacttcacctacattatctcacttagtcctttatcatccttaaaacaattctgtgacatacatattatctcattttacacaaagggaagtcgggcatggtggctcatgcctgtaatctcagcactttgggaggctgaggcagaaggattacctgaggcaaggagtttgagaccagcttagccaacatagtaagacccccatctctttaaaaaaaaaaaaaaaaaaaaaaaaaaaactttagaactgggtgcagtggctcatgcctgtaatcccagccagcactttgggaggctgagatgggaagatcacttgagcccagaattagagataagcctatggaaacatagcaagacactgtctctacaggggaaaaaaaaaaaagaaactgagccttaaagagatgaaataaattaagcagtagatccaggatgcaaaatcctcccaattcctgtgcatgtgctcttattgtaaggtgccaagaaaaactgatttaagttacagcccttgtttaaggggcactgtttcttgtttttgcactgaatcaagtctaaccccaacagccacatcctcctatacctagacatctcatctcaggaagtggtggtgggggtagtcagaaggaaaaataactggacatctttgtgtaaaccataatccacatgtgccgtaaatgatcttcactccttatccgagggcaaattcacaaggatccccaagatccacttttagaagccattctcatccagcagtgagaagcttccaggtaggacagaaaaaagatccagcttcagctgcacacctctgtccccttggatggggaactaagggaaaacgtctgttgtatcactgaagttttttgttttgtttttatacgtgtctgaataaaaatgccaaagttttttttcagcttcctgtctgtcaaatgaagacatttcgtatgttagataagagatctgctcctcagcagtggatactcacctttctgtgttctgacagtgctactctgtcccatgcagctttctctagtcctactattacttctatttctttagaacaaccatagcgcatagtccttttcattaagggttttagtaggaatctacaaggcaaccaattgggaataacaaaaagaacctacgtgctttaggacttataaaaagccctataagccctccttcagaggccaaacactgaaacctccagatgcttctgaattcattatcttagaaaagtcatcaaatctttttattttttcacggtaagaactctcaacaaacatgtctttctgaacacttcccttaggtgctccatccaggtgcctgttattggaacaataaagtcatgttacttcattaggagtccggcctctagattgcgaggcctttaaatggatgatccctccggtgtctggctgcccagttagcccccgttaccagcacccttggtcttcttccacctgtctgcccctccctgttctcccagcttcggaggacgactggaccggctgggcgggtttcgccagccgacccagggatccgaagaagggcgcacccagcctccccgacctaggtgtagacactgcccacccgctgcggctccactctactccacccctgcccgctcgactttaaacctatttccccgccgtagctccgcccctctcccctcagcccgcccctctctgttactggctctcgctcagcgttctcggtggaagtggtttttccgggagagaccacgcttcccctcaagctccccaacggctccgccttcccgccggagcctgacccttcccagagtgcccggcgattccggcgtgcgaggcccttggagggcaaggccccagggcctggcttaggagcgcgagaggcaggctgggaattgtagttcgaaggccctcgagagcggctagagtctggcggccgagaggactagttgtcccagcgtgccctgcgcctcagcccgcgcgctcgcagcttctcgctctcgcctgcctgcccgctcccttgcttgctcgcgctttcgctcgccctctcctcgaggatcgaggggactctgaccacagcctgtggctgggaagggagacagaggcggcggcggctcaggggaaacgaggctgcagtggtggtagtaggaagatgtcgggcgaggacgagcaacaggagcaaactatcgctgaggacctggtcgtgaccaagtataagatggggggcgacatcgccaacagtgagtgcggcctcgggggtcggggaatcaaggctgatagggaaaggtaacaggctggcccggaaggggctggagcggaggggtcatgcggactgagctactgaggggcccgcaccggtccgctgggcacggcgtggtgggaagacccggtgtcgcgcctgggacctgagcgggcaggcccaggctgaagtctatggaggtgcgggtcggcgaccaggatgagcgcagagaggggaccctggcaggctccgacccgaggccgtttgttaggaggcaagacgtgttttctcttgttcctatccttcattcccgattattgcttcctctgattctggcagcggcgaggccacctcgaaaaggaagcgcccagctattggcgacagaagtgcccctctgtttttgtagcgtctccggggcgtcaggagccaagccggcacgtgttgctgggtcccattgcggatggctggcccccttcttactccgctagtgtccctgacaccagcttccccaccaccagcttccccaccacgtgctttgctggagcctttccttctttacttcagctcttaccctggtgggggcccccttctaccttgggccagctaaggagaccgttggagagcactcctggagcttctaatgcaagtcttggagatatatatggcttttcttgaagttactcattactaccacctttccaatctgtgcagatagtcttagttagcattcacatttgttgttctcagtgacttgacaactcaaatgttttggggtctccgtcttatcccaactaggcaagcttgtgaacattactggaaaagggaggactgattttaggattttcacaagtcatccttactccaggtgtgc

SEQ ID NO: 1731 - DNA, 6000 bp, Homo sapiens
tttaggattttcacaagtcatccttactccaggtgtgctctgacgatctcagcagttgcctgtcactctaggcagatgccactttctcttttctctctttccagttagcctttccattttattccagttagggagatacaaactgcttgtcattgtgcttttaaatggttttaacagcaaagatggtggggaacaggtatttaggatgcctcccgtcctgtgggtgaaaatctgagttttaccagctttcaaagaatcaccaaaactgagataccaaaagtcaaacctgtgctttatatcacagtggacatttagtatcgtaccctggtttttggtgccttttagtatttgagatactagtggtttgaatcagaaaatctcttacagtttataactttggcctcatatttcttttagataagccatgatcccccgaaatgaaacccagggaccttagattaagtttccttggcttatgcacttgtttatgaggaaataagtctatatagattgagattcctaacacctaattagagtgtctgagaaaggaatgcggtaacatttaacagtgcatcggcttcgagtcagcaattctgtctaccttcttgtccctgatgcctataaatttcatctagtctttgcgtgtatgtggggataccatggcaagaaccctctgaagttcataactctgtcctgtcacaccaaaggtagcatctttggaaagtctgaggccttgcctagggagatggattgtatatacccagttgtcacataatgtaaggaagagaagggaatgttgacctttcagcctcagggcaatggcaccagggagtattatggaaactcttaaattcaacttccaggtattccttgggtggtaactagacaatgaatacatacaaggctgacatgatgggattctgtcctcaggggtacttcggtccttggtggaagcatctagctcaggtgtgtcggtactgagcctgtgtgagaaaggtgatgccatgattatggaagaaacagggaaaatcttcaagaaagaaaaggaaatgaagaaaggtaaaaaaaaaaaatccctcactaattttccgtttgacccttatttggtcctatatgtttttatttttttcactgtaatgacgcagtccccaccccagctctggctgaggtatttggaaatttggaatggcaagtgggatacaagcagtttcctacctaatccaaactgatgaaacttaagcaagaccctgaaaaaatccttctacatttctgaagggcactagggctcccgggagacagcaaggcagtaggctgatgattctttctttacaggtattgcttttcccaccagcatttcggtaaataactgtgtatgtcacttctcccctttgaagagcgaccaggattatattctcaaggaaggtgacttggtaaaaatgtaaggttaaaccgttttaaagcatttttctttttttaaagcatttacaaaatgccagttcctaatgcagtactctgatcttgcctttcagtgaccttggggtccatgtggatggcttcatcgctaatgtagctcacacttttgtggttgatgtagctcaggtaggtggcctgcttttgatctctgtttagccttggggtagagggaatgcactgccatttgcttcttatccccacccccaatcaccacgtaagttgagagagtctctagagaagcaaaaggagaaaggtttttgttgttgttgttgtttttaccctcctgttcattggctggtcttcgcatatgggctcacagatattaaccagatagccagctgagttaacagactttccaggaagatactgattgcatgtccttatctacaggggacccaagtaacagggaggaaagcagatgttattaaggcagctcacctttgtgctgaagctgccctacgcctggtcaaacctggaaatcaggtaagctattttatccaattccaaagctcgtttgaaccaaagatgcattaggcacctatagctactctatatgaaactaccaacctcccctacagaccccttataaaacagctttttaaaattagctatatttagctgggcacagtgactcacatctgtaatcccatcactttggggggccaaggtaggaggatagcttgaggctgggagttcaagaccagcctgggaaacatggtgaaaccccatttctacaaaaaatacaaaaattagctgggcgtggtaacatgtgcctgtattcccagcttccagggaggctgaggtgggagaatcacctgagcctgggagattgaggctgtgctgagctatgatcatgccactgcactccagcctgggcaacaatgaaaccctgtctcacaaaagaaaaaggaaaaataagcatttgctgtccccacaaaacagattagaatgccaggtaaaaaaggataaacactggacttaatattataggcatgtggtggcacatgcctgtaatcccagcactttgggaggccaaggtgggaggattgcttgaacccaggcatttgagaccagcttgggaaacatagcgagacccgtctacaaaaagaaaaaagaaaacccaggtttatgaccaagttctttcacttaacactcatttaacctggggcaaatcatttaacctgagactcagtttccttgtcttctagattgggatatacatctgccctgttcacatgcaaaatttattgagttagaccatctttgtgaaagcactgggtaaaatgatatgcagttacagctggtcctcagcttgatgctacattcagtagaagctatactttgagtacccatacaaccattctgtttttcattttccatatagtatttagtaaattacatgagatattcaacactaatataaaataggcatgtgttagataattctgcccaactgtaggataatgttttttaagtgctctgagcacatttaacataggctaggctgtgatgttaggtaggttaggggtattaaatgcatttttgacttagtgatattttcaacttatgagttttttggagatgtaaccccattgcaagttggggagcatctgtataaagtatttttagattgtagggataatcaagctatgaaatgaaaaaccagtgaatgacaatcattggggcttgatggaggatattagaacgctcagttctgccaggtgcaatggctcatgcctgtaatcccagcactttgggaggctgaggtgggcagatcacgaggtcaggagatcgagaccatcctggccaacatggtgaaaccccgtctcttctaaaaatacaaaaattagctgggcgtggtgttgcgtgcctgtaatcccagctactcaggaggctgaggcaggagaatagcttgaacccgggaggcagagattgcagtgagccaagatcacgccactgcactccagcctggtgacaaagccagactccatctcaaaaaaaaaaaaaaaaacgctcagttcttttatgcttcttattctcattgtagagaacttattagctcctgatatctcacctttcatttgatgttgtacttctagaacacacaagtgacagaagcctggaacaaagttgcccactcatttaactgcacgccaatagaaggtgagaacagataacagggttgagggtctaagaatgagtggctttgccaggtgcggtggctcacgcctgtaatcccagaactttgggaggctgaggtgggcggatcacctgaggtcaggagtttgagactagcctggccaacatggtgaaaccccgtctctactaaaaatataaaaattagctgggcgtggtggtgggtgcctgtaatcccagctacttgggaggctaaggcgagataatcgcttgaacccgggaggaggaggttgcagtgagccaagattgcgccactgcactccagtctgggcaataagagcgaaactccatctcctccatctcaaaaaaaaaaaaaaaaagaatgagtggctttgcagaattgaggcttttgctcccttgaagatctatcctggctataacccagtctaagccagaaatctcagagccctgtgtttccataaccaggtagttgtctcactgcctaccacttcaaactactgaagtgggtggatttggaaaccttttgggatactggatagcttgttccataggttgtgtactatctacaggtatgctgtcacaccagttgaagcagcatgtcatcgatggagaaaaaaccattatccagaatcccacagaccagcagaagtaggtgccaaccctacttattaccttctaccacacaagactagtcatcaggtttttttctatactcccaactgaatcttgtccgccctctactccatgttttcaggagtgacctgttgctcttaatattccctttctctaggccgggcgcggtggctcacgcctgtaatcccagcactttgggaggctgaggcgggtggatcacctgaggtcacgagttcagaaccagcctaaccaacatggcgaaaccctgtctctactaaaaactacaaaaatgagccaggcctggtggtttgtgcctatagtcccagctacttgggaggctgaggcaggagagttgcttggacccgggaggtggaggttgcagtgagctgagattgtgccactgcactccagcctgggtgacagaatgagactctgtgtcaaaaaaaaaaaaaaattcctttctctctattccttttaggaaggaccatgaaaaagctgaatttgaggtacatgaagtatatgctgtggatgttctcgtcagctcaggagagggcaaggtgaggagagtaccagagttggcaaagaggggtgactgagagtgttcaccagaccaaatgttacttaaattactctttcaggccaaggatgcaggacagagaaccactatttacaaacgagacccctctaaacagtatggactgaaaatgaaaacttcacgtgccttcttcagtgaggtggaaaggcgttttgatgccatgccgtttactttaaggtactaagcaatgatagtacttggaaccagtctgactcacagaccatacacccaggaacactttttcctctcccttcctgcctagacttgtagcgtgcatgtgctcactccctccctctctctccccatctccttctcattgaaggtaatgtaaaagagcaatcctaagcatgatttctgcctgagggtaggagctattttaaaatatgagcaaaatggtaagacttgatggggagttaaagatacctctgaatatcatcttccctgccagagcatttgaagatgagaagaaggctcggatgggtgtggtggagtgcgccaaacatgaactgctgcaaccatttaatgttctctatgagaaggagggtgagttccaaaaagagcttcactttggattccctgattataagatatccttcctgtaagttcagaagagctaagtatgacaaaggaactttttatcaaaacacatcttcatttttgccataggtgaatttgttgcccagtttaaatttacagttctgctcatgcccaatggccccatgcggataaccagtggtcccttcgagcctgacctctacaagtctgagatggaggtccaggatgcagagctaaaggttagtatggaatagaaggtggtgagtatgtacatggtatcctgcttgggagtgagggctaaatgccagcaaagtcctgaaaagagctgcagtactgaaagtaaccctttatttttaatttcctccacatttctcaaaatttttttcccttcttcctgttttccaggccctcctccagagttctgcaagtcgaaaaacccagaaaaagaaaaaaaagaaggtgtgttattaacgatcattcctctctggcagggtgaacctgatccctctttctcccactgtgttaagttgtagtgaaatacggatttttatacagatgctcctcaacttatatgatagaactttgtc

SEQ ID NO: 1732 - DNA, 6000 bp, Homo sapiens
ccaataaatatctctgtgaataaattaagggcttaggaaggatatacagacacacgggagactgtggtaactggcggggaagggtggctttgggaaaagagtaaatgaaataggcttcctggagggtccctgagtccaatagctaaaaggtcctcgcccaatctccgagtcctctccttgcacctcacctgcagtgggttcttggtgctgatcgccaggacctggtacttgaagtagcagagctcacagctccaggagcccctctcgctgatccagcggatgaggcagggctgatgcgtgcagcgcactgagccgtcgcagcggcaggggcttaagagctccccctggaggaagagtgaggaggggccctgtcagccatcaccaccccgaccccactcagccgcgctccccgacagggaaacctcctcttcaggtcactttcccaccttaaataactcaggcctttcacccaagacagggcaagaggctaagtaaggctgcaacagaaaagaagcttcccttggagatcaagggaaacttcccataccaaagagatgaaagatggaaagggatggggggattagaggggagaagggctgggtcttctcttttcctagaatttgggatgggtagtctttaagacttctcaaaagaaaggcttcctcttaggatctggagggaggggagtgttagagcttctgagccatgctttccttcccccaccccatcattgtaaagttacttcacagatctggcgcaaactgggatgggttatggtcctcggtttccacgtactaaaaaggggagaaatcgcggaggtgggagtgaagggtgtttccctttaatcatggaatcaattctcactacacagagacaccccctggcactattctgggacaactttgcccataaaattttaacaaagaatactctttagaatgagatagaaagttgcagaatgggaagtgaaaaaaagtgccccacggggagaaatactgagctaagcaagggcgctggctgggcccctcccttcaaggggggcacagaagcactctcctttctgcccacctgcaagagaacaggtccccttagcttacggagaccctggggcgagggaaataggagagaacagcagtccctgttaatgggtgagagggattttgcgctctccggggagaaagccccaccccttcctggggacccttgaccctccgacacaaacaagcgctccaggagtcccctgccagcccctcggcctcaccccattcccactccgtgtcctggggcccgcccagcctccttaggcgccgcgcctgctcgcggtctccgctgacaccccaggtgcgcgcctccaccctccgcgcccggccaggtgcccaggcctgacctgctccgggccctggaagcagatccggcactgaggggttcggagtccgctgtccaggctactgctgagcgacagggcgtccagcgcgcccgggggcggcagcggcggcgcgggcggcggcaggggtccggcccgcggctccttgtcgccggccaggccccgggcccgcggctccgacccgtagtactcctcctcgtcgccgtcgccgtcccgggtggagcagccagcgaagggcgcccagccgcagccgcctccccggcccccccggggttgcggctcggcccggggccgccccccgcctgtcagcaccagcagcttcagctcgttcagaaacatgcggagccgagacttgagcatcgtccggacaccgggggcggggggcagcgtgcaaggggggctcgctagcggcggggggaggggagaggacaaggccgggaagggggcgcgcgctagagagccgagccgggccggggtcttcggggcctgcgacagccgttcactgctgccaccgccggggctccggtgcttgcggggccgagcgggctggcggcccgggggcggcggggtgggcggccatggccagggcagggggcggggaggggggctcagggtgccgcaccccgcgggtctgggtctggagcgggccgggcccccggggttacgcgcccgggtcctcctgcggcggggccgccccccatcgccgttctctcggtcccagtccccctccggctccgggatcaggcttggctcggcccgtgcgctcggcggtggcaaatggcggctccttccggcggcggcggcggcggagacccccccggagtggcgggcgggcggggcgggcgccggggagcgggtgaaggatggagggaggggcggggcggggagggggagaggagaaggggccgcggctgcgcatccccgccctgccccgcacgagcaggtgtcccaggggcgggggcaagtgtgggatcccgaggagggtggaggaaggggagtggccaaggaaggggagtgtgcacacaagttgactaggtgtgtgtctgggagtgggggatgagcgggtgagcatggaaggtgagtggttaaatgacgcaggtgtaccagggagggtgaggcttgtgcaaaatgggaatgtgcaaagaaagagctgtgcaagtgtcggaggtgtgagggaggtacatgggcaggggtgggactcaagcaatatacactttacccaaagggctgaaaagtgtgatcgatggggactgggaaagagaggtgtgtaaggaatggaatcggattgtctgagaaacagaagcctgtgattgtaatgtgtgaaggaggtgagggagggagcaggggaggtaggcgtgctaaagggatgggagtgtctttcctggtactctcctgccctcacctccactacactgaagtgaacaatacacacacttacccctttccttttatggagacttccctctgaggccaagttctacccccatcacatttttttctttcttacacttacattctccctctcctcccctttgcaaagctgagggaaaagggattccaggggagctcattgggtcaaacatactgggaaaaaatttaattagtgaaagagtaattaacagaagaagggaggggacagagcctgggacagactgccaaattaaggttcctcaatagaaagtgatggagagacagtaatgttcccatgaagtattcaaatgttttggatggactaatgaatgaatcagaaaaaggggctgggacccaagcagacagagaggacgtcttctgttgcaaagacagtaagctgtgaaggtcttatgtggaaggtgaggctgaagtggggaatgctggtgtgggaagggagtttgaaaaactcacagacaattatcttagccttccagaaggcttacaaagcacccacccctagcaaggtagccaataaaacattcacctcttgagccccttagtcagttcagtccttgaggtttttcttactagtgttccagctgcccttgccaggaggggcccagggctacaagtatcaggatggaaagaggaggcatctgtattaatatgtattctattttgctctaagtcatggtttatattcatcttctagtttgaactcttatattctcagccagatggttaaggaaaacagaagttagagtggaaggagtggcaaatagggtaataaaatggctttagattttagacaaattctcacaaatgagacactaaccgctttcctcctttactcccatacccccaaagggctgggagataaagaccttggagccaataaaacaaagtaggagaaatctacttgtgtctacctaggtgtctgggcagaggccatttgggaacaagtgtgttctggacagtgctaagtgctaagaaagcggcactagggaaaaagagggaagcacaataactccaaatgagtagtcacaaggtttgcagaagggggcatgtcattttcattcattgtggtggtctggagggtgcagggggtgtggtggtaactttcttgcacatgtgcaatcctgtatccgtcttatatatgatgtgataaataatatcatatacatacatatatacatagaagcatatatgcacacatacaaatatcacataatcatagaaccttcctactggaaaaaaaaaaaaaacttaaaaggtcaagtattcctgtctcctgctcatcaataacttctctgccagatggcctcaggtctttgcattaacactcccagggaggtttggaagttggaaaagtgagaggattaccttgtcactgagcctgttggattactgtattaatctgccttccgtcatcctttaatcgtagttttgccctcaaatgggcattgtttactccctattgtagaagaccccattgttggctacatctttatagatagtcgtaccactactttaaagggccagtgacagacaccaaaaacaaaataaaaacccacatacacactggaagcaagcactcagtaaaatgttgtagaattaatgaatgaaacaatgacacaaatgagagtatgttttctcatggtggagcgaaaaggtgacagcatcacctctggtaccccaactcccaccccctccccaatgcagacaggctgaaagaccggtagtgagactggagttcagccttcagaccggtagtgagacaatccttcagccgggagttgggctctgggtggcctaggttgccatggcaccgcctcgggctccaccctctcttgtccccctcaccgctccccccctgcagcgggggttgtggcagccagtcacgtgcccgccgcgtagccacacctctgctcctcagagcaatgtcaagcggtcacgtgtgatagcaacagatcacgtggctgccatcgcccctccgcccccttacactcttcgccctcctcccagtcgaagcacctcctgtccgcccctcagcgcatgggtggcggtcacgtgcccagaacgtccggcgttcgccccgccctcccagtttccgcgcgcctctttggcagctggtcacatggtgagggtgggggtgagggggcctctctagcttgcggcctgtgtctatggtcgggccctctgcgtccagctgctccggaccgagctcgggtgtatggggccgtaggaaccggctccggggccccgataacgggccgcccccacagcaccccgggctggcgtgaggtaagtgcagtcccttcccaggaatgagaaccagtgcccgcccccctcacagctttccacgcgttcgtttcgcgagctggttatggaagggtcgctcaagggcgggaagtggggcctttgtggtcatgggaaagtataattttagggactgaggtgtaggatcttcgatgcaaggcatgtgtcatgtgtgatctttgtgcggggcgcgattgtcccaaaggaaaaagcgttttctattgcagggcctcacgtggctggaggggttggtattgagtcattgtgttatctctggggccggccccaaggaagactgggagcgggggatgggatgctggtggtgttctttgcgctttttttttgggagtccctttgttgctgcaggctcataccatcctaactctgtaagcgacttttggtgataggagtctgtgattgtagggtctcccttgatctgagaatggctacctctcgatatgagccagtggctgaaattggtgtcggtgcctatgggacagtgtacaaggcccgtgatccccacagtggccactttgtggccctcaagagtgtgagagtccccaatggaggaggaggtggaggaggccttcccatcagcacagttcgtgaggtggctttactgaggcgactggaggcttttgagcatcccaatgttgtccggtgagaaggtggtggagggttgggcgtggggagtaaagggaaaagacagcctataggtggggtgtgatgatctgtagagaagtggggaccctgaggaaataatgagaggccatgttgggttaaaggggattgaaaagtgagcatttactctggtcaggctgatggacgtctgtgccacatcccgaactgaccgggagatcaaggtaaccctggtgtttgagcatgta

SEQ ID NO: 1733 - DNA, 6000 bp, Homo sapiens
tttttttttttttttttttttttttttgagacggagtctctccctgttgcccaggctggatggagtgcagtggcgccatctcggctcactgcaagctccccctcccaggttcatgccattctcctggctctgcctcccaagtagctggccctacggtattttaataaagcagggagactggttgagaggctttttcagaaatggagccagatctgataaatccgtattcaaaggcattgttaaaggactgtttagattgtttactgctgtgcaacaaaccaccctaaaagttagtggcttaaagcagcaatcatttaatgtctcaagttgctatagatcgagatgggcagggcacagcagagatggctcatctcacatgatgtctggaggcctggcttcctcatatgctttgtgcctatgctagtatgattcaagcagctgagggctggctggaccagttccactaggttatgtctggaacttaaagctctcagctgtgttccttagttttcttccatgaagtcttgggtctttcttcatgtggtcttcttacatggcagcttagggttcccaagagcacaaaagtagatgctgctaggctttcttgaggcctaagcccagaactggcacaatgtcaattctgttgtattttgttgaattacagtggctcatataaaagcatgaacatcaaaagtgtagtttattcagggccaccaatgtaatagagggcctaaaggaggaagaattaacacctctgattgataaggggaatgacagaaatggaggggtcaaggatgacccccagttatctggtttgggtgactgagatggttgatggtgtcagttcattgagatttaagatatatttgggggctgggcatggtggctcatgcccgtaatcccagcactttgggaggctgtggagggtggatcacttcagcccagaagtttgagaccagcctgggcaacatggtgaaaacctgtttctatgaaaaaatacaaaaatcaactggcgtggtggtgtgtgcttgtagtcccagctactcaagagactgaggcaggaggatagattaagcctgggaggttgaggctgcaatgaactgtgatcctgccactgtggtccagcctgggcaacataatgagaccctgttttttttttttttaaagtgctcctctaagtgtgctccacagactgattcctgtgtacaaactatcacggtctgcaacaggagaaatatcaagtcttctaaccttctccctactacccaaacagtaggtgtctgggtggacccaacttaatgtgactgtggactcctggtcctttatttggtttccttccccaggtattctaactgttcctgaggaatgttgacaagtcccataactctgttctggtggttgtttgccacttcgccagttatttcactccagttaatgaatctacccttgctcccaaatcacctctagccatcaaataatgatatgctacagtgctttcctacttccataacatgccaagcatatccaacctcggctactatatttataaagcctattagaagacttgggatataatgataacaatagctaagctaaacaggcactgttctaagctatttaatctgtgataattatctccattttacacaaagggaaattgaggcacagagagattatataactggaagctgaccagttaacaaaaagccaattcactgaaagccaaattataccaaggggaagagagaggaggacacagggtcatagagaggagagggtcacaaagactttgagggaggaggaagggttaactaagagaagccaagaccaagggacttgagagtagaggacagaagatgagccaggagaaagtcacacaacgtgtttaatcacagaaacatggattcccaaggtctcactatctccataggccctgtaacctatctaatacaaattacgataaaatgtataaatagatgggcacagtggcttctgcctgtaattccagcactttgggaggccaaggtgggcagatcgcatgaattcaggagttcaagaccagcctgagaaacatggcaaaatcccgtctccaccaaaaatacaaaaaattagctggtgtggtggcgcatgcctgtatttccagctactcgggagacaggtcggaggatcgcttgaagtcaggaggcagaggttgcagtgagtggagatcacaccactgcactcctgcctgggtgacagagtaagaccctgtctcaattaaaaaatatatatataggtgtggtggctcatgcctgtaatcccagcactttgggagactgaggtgggcagattgcttgaggtcagaagttcgagaccaccctggccaacatggttaaaccctgtctctactaaaaatacaaaaattagccagctgtggtggtgcatgcctgtagtcccagctatttgggaggctgaggcaggagaattgcttgaacccgggaggcggaggttgcagtgagttgagatcataccactgcactccagcccgagcgacagagtgaaactctgtttcaacaacaacaacaacaacaaaaaagtataaacagctaaaagagacagtttttggtaaaccagcacattgatcacgctctgaatggccttcaatgaactgatttaaagagcctgtgaaacccacccaagactacaaagctagtacgtaaaatggttgaaattcaaactcatatagtctgggtctagaagctgagtgtttagcctctaggtgtagaggtgtcatcaaaggagggggaagtaggaaagaaggaagggtcaaaagatgcaatggagaaaggacacatttccaagggtcccatcatagagtctcttcctggctgcctctagcctcagttccacaaggtggcagggcctgcctccttctccccatccaaatgcctctggctacattcaaagcccagcagggagcagtcattggtttccccatcacacacagtctcaggcttgcctaccagaggacataataaatatctccaggtatgtaattttgcccacaataaaaacaacctttttcaatattgtgcaggcatcttagttttttattgtgaatcttctcattccagaatgcgatttgggatctgcctaggaaagtacatttcctgaaagaagaccaaattttcctacaaagaagagaaaactcttgggagatttaaaataacaatttgtccagcctgaactccccttttcatgttggacctgaggaatactgtaaaccagggtcagcaaactttttctgtaaagaattagataatacatgttttaggttttgtgggcccattcaacctgtcatgactactcaactctgccacataactctgctatcgtattgtgacagagtaaatatgtatgggtatgcccatggattccaatgaagctttatggacactgaaatattaatttcacaggattttcatgtgtcaggaaatttttgatttctttcaaccacttaaaaatgtaaaaactattcttagctctcaggccatacaaaaaacaactggcaggctgggtttgactcctcacagcttgccaacccctggtggaaatcaacccacttagaggaaatctgaagggtagaaacaactaaaaaattgaaaattcctgttaatgttagcaatgtcaaaaatccaggagaccccagctactcaggagaccaaggcaggaagattgcttgagcccaggagttccaggccagcctgggcaacatagaagaccccatctctaaaaaaaacaaaacagaaaaagaaaaatccaggagcttgttttgttttgtttttgttttgagacagagtctcgctctgttgcccaggctggagtgcagcggcgtgatctcggctcactgaaacctctgcctcccgggttcaagcaattatcctgcctcagcctcctgagtagctgggattacgggcatgcacaccacgcccggctaatttttgtattttcagtagagacagggtttcaccatgttggccaggctggtctccaactcctgacctcaggtgatccgcccacctcggcctcccaaagtgctgggattacaggggtgagccaccgcgccctgccgaggagcttaagcgatcagttagtcaaagggagaaaagagggtatcagtagatgacagaaaaattttttagagaacaaatttttagacatccgtcaacttagagaaagtagaaaactgtctataataaactgaaatatttgggactgatcttgatgtctgccaaggttttggcagacatcaagatcagtcccaaatatttcagtttattataaacaaagactaataagtcgtctctactattggaggaaaaaaaaaaaaaagaccgaaatgcaaaaattcctgaaaatgagtaaatagggcaaagataaaatactataaatgtctctctcagttcacaagaccttatcctgggcagtcaacgtccagttagaaataacgtctgaaaattcagtaagagaaaaggaagtcttcttctgtaatactcagtaaataatgtttaaaattaacatagcaataatattatctgggaatatgatagtaaatagcccctccaaaaaactgaaaaagttgaaagcagttttcctggagacaggaagtggtgaggcagataaattatgtttttccttattggtatataacactttaaactgtgtacatgtgtgactttaatagaagtgtttaaagattaaatttaagaaaataaaaagtgtgagcaagaactccatttctatggcaacccgcgcggcagccgcctctttgttctggagcggcggccacgccccctccagtgtgaaaggctgcgtttccggcccgtggggctccaatcaaaatgggacgcctgctggcggtaacgacaggccggggccccgccccccgaagtagggcgtgtggcgtcacttccggcttccttcagtccgctggtcccgagcacgagctgtgaggggattcacttgtgtgcggaactcctcggaaccatggtgagcctgactcccctgcctcttgccctacccctgctccgccgtgctcttgccaccccactgcttcctctgtcctgctagggtcgtaggctccgtttctgtctccccggccctccgcacatggtgcgagccatgcgcggggcgtgcggcctgcgccaggccagccggtggagctcaccacgagggggaggggtggaccgcaaagccagcgtctccttgtgcctaggtctttgcatagtcccggcagcccaggtccgcgcctcacccggagcgaagaaatttctagtgtgggacccgctccgccctccttctaggggcggagcctggagcgacggggtctgagccatcagagggtggaggggccgcagccttccgagggtggaagatggaggccgcgttccctcgcccgcccggcaggcgtcaccttgatggcctgcaacccctccctgcctcattcttagttcaagatcgtctttagtctcgctgtacgtaactgtcaatctcgctggtgtataatttatactcccgggggccttgtaaatccgaaaagccatgtcgctctcctacaagtccctctctcccacttaaatgctttctccgatgatggaagcttcatttgattgaaaacattgttgtaaatgagttttctcttagatgtccacttgtaagactagtggaaggcacctcagtgtatgtgttagagtattggtacttaaacggaatgcctcttggttttccttttcaggcgtccctttcccttgcacctgttaacatctttaaggcaggagctgatgaagagagagcagagacagctcgtctggtaagccttgttctaagcattgttttaaagataaaactggaggccaggcgcggtggcttactcctgtaatcccagtactttgggaggccgaggtaggcggatgaactgaggtcaggagttcgagaccagcctggccaacatggtaaaacccc

SEQ ID NO: 1734 - DNA, 6000 bp, Homo sapiens
agtatgtgaggaggctgatactttaaccgaacaactcacactatcttgccctagagctgactgacatgaattgtacttttactacggtatattctttctgtaaaatgtgataaatctctttttttctgtaaagtgtgattaatcttgggatgtgaaaccccaaaagggtaaaagactattcacaggtttgagaagtggtggagatttttgcagagaggaatgtcagacataatctgtatatacatccttctgagcacagcctttgttactcactcttctgttacagctccaccctgctcatcagattcctcatttacagcctcaactccttccaaaaaccagtgacattgccacaaaccagcgagatgcagcccctttaaacctctgtgcctactctggagggcagcacacctgtccggctcttcctgtcctcattgatgggacgtgaggatccatttctgaaatcactgagtcagaagcatccaaaagaatcaatgaaagaagagtacaactagcaagatgctaaggaacaacacactaagcacttaaaaaatacttgatacccaagggccaattccagatcaagtaaattagaaatctctaggtgtggggttcagctgctggtatttttttaaatctcccccagatgactataaagaatagacaaggttgagaactacaagattagcacaatacagaaatgtagggagagctgccatgtaggtaacactatactgtttcaaagtcaatgatgtctcaggcagaaattattgaggtagagtcataggatactccaattggcacaaaacctggtgcggtagttttaaaatatgttgaagagaaaaacaaacaaccccatcaaaaagtgggcaaaggatatgaacagacacttctcaaaagaagacatttatgcagccaacagacatatgaaaaaatgctcctcatcactggtcattagataaatgcaaataaaaaccataatgagataccatctcatgccagttagaatggtgatcattaaaaagtcaggaaacaacagatgctggtgaggatgtggagaaataggaatgcttttacactgttggtgggagtgtaaattagttcaaccattgtagaagacagtgtggcaattcctcaaggatctagaaccagaaataccatttgacccagcaatcccattactggggtatatacccaaaggattataaatcattctactatggagacacatgaagaggtttattgcagcactgttcacaatagcagagacttggaaccaacccaaatacccatcagtgatagactggataaagaaaatgtggcacttatacaccttggaatactatggagccataaaaaaggatgagttcatgtcctttgccaggacatggatgaagctggcaatcatcattctcagcaaactaatacaagaacagaaaaccaaacaccacatgttctcactaacgaatgggagttgaacaatgaaaacacatggacacagggaggggaacatcacatgccagggcctgtcatggggtagggggcaaggggaggggtaggggtagcaaggggaggggtagctttaggagaaatagctaatgtagatgaccggttgatgggtgcagcaaaccaccatgccatggcacgtgtatacctatgtaacaaacctgcatgttctgcacatgtatcccagaacttatttttatatatatatatatatatatatatatacacacacacacacacacacacacacacacacatatatatatatatatagagagagagagagagagagaaatatggccccaaattctttgacacttctcccattgagagtgaggtatatgtcttctccccttgaatgtggatggatttttgactgtttcctcccaaaaactgtagtggaattgatgctatcagttcttaggctacgtcacaaaaggtgatactatttccactttgctacatgacacattcattttggatcccaggagccaccctggaagaagtccaactaccttgagctaccaggatatctagaccaggccatatggagaggtcacatgtcgagactcttcttgatactccagcctagttcccagccaacatcagtgtcaactgaattaccgagagattaacaggttatgtatgcattctgggacttaaaaacatcaatataaataagtgtgttggaataatgtctctgaatttgtccatcaaacatttatttttcagttttcctccaaatctaagataactcttataatcaatgaaattataagtgcctgaagtgatgtatccaactgagttttttttgtaacttgaatagaaattacatttgtatcaaaatagaaaaagtacttttactctaaaaatgttaggaaaagccctgtaccgtgaaactgtctaacctcaaagaaacgatcattagtattttgaaatatcagagaaatgaatggactttaataatttgaatgttggtctagaaggctgaatggtgggccccaaaaaggtgtatccatgtcctaatccccagaacccatgaaggaatgttactctggaaagaggatcttcccagatgcaattaaattgaagatctcaagatgagatcatcctggactatccaggtgggacctaaattcattgacaggtgtcctcataggagacacacaggagagacttaacagacaaaagagaaagcaacgtaactatggaggtagaaattggagtgaggctgccacgtgtcaaggactgttaacagccaccagaaactggaagaggaaaaggacaagagccccagagggagtgtggccctgggaataccttaactttccagaactgtgagagactaaatctctgtccttataagccagttgtaatttgttacaacagccatagaaaatgaatactgttgggaaaagtatttccttatctaaacttctgcttccacatatgtgcaaaatttaataagttgcaattttttattgtttaaacttctcattaggtttctacctacaaaagagatttcagttcaaaatgttattcctataaaaaatgtcagatttttattactattttcttttgtttaatgttttgcatacttttctcttttcaatgtatgacctagcagtgatttttttttttttaggccgtatttaccagcaatctagagtacgaagtgaaggacttgattgagcattctgaattctgctgagagttcatttaaaatatatgtatttgaggccgggcacggtgtctcacacctgtaatcccagcactttgggaggccaaggcaggcaggcagatcacctgaggttaggagttcgagaccaacctggccaacacagcaaaaccccatctctactaaaaatacaaaaattagctgggcgtggtggcgcacggctgtagtcccagctactcgggaggctggggcagagaatcgcttgaacccaggaggtggaggtttcagtgagccgagattgggccactacactctagcctgggtgacagtgcaagactccgtctccaaaaataaaataaaataaaaatatttggagggtaagtggtgaagaatggagtcttggtatagaaaggaaaatgatacctttgctgtaaagtagatggggggtagggacatgtctgtacatttaagaatgtctgatgctttaagaaggctgtctcacatttcagttgagggatatcttacaaaatacttgaccaatactactcaaaaatgtccaggtatcaaaaatgaggaaagtatgagaaactgtcatagccaagaggagcctagagacataggaactaaaggtaatgtggtatcctgaacagaaaaaagggccattaggaaaaaattaagtaaatctgaataaagtaatgacttgagctcagaagaatgtaccaatattagatcattaatttcaaaaaatattctatactaacacaaaatgttaatagtgggtgaaattgggtgctgaatatatgggaattcttggtactatctcaatttttctgtaaattgaaaacttctaaacaataaagtctgttttgtaaaaagtccatctctaccaacattcatattttaaacaagaaactgtaggatgaaagaagtgaaacatttaatacagatcagtggtgttgaggaaattttctagactgtctcccagaatgctagtccctattgcaaagaactacttttttatataaagctttttccctcctaattatttgcaatttgccgaaaagggaacaccaaaaaacatttccggatttgccacacacacaaaacaaacaaacaaaaaaaagttagaaaaacttctggtttggcttccagtcttgtctccagggctaactggcgtgccatctgctcgcagcagagcggtaaccatggttcatgtgtcacaccagcgtgcgatgttaagaagtttgccccggcaagtctggacaactccgcttccgcacaggttgctgagggcgggcggggatggcggcagcagcatccagagggtgtagatcgttcttccaaaccccatctgctttcctgtcctctggctgtgcccggggtccccgggcgcggcaagccgcggggacgtgcgcgggtcttctatgcataacaaaagagccctcctcctcctcttccttctcccgccgccccgcgccgccccgcgccgcccccaccttggcttcccgcggccgccggggcccgcgtccccagcaggaattggctcccgggcccgaggtttccaggtacccggaagggggagggggccgaggcggcaacaattgggcgggtgagggcaaaacgcgcggctcggagcgccaagactccgaggggcggtgagcccgggccgtgccgccgcacgattggccggggccgccccgccggccgccgctgattggtggattctcaaattcggtctcaaggcgccagaggaggtgttttagcggggactacgatccaggctggagttgcgctcggccggtctgagcgctggcgctgcccggacgccgcggggtccccgccagcccagggcactcggcgcggggatctgcgcgcctcgctctcccttcccgatgccgccgcccggctgctgatcgccgcaccaccttccctcatcggcttgggtccgtggaggtccctgcagaggcaggaagcctccttaggaaagcaggggtaagcgtgcggccccagcgccagtggggaggcgggaattgggatacagggcccactcccgccccggctgccagcctgccactcctcacgtcccccggctggcgagggctcgaggtgtttctgccggggaacccggtgcgcagagggtgtgccgggtgcagctctcactccggcccggcagtagaggggatttgcccttccccacaacttggagctttcattggagaagtttatttgggggatctgcttggaggcctgggaaggggctgcgctcagcgctgagtgggtttggtctagcgatcgggtttccttcccccgattcaaaacccctcaaagccgaattcctctcagttctttgcgccaaaattaactgacctgggagaccctgtacttttctgacagatttgcccaacacccttccgacttggtaactttattttgccatctagcttttcataaggagttactatttttgtagatttttttcttcccagattttcagtattactaagcacactttaggtgtttgagtttgttcgcgtgagttttagaaagttgagggtggctacaactcctggaaatgcccaggatgtgcttagagaagggggaatttcatattgacaaacaagtaacacatatgtagatatttttgtttgaggaaaaaatacctaattgcaaaatcattttctagtgtaattgtgcattacagatggaggtaaattgtttaacactaaaagacctgatcagccccaggcagcccagactagattttgcagttgaagatggggaaaatgcacaaaaggtaagcaaacataaacacctta

SEQ ID NO: 1735 - DNA, 6000 bp, Homo sapiens
catagtgctaacgatcacaaggagtctaaaacttaaagaatgaattccctccattccttatgggacatttgatcacagctgaggcacctccctttaaatagctggacatctggatgtcatttgagatgggagccacaaatgccctttggccttattttcttttattgtggctaaggtcatgagcaggaaccaatcactttggtttctcatattctcctcacattgcttatagttgctccaagaatagatttttttgccttctctgaagttgttatcaaatagagaagcaaatgcatcacattctcagacccacaaatggctgaagactaaagtgcattttaaatggcaagactcagtttaagaactgttgaacaggtccatgcaaagaaacttgacaactgccacgatgtgaagtcaagatccctgttacctttgtggtgaaaaatcagttaccaattcctttctgtggctgctcttttgagaacagatgtcacaccaagatgactgcacttgcagtagtgggagaaaaggaaagtatgtgaggaggctgatactttaaccgaacaactcacactatcttgccctagagctgactgacatgaattgtacttttactacggtatattctttctgtaaaatgtgataaatctctttttttctgtaaagtgtgattaatcttgggatgtgaaaccccaaaagggtaaaagactattcacaggtttgagaagtggtggagatttttgcagagaggaatgtcagacataatctgtatatacatccttctgagcacagcctttgttactcactcttctgttacagctccaccctgctcatcagattcctcatttacagcctcaactccttccaaaaaccagtgacattgccacaaaccagcgagatgcagcccctttaaacctctgtgcctactctggagggcagcacacctgtccggctcttcctgtcctcattgatgggacgtgaggatccatttctgaaatcactgagtcagaagcatccaaaagaatcaatgaaagaagagtacaactagcaagatgctaaggaacaacacactaagcacttaaaaaatacttgatacccaagggccaattccagatcaagtaaattagaaatctctaggtgtggggttcagctgctggtatttttttaaatctcccccagatgactataaagaatagacaaggttgagaactacaagattagcacaatacagaaatgtagggagagctgccatgtaggtaacactatactgtttcaaagtcaatgatgtctcaggcagaaattattgaggtagagtcataggatactccaattggcacaaaacctggtgcggtagttttaaaatatgttgaagagaaaaacaaacaaccccatcaaaaagtgggcaaaggatatgaacagacacttctcaaaagaagacatttatgcagccaacagacatatgaaaaaatgctcctcatcactggtcattagataaatgcaaataaaaaccataatgagataccatctcatgccagttagaatggtgatcattaaaaagtcaggaaacaacagatgctggtgaggatgtggagaaataggaatgcttttacactgttggtgggagtgtaaattagttcaaccattgtagaagacagtgtggcaattcctcaaggatctagaaccagaaataccatttgacccagcaatcccattactggggtatatacccaaaggattataaatcattctactatggagacacatgaagaggtttattgcagcactgttcacaatagcagagacttggaaccaacccaaatacccatcagtgatagactggataaagaaaatgtggcacttatacaccttggaatactatggagccataaaaaaggatgagttcatgtcctttgccaggacatggatgaagctggcaatcatcattctcagcaaactaatacaagaacagaaaaccaaacaccacatgttctcactaacgaatgggagttgaacaatgaaaacacatggacacagggaggggaacatcacatgccagggcctgtcatggggtagggggcaaggggaggggtaggggtagcaaggggaggggtagctttaggagaaatagctaatgtagatgaccggttgatgggtgcagcaaaccaccatgccatggcacgtgtatacctatgtaacaaacctgcatgttctgcacatgtatcccagaacttatttttatatatatatatatatatatatatatacacacacacacacacacacacacacacacacatatatatatatatatagagagagagagagagagagaaatatggccccaaattctttgacacttctcccattgagagtgaggtatatgtcttctccccttgaatgtggatggatttttgactgtttcctcccaaaaactgtagtggaattgatgctatcagttcttaggctacgtcacaaaaggtgatactatttccactttgctacatgacacattcattttggatcccaggagccaccctggaagaagtccaactaccttgagctaccaggatatctagaccaggccatatggagaggtcacatgtcgagactcttcttgatactccagcctagttcccagccaacatcagtgtcaactgaattaccgagagattaacaggttatgtatgcattctgggacttaaaaacatcaatataaataagtgtgttggaataatgtctctgaatttgtccatcaaacatttatttttcagttttcctccaaatctaagataactcttataatcaatgaaattataagtgcctgaagtgatgtatccaactgagttttttttgtaacttgaatagaaattacatttgtatcaaaatagaaaaagtacttttactctaaaaatgttaggaaaagccctgtaccgtgaaactgtctaacctcaaagaaacgatcattagtattttgaaatatcagagaaatgaatggactttaataatttgaatgttggtctagaaggctgaatggtgggccccaaaaaggtgtatccatgtcctaatccccagaacccatgaaggaatgttactctggaaagaggatcttcccagatgcaattaaattgaagatctcaagatgagatcatcctggactatccaggtgggacctaaattcattgacaggtgtcctcataggagacacacaggagagacttaacagacaaaagagaaagcaacgtaactatggaggtagaaattggagtgaggctgccacgtgtcaaggactgttaacagccaccagaaactggaagaggaaaaggacaagagccccagagggagtgtggccctgggaataccttaactttccagaactgtgagagactaaatctctgtccttataagccagttgtaatttgttacaacagccatagaaaatgaatactgttgggaaaagtatttccttatctaaacttctgcttccacatatgtgcaaaatttaataagttgcaattttttattgtttaaacttctcattaggtttctacctacaaaagagatttcagttcaaaatgttattcctataaaaaatgtcagatttttattactattttcttttgtttaatgttttgcatacttttctcttttcaatgtatgacctagcagtgatttttttttttttaggccgtatttaccagcaatctagagtacgaagtgaaggacttgattgagcattctgaattctgctgagagttcatttaaaatatatgtatttgaggccgggcacggtgtctcacacctgtaatcccagcactttgggaggccaaggcaggcaggcagatcacctgaggttaggagttcgagaccaacctggccaacacagcaaaaccccatctctactaaaaatacaaaaattagctgggcgtggtggcgcacggctgtagtcccagctactcgggaggctggggcagagaatcgcttgaacccaggaggtggaggtttcagtgagccgagattgggccactacactctagcctgggtgacagtgcaagactccgtctccaaaaataaaataaaataaaaatatttggagggtaagtggtgaagaatggagtcttggtatagaaaggaaaatgatacctttgctgtaaagtagatggggggtagggacatgtctgtacatttaagaatgtctgatgctttaagaaggctgtctcacatttcagttgagggatatcttacaaaatacttgaccaatactactcaaaaatgtccaggtatcaaaaatgaggaaagtatgagaaactgtcatagccaagaggagcctagagacataggaactaaaggtaatgtggtatcctgaacagaaaaaagggccattaggaaaaaattaagtaaatctgaataaagtaatgacttgagctcagaagaatgtaccaatattagatcattaatttcaaaaaatattctatactaacacaaaatgttaatagtgggtgaaattgggtgctgaatatatgggaattcttggtactatctcaatttttctgtaaattgaaaacttctaaacaataaagtctgttttgtaaaaagtccatctctaccaacattcatattttaaacaagaaactgtaggatgaaagaagtgaaacatttaatacagatcagtggtgttgaggaaattttctagactgtctcccagaatgctagtccctattgcaaagaactacttttttatataaagctttttccctcctaattatttgcaatttgccgaaaagggaacaccaaaaaacatttccggatttgccacacacacaaaacaaacaaacaaaaaaaagttagaaaaacttctggtttggcttccagtcttgtctccagggctaactggcgtgccatctgctcgcagcagagcggtaaccatggttcatgtgtcacaccagcgtgcgatgttaagaagtttgccccggcaagtctggacaactccgcttccgcacaggttgctgagggcgggcggggatggcggcagcagcatccagagggtgtagatcgttcttccaaaccccatctgctttcctgtcctctggctgtgcccggggtccccgggcgcggcaagccgcggggacgtgcgcgggtcttctatgcataacaaaagagccctcctcctcctcttccttctcccgccgccccgcgccgccccgcgccgcccccaccttggcttcccgcggccgccggggcccgcgtccccagcaggaattggctcccgggcccgaggtttccaggtacccggaagggggagggggccgaggcggcaacaattgggcgggtgagggcaaaacgcgcggctcggagcgccaagactccgaggggcggtgagcccgggccgtgccgccgcacgattggccggggccgccccgccggccgccgctgattggtggattctcaaattcggtctcaaggcgccagaggaggtgttttagcggggactacgatccaggctggagttgcgctcggccggtctgagcgctggcgctgcccggacgccgcggggtccccgccagcccagggcactcggcgcggggatctgcgcgcctcgctctcccttcccgatgccgccgcccggctgctgatcgccgcaccaccttccctcatcggcttgggtccgtggaggtccctgcagaggcaggaagcctccttaggaaagcaggggtaagcgtgcggccccagcgccagtggggaggcgggaattgggatacagggcccactcccgccccggctgccagcctgccactcctcacgtcccccggctggcgagggctcgaggtgtttctgccggggaacccggtgcgcagagggtgtgccgggtgcagctctcactccggcccggcagtagaggggatttgcccttccccacaacttggagctttcattggagaagtttatttgggggatctgcttggaggcctgggaaggggctgcgctcagcgctgagtgggtttg

SEQ ID NO: 1736 - DNA, 6000 bp, Homo sapiens
ccaactactacagcccttatctcctaagagagcttttcctcagtgcctcacaggaatggcaatatcaccaccaacagcattccttatgcaggaatgaagtggtgatattttaaaaatcatcttctgaataccgactttgtgccctacacttctcgtgtgtcatctcagttgtgtctaatcctcacagtcctttgagggaggaatatatattcccaatgttacacacttccgaattccttttcttgctttttctctatagcgctttcactttctaatatataattatttgttttgttaattggactgtcctcattagaatgtaaacttcagtgaggcaggttattgttgtctgtttattctctactgctttcctggaatctagaataaatgcatcaatgaatgaatgaagtgaggcccagactactactgagtgacagaggtttgaacctaggcttatgtgctgtgctgacgcactagataaccaatgacacttgtgaagattaggatctagggcatattctaagagagataaaatatgcaacatttagtgaatgtttgactgatgaagggttgcgtgcaaagaaaaccactggtgtgtaaaaggagcagggaaagcagcctcgcttttgatctttgacatggaggatgcaacagaaaacgtgaggctggagaaagcctggaggtcaaaattcaaaatgctgaccttgaaattcttcacatgtgggcagggaataccacgtggaggtgaatatagtgtccataacactctatgtaatccgtgcatgtgggcatccttaagagtctgtaaagggtttggcctcacgtcttgacactctgttgctactgtgtgcccttgggcaaattctttaatctttgtaaatgggataatttacatgttttttctgaagactgtccgaaattatgcaagtaaacacagaaacaagacggtacccatcatgcagttaagtgcccaatatgcattgttgtatcagtttgctgtggctggagaacagcgtgttccaaaggtgaccagtagggagaaatcagaaatgtagctgggtccattctgataactgtgctaaaggatttttgatcctggtctacgataacaccccctttacttgacagctgaattggaacggattaaatcggttagggtagtatctcagagggctttgctgcagatgagcgagtccaggcgggctgtcaagcgagcctcaaggggcatctgtgggatgcccaaaccgtgtccccaagccgaggcctttttacaggtcctcaattcagaatgaaaaattaattccaacggctaatagcaccccaccaccactttaggacgtttcaccgtacccattttgtcgtcacagggaccctatgaagcagatagttttatcttcgttatgccgacgtggaagactgcaacttagaacggctaaatgatttaactaagggcgcttacctaggaagaagcgggggacataatgcaaacgagggccgtcccactccagaagcccttttcgcagcatttctagtactgagcagtcagaacgccactttaatcaatgcgccaggaaacactggcattcccttggcgataaagttcagaagcatgggtaaaactacagtttcgatgtatcctcccgaatctatagtcatactcaagtagctgcgtattaaaacaggcaaagtagaaacccaacttccctccctttctcttctgttggaggtcctgtgctgaacctccaacaggtttgctcttctcagttccgctgaagggcatcctgcctcttccctccctgtccccaggtcccaatgactgaaacgtctcggggtgggaacttctgtgacagatcgtggaggacagggggagtcaactccagcgcaggcctcccccggctgaaactagaagatacccagtgaaatatacgagttttgttccaaggactgcccaaaaatggtgcggagaggagctcggcaatccccacctttgtcgaacacgctcctccaggggcggcctgcctgaagcagagctccaaaattggcaacctaggcctcgcagccgcctttttttagcctacatttcccaaaccagggaagaggcgggtgactaaaaatgcaaattgcagcgggggtgttagcaggcatgcccgtgggtgcggggcgtcgggcgaagggagaccccgcgaccttaggcgccctcgcggtgttcacggtaggcgcaaagcgcagcaagggacactccccaaagccgcaccccgccggacggctgcccccgcttccgcctctcaggcagcggtgggacaaagcgcggcctcttttccgccggggtttagggagggaaggccggattagggcccgcgccttccggctgcatccctctcgcgccgcgccggccgcacacaggtggttttccgctcgggaggggcaggcttcggcacttttatataacaatagagctctgcgcgccgggaacgcgcctccccgccgccgcggcccccacccggccacgcctccatccggcttccaatccgtccgccccgcggcgcctgggccgagtgctgctcgctggcctggcccgcacctccccaaagttacctgctggctttgcagcgcggtagagacgttcccctcgactccttgggagcgaggagccaggggggtcccggcaggcactcgtccttgctccccccaccctccccagatctctatggacccgggagtccctcgctgagccccgcacccgtccactgcgtcgcgcacagccccgtgcccaagcggggagacggggacggcggggcggtggcagggagcgcagcgcgcaggcgcggctggtgctccccggagtgcccggcgctggacaaagggaggaggcggcggcaggagagggctggggaggccccctctgacatgcctccctgccaactgtaaccaatcgtcgagcccccctgccgagcccccgcagcctgcaggtcttgcgggaggacttcctcacgcctcgcccatggcggggactgctggcccggcccggcgcgtcccagcacacctcgctcaggcagccccgccagaccggctcccccgtcagaagccgagctccttgcccagaaatcattaaccagcgcgacctcccagcaggcgatggtggtggtggggcggggggagagatatagattcccccgaacaatggcttgtaactccccacgccgccggagcggaatacagtaaaagcactggactgacctaagagtttgtttctgcactctacattgttttaatgaaaataaaatgttattttaagaaaaaaggttttcttctgattttctgcacaaccagacgtttgtttgtttgctttaaaatgtttcaacaaaatcctggtttgtttcgaaatatgttggattagcatttaacacctcatcggtcactaaagcccagtcagttcaccagccccaacacagcctcggctaaaagaacatcagagcaaacagagctgggcctttaaaagtggcaaacaaatgccacacaccgcctaaagaaggggggttgggggaggggagggttaaggcgaacttgggtccaaatgagtttgaagggaatacaaagaacgaaaagtcagcacaagttttcctaaagctagctcgcgaacgcaagcgtcgcgaacaagggcttttgtgcatgctaattgcgccattggtgcgcaaaagttccgacgcgaagtgtgaactctcaacagaaggaaacatgagacaactgaagtgccctggtttatgtgccctgctcctcctccgctgccgcctccccttctttctccttcctcccgccgagcccgctgttgcagcttgtttgcactggggcttatccggagcggaaattcctttccgtttttgtgaatgacaaactcattaacaattcatcaacacaacctgttccagccggcccgtccccacggcaacagccccttccgcagcacgctcattggctggcccggagaatgtatccattgagacgctcgctgtttgtatccattgaggagctgcctcgcgcagggggtgtgcgaggctgagtccaagagatagcaaatcgagtcttaaataatccggggagaaagacgcccgggtagatttgaggtgcagccttggagggagggattagaagccgctagactttttttcctcccctctcagtagcacggagtccgaattaattggatttcattcactggggaggaacaaaaactatctgggcagcttcattgagagagattcattgacactaagagccagcggctgcagctgggtgcagagagaacctccggctttacttctgtctcgtctgccccaaccgctagcctcggcttgggtaaggcgaggcggaattaaaccccgctccgagagcggcagcttcgcgcgcggtgcgctcggcctatgcctgccccgaggggcgtctggtaggcaccccgccctctcccgcagctcgacccccatgatagatacgctcagacccgtgcccttcgcgtcggaaatggcgatcagcaagacggtggcgtggctcaacgagcagctggagctgggcaacgagcggctgctgctgatggactgccggccgcaggagctatacgagtcgtcgcacatcgagtcggccatcaacgtggccatcccgggcatcatgctgcggcgcctgcagaagggtaacctgccggtgcgcgcgctcttcacgcgcggcgaggaccgggaccgcttcacccggcgctgtggcaccgacacagtggtgctctacgacgagagcagcagcgactggaacgagaatacgggcggcgagtcggtgctcgggctgctgctcaagaagctcaaggacgagggctgccgggcgttctacctggaaggtacgcgcccagggaactccgcgcgcggggcagggctaggggcgcagggctgcgggcggggcgcgtggattgaaaatacctctgctccgctcagctggagcttcggagccgcgctgcccgcctagggaccggcagccggcgaggtaggggccgcgaaccgcgcgttccgcaccagagaaccgggccggctcagaatccactcgcttccggctgcgggtaccggcggtttctttctaacgggttctgcgccttcttagccagaacatcctccaccatcaccctgttttctatcgttcgattttgaattaagatttgcaggacgggagagattgttggggatgcaaattggcacatcttagctctcaaaatattccaaaaagttgccattttgtctatttccggattcaagcgaataagggttccctggcgaggcgggcccgttcgttccattcccgatggtgcacatttaaagtgtgtttctcttatagatggttctgtatgtagggggttcgtaggatgcttgtggtgtttcttgcgccgggctgcggttcttacaagctgtgaaaactactacggcttctcaggttagatgattgcttttctcgttctggcaggtggcttcagtaagttccaagccgagttctccctgcattgcgagaccaatctagacggctcgtgtagcagcagctcgccgccgttgccagtgctggggctcgggggcctgcggatcagctctgactcttcctcggacatcgagtctgaccttgaccgagaccccaatagtgcaacagactcggatggtagtccgctgtccaacagccagccttccttcccagtggagatcttgcccttcctctacttgggctgtgccaaagactccaccaacttggacgtgttggaggaattcggcatcaagtacatcttgaacgtcacccccaatttgccgaatctctttgagaacgcaggagagtttaaatacaagcaaatccccatctcggatcactggagccaaaacctgtcccagtttttccctgaggccatttctttcataggtgagactaattaatagtcgtcgctctgacatttaaatgcaaaattcctagccattcatagagtttaagctg

SEQ ID NO: 1737 - DNA, 6000 bp, Homo sapiens
ggaattttaattgggggctatttgaaattccctttggctttctcacagcctatcactgcctgtaagtcatgttacctactgtcagttccttaggcttcttgtgtttctcggttgctactgttgtggtacaacttcttggtatcttttaaaagcactcatcagaagaccttagggacagttttgtgcaacccatatacattttacattaagccatactatttcaggtgtatccttcaaatacagttaaattcagttttgaagttttagctgcactgaaagccactgtcactttgagggcctacctgggacccctaaatgcatttacattttaagtcagaacttccaaaactctccttatttgctgaaaatctgtttaactgttttcacatgatgtgttaataaatgtcattgtattcacagagattattccaagaagattaaaggtcatgctagcccatttgcatcttataaatctcaagtgccctcaaactcaggaaaattcctgcaaaagtggaatgtttctcaaatggcctagagaaaattttataaccaaaatacactgctttaaaaattttttttttttaactaacaatttttaaggaactttccagggggaaacaccaggaggaattcaagcacaagcacaggtgctcggtgcacacatacatacacacacacacacacacacacacacagaggaagaaacaagaatctatgaaagtgcttctctgcactcatgagaatggatcacagatgatctgctatctccaatttttaaatacagacctcttcatatgaatgatatcctctgaagggcactgaggcctctggaattaaggaagcctgtaattcttccaactactacagcccttatctcctaagagagcttttcctcagtgcctcacaggaatggcaatatcaccaccaacagcattccttatgcaggaatgaagtggtgatattttaaaaatcatcttctgaataccgactttgtgccctacacttctcgtgtgtcatctcagttgtgtctaatcctcacagtcctttgagggaggaatatatattcccaatgttacacacttccgaattccttttcttgctttttctctatagcgctttcactttctaatatataattatttgttttgttaattggactgtcctcattagaatgtaaacttcagtgaggcaggttattgttgtctgtttattctctactgctttcctggaatctagaataaatgcatcaatgaatgaatgaagtgaggcccagactactactgagtgacagaggtttgaacctaggcttatgtgctgtgctgacgcactagataaccaatgacacttgtgaagattaggatctagggcatattctaagagagataaaatatgcaacatttagtgaatgtttgactgatgaagggttgcgtgcaaagaaaaccactggtgtgtaaaaggagcagggaaagcagcctcgcttttgatctttgacatggaggatgcaacagaaaacgtgaggctggagaaagcctggaggtcaaaattcaaaatgctgaccttgaaattcttcacatgtgggcagggaataccacgtggaggtgaatatagtgtccataacactctatgtaatccgtgcatgtgggcatccttaagagtctgtaaagggtttggcctcacgtcttgacactctgttgctactgtgtgcccttgggcaaattctttaatctttgtaaatgggataatttacatgttttttctgaagactgtccgaaattatgcaagtaaacacagaaacaagacggtacccatcatgcagttaagtgcccaatatgcattgttgtatcagtttgctgtggctggagaacagcgtgttccaaaggtgaccagtagggagaaatcagaaatgtagctgggtccattctgataactgtgctaaaggatttttgatcctggtctacgataacaccccctttacttgacagctgaattggaacggattaaatcggttagggtagtatctcagagggctttgctgcagatgagcgagtccaggcgggctgtcaagcgagcctcaaggggcatctgtgggatgcccaaaccgtgtccccaagccgaggcctttttacaggtcctcaattcagaatgaaaaattaattccaacggctaatagcaccccaccaccactttaggacgtttcaccgtacccattttgtcgtcacagggaccctatgaagcagatagttttatcttcgttatgccgacgtggaagactgcaacttagaacggctaaatgatttaactaagggcgcttacctaggaagaagcgggggacataatgcaaacgagggccgtcccactccagaagcccttttcgcagcatttctagtactgagcagtcagaacgccactttaatcaatgcgccaggaaacactggcattcccttggcgataaagttcagaagcatgggtaaaactacagtttcgatgtatcctcccgaatctatagtcatactcaagtagctgcgtattaaaacaggcaaagtagaaacccaacttccctccctttctcttctgttggaggtcctgtgctgaacctccaacaggtttgctcttctcagttccgctgaagggcatcctgcctcttccctccctgtccccaggtcccaatgactgaaacgtctcggggtgggaacttctgtgacagatcgtggaggacagggggagtcaactccagcgcaggcctcccccggctgaaactagaagatacccagtgaaatatacgagttttgttccaaggactgcccaaaaatggtgcggagaggagctcggcaatccccacctttgtcgaacacgctcctccaggggcggcctgcctgaagcagagctccaaaattggcaacctaggcctcgcagccgcctttttttagcctacatttcccaaaccagggaagaggcgggtgactaaaaatgcaaattgcagcgggggtgttagcaggcatgcccgtgggtgcggggcgtcgggcgaagggagaccccgcgaccttaggcgccctcgcggtgttcacggtaggcgcaaagcgcagcaagggacactccccaaagccgcaccccgccggacggctgcccccgcttccgcctctcaggcagcggtgggacaaagcgcggcctcttttccgccggggtttagggagggaaggccggattagggcccgcgccttccggctgcatccctctcgcgccgcgccggccgcacacaggtggttttccgctcgggaggggcaggcttcggcacttttatataacaatagagctctgcgcgccgggaacgcgcctccccgccgccgcggcccccacccggccacgcctccatccggcttccaatccgtccgccccgcggcgcctgggccgagtgctgctcgctggcctggcccgcacctccccaaagttacctgctggctttgcagcgcggtagagacgttcccctcgactccttgggagcgaggagccaggggggtcccggcaggcactcgtccttgctccccccaccctccccagatctctatggacccgggagtccctcgctgagccccgcacccgtccactgcgtcgcgcacagccccgtgcccaagcggggagacggggacggcggggcggtggcagggagcgcagcgcgcaggcgcggctggtgctccccggagtgcccggcgctggacaaagggaggaggcggcggcaggagagggctggggaggccccctctgacatgcctccctgccaactgtaaccaatcgtcgagcccccctgccgagcccccgcagcctgcaggtcttgcgggaggacttcctcacgcctcgcccatggcggggactgctggcccggcccggcgcgtcccagcacacctcgctcaggcagccccgccagaccggctcccccgtcagaagccgagctccttgcccagaaatcattaaccagcgcgacctcccagcaggcgatggtggtggtggggcggggggagagatatagattcccccgaacaatggcttgtaactccccacgccgccggagcggaatacagtaaaagcactggactgacctaagagtttgtttctgcactctacattgttttaatgaaaataaaatgttattttaagaaaaaaggttttcttctgattttctgcacaaccagacgtttgtttgtttgctttaaaatgtttcaacaaaatcctggtttgtttcgaaatatgttggattagcatttaacacctcatcggtcactaaagcccagtcagttcaccagccccaacacagcctcggctaaaagaacatcagagcaaacagagctgggcctttaaaagtggcaaacaaatgccacacaccgcctaaagaaggggggttgggggaggggagggttaaggcgaacttgggtccaaatgagtttgaagggaatacaaagaacgaaaagtcagcacaagttttcctaaagctagctcgcgaacgcaagcgtcgcgaacaagggcttttgtgcatgctaattgcgccattggtgcgcaaaagttccgacgcgaagtgtgaactctcaacagaaggaaacatgagacaactgaagtgccctggtttatgtgccctgctcctcctccgctgccgcctccccttctttctccttcctcccgccgagcccgctgttgcagcttgtttgcactggggcttatccggagcggaaattcctttccgtttttgtgaatgacaaactcattaacaattcatcaacacaacctgttccagccggcccgtccccacggcaacagccccttccgcagcacgctcattggctggcccggagaatgtatccattgagacgctcgctgtttgtatccattgaggagctgcctcgcgcagggggtgtgcgaggctgagtccaagagatagcaaatcgagtcttaaataatccggggagaaagacgcccgggtagatttgaggtgcagccttggagggagggattagaagccgctagactttttttcctcccctctcagtagcacggagtccgaattaattggatttcattcactggggaggaacaaaaactatctgggcagcttcattgagagagattcattgacactaagagccagcggctgcagctgggtgcagagagaacctccggctttacttctgtctcgtctgccccaaccgctagcctcggcttgggtaaggcgaggcggaattaaaccccgctccgagagcggcagcttcgcgcgcggtgcgctcggcctatgcctgccccgaggggcgtctggtaggcaccccgccctctcccgcagctcgacccccatgatagatacgctcagacccgtgcccttcgcgtcggaaatggcgatcagcaagacggtggcgtggctcaacgagcagctggagctgggcaacgagcggctgctgctgatggactgccggccgcaggagctatacgagtcgtcgcacatcgagtcggccatcaacgtggccatcccgggcatcatgctgcggcgcctgcagaagggtaacctgccggtgcgcgcgctcttcacgcgcggcgaggaccgggaccgcttcacccggcgctgtggcaccgacacagtggtgctctacgacgagagcagcagcgactggaacgagaatacgggcggcgagtcggtgctcgggctgctgctcaagaagctcaaggacgagggctgccgggcgttctacctggaaggtacgcgcccagggaactccgcgcgcggggcagggctaggggcgcagggctgcgggcggggcgcgtggattgaaaatacctctgctccgctcagctggagcttcggagccgcgctgcccgcctagggaccggcagccggcgaggtaggggccgcgaaccgcgcgttccgcaccagagaaccgggccggctcagaatccactcgcttccggctgcgggtaccggcggtttctttctaacgggttctgcgccttcttagccagaacatcctc

SEQ ID NO: 1738 - DNA, 6000 bp, Homo sapiens
ctggtttttctcagaggcagaacatcaatctagttaagaggtattgatattacatttaaaaaagaaatgaagaaaaaactagttaatcccatcttaatctcataatagagacgtgtatgcagtcttactggaagcctggaaactaactctccctaagcattttgtcagcaactagagaaaactttcatttcaaaataaaatgtttgaaaattttgtcccccttaactgccaagattcagtttggttcctggattcatttcccttgtaaggacacatgacatcactctgctgaaagctttttataacgctccctggacgagaccaaatgtctcagatgttattcatcctctagggttaaatctggtacaccaaatttgaaattttacatgtaaatagggaagaaattttccctccccaaatttgtaacttgtaaatctatggaggtattctgataatatcaaatagatctgctctgtaaaatctctaccattaagctttaagtgacagggtacaactgtatcattatgcaatggtatatagctgttttgcaggtgttgggatggtacaaaatattaaaaataaatgttaaggcctggctagatgtttcatttttgaagcaggttttaaaaagcctttgacaaaactcctttcttgcctacagcttcatttttgccaaatgtaaaattattttgctattgggggaaaattgttgattgctgtccttagcttaatttgctttattcttcttgcaaaacaagcaaacaaacacacagacttcctatatgattcagcctagtaaaacagggaatgaacccagacaaaaagtgttttttctatttggtcagtaatctaatttctttgagaatttttaaggaatatgaaataattagaaatagtccagaaattcagacatatggaaaattgttttgtaaacaaagctatgtattgatgttgtatagagcagtgattctcaaactttattgttcagcagaatcttagaaaatctctgtaaacagtttgctgggccccacactagagtttctgattcagttggtctggagcgggaactgagaatttgcatttctaagaaattcccaggtaacactgctgagaaccactgatgtagagcaattgaaaaccagcttaagtgtttcttgtttgtatcttacctgaaagtttcatatttgtttcccagacagtgtcattttcagaatgtgaatcccagcaaagattttctggacttaccacatttaactctctttgtccaaagttcaatgaccttcaaaattttctcccctcaatatttttatatatgtcacatgatatagctattctatggtgaaaacattttgggatatacttgtttcactggaaagaagattatttttcaatctcagaacttctaagagccttaaatacgtaaatgtatattgtgaatttccaaaagggagataaagtatgtggcattcctcaagtggatttgatcttggaattcttcctcaatctttctcctccactaagcactatggaatatctattaatgacagttagggaaatattctaagtaattttataatttaacatagttttacaaggtaaaaaaaaaagcctatattacaacctacggaaaaaacaactaacatgctcacaatattacatataatttttttttttttttttcagacagagtcttgctctgtcacccaagctggagtgcagtggtgtgatctcagctcactacaacctccacttcctgggttcaagcgattctcctgcctcagcctcctgggtagctaggattacaggctcctgccaccacgcctgggtaatttttgtatttttagtagagatggggttttgttattttggccaacctggtctcgaactcatgagctcaagtgatccacctgcctcgatctcccaaagtgctgggattaccggtgtgagctaccgcgcctggccaaattttaaatcggtttagaaaagtaattaaataggccatggggctgggtgctgtggctcacccagcactttggatcactagagctcatgagttcgagaccagcctggccaacatgtccaaaccccgcctctactaaaaatacaaaaattagccgggcgtggtgatgggcacctgtaatctcagctattcaagaggctgaggcaggagaattgcttgaacccaggagatggagattgcagtgagttgagatgatgccactgcactccagcctgggtgacagagcaagactccctctaaaaataaataaataaacagataaataaataggccaggggtggtggctcctgtttgtagtctcagcactttgggaggccgaggttggaggattgcttgatgtcaggagttaataccagcctgggctgtcggcatagtgagactccatctcatttaaataaataaataaataaataaatatgaaaagtaatgaaataaatattgtgcaatctgtaattttttttttcattgaaagaacaaatcctccaggcacggtggctcacgcctgtaatcccagcattttgggaggccgaggagggtgaatcatctgaggtcaggagtttgagaccagcctggccaacagggtgaaaccctgtctgtactaaaaatgcaaaaaattagccgggcgtggtggcggatgcctgtaatcccagctacttgggaggctgaggcaggagaatcgcttgaacctgggaggcggatgttgtagtcagctgagaccacgcaactgcactccagcctgggcaacaagagcaaaattctgtcttaaaaaaaaaaaagaaataacaaaccaatcaatcaaataatcacctaagttttcattatgaattcgtcttttttttttctttttgagacggtgtctcactctgtcacccaggttggcgtgcagtggcagaatctcagctcaccgcaaactccgcctcccaggcttaatggatcctcccacctcagcctcccaattacgaattctttgttatgctaatgaaagatgtagaaagaggagagggtgctttggatgagacagaataatctttttatttctcatggagtaatgttaatctaatgatatgaaggtataagtattaatgctgaaactcagaatgccatttcatagactcccttttttggtgattttttgatatttactaaagtactaatttagatgaggcaagtatatgaaaatcctttcatataaataggccttgtataaatatcagtgtttctctttaacttaaaaagaactctgaaaatgatgctacatcttgctatattataaagttccaagtttgacttggacaaatctaaaaagcctcattaacagtgcttttaaacaaagcgcacttgttctaacggaaagcttgttatgtatatttgcattcttggttggtaaacaagtgttaaatacgcgtagagcataattgttgctaatttacgggtcctggtaattttagaggcatgggaaaagcctgattgacacgtacgatcgttggatataactgtagatgcatttaactttgccaaacaaaataagagaaagatgtcagcatgcagcatttttaagggggaaaggattcatccctaaatccaaaaagataattccccgaagttcttagcacataatgtgatttgaaacttcaaagcagcttctacttccgggtgttaacatgggaaaaaaaatttatctcacttcacaggacttttatgtgggtttttttttcttgtttatgttgtctacatccggtccctactctcttctttcaatcctctcattatctccctctaggggtttaagtttgttttaactttatgcttttatccttattagtggaaaaaagtgggtcagtattactttagtttgtcttcactgccactctgctgttcattcctgaactagcttttagcctctgggaaaggagaaagtaaaaacagttgcagaaactgggccaacctctcgcggcccgcctcccccaagaaaacaaaacctaacccgtgcaacagtagtcctttctgttttcatagcaccttgtatttctccgctcataacgttcagatttttatgatagttattgatcatctttcatcccagctagactctccgtccttagaggactcagcatattgccgggcacatgataatatatacaaaacactgtactgtagtttaaatgaatagatgccgtgtgtgtgagagactgcggcactagtacccacgtacccacacacaacaaaggagaaaagttgcagccatcaacatctttcagtgtgggtcctttgacatggactctctagaaagtcagtggagaactgtggcatggacaccttgtacagtaattacttgtataactgaagcacgagttttggtttggtagcgggaagttgaggggcagggggatgttggaggggctgaattattcacataatttctcccccagtcgctgcggacaggcactcattccggtggggtcccctggccccctccgccgctcccccgacgcccgcatttcggagcgggcagtttcccggggacacccgccccgccctgcaggccccgcccccggccgccggccccgcccccgcctccgccgccgccggcaggggtcgcgctgcccccggcgagccgctcaggcgggggtggggtaagctcccgcggccggtcgcttttctccgccgccgctggttggatcgtttcaataaaagtgttttttctcttgcactcgctctcctccggggaacaggcggaggcgtcaatccgcagccgccgagtgtgaaagcgacgcacacgcaaggagcgaacgcggccgcccgcagtctcctgagctccccgcgggccgccgcagagccgcggagaaggagccagcgcccggccagacagtctcagcccgccgtcggcgcccgccgcgctcgcgcccggctgctccgaggggattagtgggccgtccgcgcggctcgtcggcgcgggagccatgttgaccgagggacttggcaacgcgtgagacacccgcggcccctcccgaggctccggacccgcggcgagagccggaaggcggctgtggcggcggaggcctgcgctcggaagcgcctcacgtctgccggccgctgagacccggacttgcatccggtcgccgcgggcgtccgcggagcagcttccccccgcgcctctcttcgcctcgcctcgggacccgcggtccccgctcttgctggtgagttggcggctggcgtccgcgccgcgctttcccctggtgtcgggtcggccgcggggccgggaggctgcgtgggacagaggcgggggcgggggctactgggggcgcgggtggctcaggcccggtcgggaagttgagcgaggaggcgcggcgcggggggctagcgtgcgcctgtcacctctccggtccagcgaggaccttgggtcgcccggggatttccggggctcgggtggggtgtgagtgtctgcgagctgcttcccaggaggcgccgacagatatagacgccgccgcctccggtgctcgctgccgctttggtctgcgggggaggccggtctcctcgcgaggcggaggaggggaaagaggcagaaagtcccccgagacacaaaggtcccctcggcgggggtggagctggaggcgcaggcgacgctgcccgggaggggaaggaaggggcgcgggtccgcgggaggtgggcgaggaggcggcggtcgcggcgcctgcagctccttggagacgctggcgctgtgcgcgggtggggagcgcggaggaggaggaggagcccgcgcgtgggagcgggtagagacaaagatcagggcagcctcctgctggcgggtcacaccccggagtgttggtcaagagcggaggtagagggaaggtgggaaacccagcaaaccgatggggaggggaaaatggggggaggagggtgcctagtgctgtctccgtcgcagttgcttttctcagcatttttgtgcccgatgctatgcccgatgcttttgctccccaact

SEQ ID NO: 1739 - DNA, 6000 bp, Homo sapiens
gtgtcagcagaccaaactccccccaaaggctctaggagagaatgtttccttgcatcttctggcttctgatggctcctagcattgcttgacttgtggcagcaaagccctaagctttgcctctgtctttacatggactttctctctctctctgtcccttttctgtctcttgtaaaaacactcccgttggatttggggtccactctactccaatatgatctcatttcaatccttaccttaattatacctgcaaagactctatttccaaataaggtcacattctgaggttctcgacgaacatgaattttgggtgggcactattcaatccactatataaatttaacacaccattttagtattgaccataacatgttataaaatttcatatcattgaattatttatacatattatttgttaacacgaatcagtatcattcttctaagacagagcttagtattatttttagaatagttagctctcaacagattatctgctgaacagatagtttaattaattgtgaatgaatcaatacctctattgcccaaatatttcatccagtactttacacaaggcacaatccatagattgacattcaataagtcagaaataaaaacatttctaaaacaacaaaatgcagaacaaaacaactaataaaccaatcaaaatttaaaaaagtcttcagtgtatttaaattacagtgtattttaaacaatagaagcattctttgcatggctgtgaaaaggccaaatcatagttcaatacccgatggttatttgattatcacagacccttctgtattctgtatacctttatggcagatgaatgactattcctaatgtaataccttttaaaatttagatttccaaacatggtgctttctttaaaagtgcagcacatctccacaattggaaagtcaaactggtgagtcttgttttgcattctacaattatgccaatttcatgtaaagatacaacctctaaaacatggctattaacctaaccacctattagaaagcctacacttgaaagtagattgcagctcattagatgaaaccctcaattgctaattatagttttaaaatcaagataggtaaatggtaagtgtatttagatagttgggtaccagctgggaattaacgtaaaagtaaggcgatagacacagacacagacacacacacacacacacacacacacacacacacacacacacacacacacacacagagtatacagaggagaaaagcaacaagaattaaaataatttagaggcaaggctgggcgcggtggctcacgcctgtaatcccaacactttgggaagccaaggcgggcggatcaccacatcaagaaatccagaccagcctggctaacacggtgaaaccccgcctctattaaaaaaaaaaaattagcctggcatgatggcggggcgcctgtagtcccagctactccggaggctgaggcaggaaaacggcgtgaacccaggaggcggagcttgcagtgagccaagatcgcgccactgcactccagcctgggcaacagagtgagactatctcaaaataaataaataaataaataaataaataaaataataattataataataatttagaggcaaactcctcacctaatccccacatttaaccagcaaaggatgtggccttagagaaaagtgttttgcatagatttcctgactcaggattcacttgccactacactgtccttatatctttataaggtatagaaattacaaagacaaaatagaacaaaaagcaagttatcataaaaatgcactgctgacaagattttagtaaaaggtttagaaatattaagtagtgtgtgtttatgtgtgtgtgtatgaggcagagaatttttgtgtacatatctcatataggatagtttcaagttttaataaatggtattcaaatgtttagatacatagtatgcacataataaaaataaaaagttgacagctaaggactcattaaacaagatctgtataacacatttttttcttaagtttctgtagagcagtgcacatattttgatgttagggttcaagaaatccaatgtaatactttaattcaactcaaaatttggctaaatggggtggtatacaaactgccctttagttttaaacagaaacactatgacacatagatttgaaaaataggtcctgtgaatacctatctattgtggtgatgtgagcagcaaagtgttgtgggattgattttaatattaaaagtgttactgaaacaccaggggtttggtctaggtcctgctgcttgcagcacagaaagccaaagactgatatgacaagtactgccaaggaagaaagttttaatcaggtgctgcagctgaaaagatgggagatcagtctcaactccatcttcctgaccgctaaaattagggggttatatagcagggaagaaatgtagcaatgtgtaagaagaaaggaactagagaggggcaaggaagcaatcaggatgaatgaagggccaggctttcattggctgagatgatctggtgagtttcagttctttgatactttttgagaggtctagggatcctttcctaaggaaacaactcggataaaacaaatgtaagttttaggttttaagaccagaagggtcaatttctacggttgggactactgagtcaatttcaaaagtggcaaccactatctggtttcaggttcatttaccacttaaatatcaactcctagttaccatcttcactcacccacctaccccagaatgtaagctccatgacagtaggatcccttgtgcttagaatggagcctgacacagaagatgtgtaaaataatatttgttgaatttacttctcaaatctatatctcctacacagaccaatttaaacagcttcaggtctaactttatcttctgaacatctccacttgcacactcctctcacacttcaaactgaacacactccaaaccaaaatgcattattttcccccacagcctgttttccttgtattctttagattggtaccatcatcaatcacataataactaagtccagatgagtcagcttcttaggtatcaccagatacctcttcctcaccatcccttctgagataatttaggtaaccgtcatcttttaatttaagggattgccacctgtcttactaccatcttcaaacatctgtgaaaatattgtttttcccctaaaacacaaatctgttcctaccagtccttccttataatcatcccaattgcctgtgggaaagaaactaaattcctcagcatctaccaggcctttcatttgtgtctacttctcccatctgatctgcctcccaatctgcagacttcagtcattcaaaatgagtattctcagaacatttcatgtactctcacatctctggaaccttgtctttgttgctctctctgcctggaaattaattcttattcccagttatccctccctcctggcagagtcttaattcatctttaaaaattcagctcctttcaaacctctgccatcacccttcaagactcttaggggttccttctttcatggacctccacagacttccatttggcctttaccatgctgctgagcactttgaagcctaaggctgttttcatttcagtttctttagcaagcaacagtacatctcattgtttttgttgagtaaaggaaggaataaatgctagagagagatgtcattccagttcagtgcccaccattcacagatggagacctgaggcccagagaggagacatgatttgaggaaggctaaaagactgaatagggccgggtgaggtggctaacgcctgtaatcccagcactttgggaggccgaggtgggaggatcactggagcccaggagttcaagaccagcctgggcaacatggcaaaaacccatttctacaaaaaacacaaaaattagcccggtgtggtggcacaggcctgtaatcctggctactctggaggctgaggtgggaggatctcttgagtccgtgagatcaaggctgcagtgagccgagatcgtgccaccgcactccagcctgggtgacagggcaagaccctgtctcaaaaaaaaaaaaaaaaaaaaaaaaaaaaaaaaaagaagggcctgggctgcaacacaggcctcggggacaaagccagtgatttttttaaaaaattatttatttatttattttattttttgctatgaaacaagccacatttacagatataaccgacttgggattgttacactgatgtctagtctcggctttatttcaaccctgggagctagtaagcatcccttacgttgaagttcattgtttttttgttttgttttgttttgttttcaggctccggtgtttgctgaagagtcaacatcctccttttgtgacttgggactacaggattcctcctcatccctccgcacctgagaagaggggcctctctctgaaagatttctgctgaggacccccattcctgctgggttccaggctgcgtctctggaaaccgtggcgccctcaggtcagccagctcccgagtggatgtggggttgggagcggctcttaacagaccaggataaaactcagggaagcgccttcagctgcaccgcaacattccaggacgctcagaagcaattattacaggcgaggttcattcacctctcaggcctgtgggaacaacaggacgggctgtggctttcgaactggctgtcgctgaaaggccagatcggaggacctgctctgactgaaccacttcgcctttcagtgaacagagggacttggccaccgaagctccgagacgcccggaggcgcagcgctggacgcgctgacaggcgagcgcccacgggtcgcgtgcttcccggcagcccgggggcggggcctcagaccacgcccccgccttatgattggtcccttcgaaacaggcggcggccagcggctactgaccctgaggcccaggcggcggcggcagcggcggcggttggtcaggggcgtgttggccccgcacagattgagccgagttgtcgccccgctgggagaagtgaccctcctgcgcctggtgagtacttccctgtttgtcttctcttttcctggcgaacttttacgcgctgtctcggggcctccgcgcctcagcctgagggctccaggagccccccgctctctgaggccccgaagctgaggtttgttgggtctcccggctgcgggagccagtacgctctgcgtttgcctggctgcggcagtcgcgtgctctgattggctcctggggccgtcaaggtgacgttgcgcctgccttcacctgtccacccaagtgcggagagaggggcgacaggtgtgcggggcggttggggctgctggtgtgggcgagctcagctggggaggagggatccagccgctactcgccctgctttaaatccagagcggtatcagagcccgaaggtactgtgggatcttcaggggcaccctcatccctaagcgcctggcacttagagggtctgtttttttctgttcatcatcctcggaaagaattgatgaagtctctggccctgcaaagagaaagagacagacagttattcttgccctctagcaaggtttataggctcttccctgttttttctcccagtccatgcagggtctagaacgcccacatgtgcggaactggggaatagagctggagaccctgcgcgatgccttccgcccacaaccctcagtttggaggactgcccggggagaggctggcaaaagaaagggaaggcttgtagagtgccttggaagtcagaggaaagttttggagggcgtgctcctctatgcagtcacccgtggttcctttcctaatcttttcacaccgagggattgaatgttgtaaatttgagtgctttgtggcatggcatggtggaatagctgatccccagtggttgcaaagagatgattttaggtcagagcctgggttttgcttcgcttgtgtgaagagcaaaaaacaaacaaacaaaaacaacaagaacaacagaaccgctttgtgaattgctatctgatcacct

SEQ ID NO: 1740 - DNA, 6000 bp, Homo sapiens
accagggcggagttttttcccaccctagtaagcctgagggttctgcaggagaccagggcatatctctgtccttatctcaactgtgtaagacagacattcccagagcagccatttatagacctccccccaggaacgtattcctttcccagggtattaatattaatattccttgctagaaaaagaacttagcaatatctttcctacttgcacatccatttataggctctctgcaagaagaaaaatatggctctttttgcctgaccccacgggcagtcagaccttatgcttgtcttcccttgttccataaaaatcgctgttattctgttctttttcaaggtgcactgatttcatattgttaaaaaacatgttttacaatcaatttgtagagttaacacaattatcacagtggtcctgaggtgatgtacatcctcagcttacgaagataacaggattaagagattaaagtaaagacaggcataaggaattataaaagtattatttgggaactgataaatgtccatattaatatgaaatcttcacaatttatgttcgtctgctgcggctccctccgtttagggtccctgacttccagcaacaataaaaattcagcaaggtttctggatacaagcttaatgtacacaaatcagtagctcttctatacaccaacagcaaccaaacagagaatcaaatcaagaactcaaccccttttataatagctgcaaaaaaaaaaatgaatatacctaaccaaggagtcaaagacctctacaaggaaaactacaaaacactgctgaaacaaatcatagacaacatgaacaaatggaaatacatcccatgctcatggatgggtagagtcaatattgtgaaaataaccatactgccaaaagcaatctacaaattcaacacaatccccatcgaaataccaccatcattcttcacagaattagaaaaaacaattctaaaattcatatggaaccaaaaaagagcccacatagccaaagcaagactaatcaaaaaagaataaatctggaagcatcacactacctgatttcaaactatattataaggccatggtcaccaaaacagcgtggtacagctacaaacataggcacataggaaatggaacagaatagagaacccagaaataaacccaaatacttacagccaaatcatctttgacaaagcaaacaaaaacataaagtgggggaaaggacacccttttcaacaaatggtgccgggataattggctagccacgtgtaggatcctcatctctcaccttacacaaaaatcaactcaagatggattaaggatttaaacctaagacctgaaactataaaaattctagaagatgacactggaaaaactcttctagacatgggcttaggcaaggatttaatgaccaagaacccaaaagcaaatgcagtaaaacaaagataaatagctgtaacctaattaaactaaggagcttttagtttgtatagcaaaaggaacagtcagcagagtaaacagacaacccacagagtgggagaaaattttcataagctatacatctgacaaaggactaatatccagaatctacaacaaactcagacaaatcagtaagaaaaacccaaacaatctcatcaaaaactgggctaaggacatgaatagacagttctcaaaagaagatatacaaatggccaataaaaataagaaaaaatgctcagtatcactaatgatcagggaaatgcaaatgaaaaccacaatgtgatactacctcactattgcaagaatagccataatcaaaaaatcaaaaaacaatagatgttggcatggatgcggtgaacaaggaacacttctacactgctggtggaaatgtaaactagtacagatgctgtggaaaacagtgtggagattccttaaagaactaaaagtagaactaccttttgatccagcaatcccactactgggtatctacccagaggaaaagaagtcattcgaaaaagatacttgcacatgcatgtttatagcagcaagattcacaattgcaaaatcatggaaacaacccaaatacccatgaataaatgagtacagaaactgtgtgtgcactcccccccaccatatagataatatatgatggaatattatgcagccataaaaaggaatgaattaacagcatttgcagtgacctggatgagattgaagactattattctaagtgaagtaactcaggaatggaaaaccagacattgtgtgttctcactgataggtgggaactatgctatgaggacacaaatgcataagaatgatgcaatggactttggggacttggggggaagagtgggaggggggcaagggatagaagactacaaatatggtgcagtgtatactgctcgggtgatggatgcaccaaaatctcacaaatcaccactaaaaaacttactcatgtaaccaaataccacctgtactccaataacttatagaaaaataaaaaataaaagtaaaaaataaaattatgtattcatttaggtatttgctattttcagtcttctcaactggtatattaaccccataagggcagaaacatgtcttttatgttcatcactgtgtctcttgcctatggcgtctagttcagtaaaggaggtgaataaataaataagcgtataccacatgaaaaaagatcacagcgcaaacagttaaatagccccagaaataagtataacttttagagaggacattgaggagacaggttgaagggaatgaagggactatgttaaataaattcctaaatatttattctagcaaagtgagttgtcagtcacaaatttttatctgagtgtcctgccaattatgatgtgggtattttaaagcttttactctcatttataactatatttatttttgtgttagtaaaagcagctttccaaattatgcctaatgatatctgagtattactagctttgttttcttatctctttaattggataaattatatcaaatgaactacaattatgtctcatcaccatattcataattcatttgttaagtgctaactgtgtatctggtactttataggtatcgtctcatttaattttttacagcagccataagaaggaaatggtcatatttcattttacagatcagaacactgaggctcagagaagttaactactccaaagtcatatagccagtattttctggagctgtaattcaaatcagatgtgttcaataccttctactaccccattgctgtctttatggtgagttattttagtacacattaagaaatacatgaaatatgattggtatagatatattatttctattttctttattaggcagttaggaaacatttaactcaaaattttaaagctaagaaactttttttctgagtaaatcagaaaggatgttttcttcaactatttttctaaatgaagcattaaaaaaggatgaaatattttgacatacagaaaggcatacagactagtataataacacctttgttcttaccgcttatcttgaaataaaatcttactggtacagttgaaaggcccttgtgcattcctccccagggtcattttcctctctcttcctcagtagtaaccgcgatctcaacttgatcctatccttgcagcttgtgtatcttggcgataatctggtggctgagggctgaatggatgggtgacacaatggcaattaatgttattctttttcctgaagaaacttaccttatttctttgcttttttttgtttgctactcttcctggttgacttcagatttgtaacagatggagccatgacattttgaattctccccatcataccgtataacgtgagaaaggattgaaaatgtgtaagtttcagatcctgtatttttgggacgaaggatcggttcagtagttggtgtttttaatcccattatggtatgaagtcaaattagaatgaagagccttaatgcaaataatcttgagtacctcatgactttttaaaaatttttaaagatgagtgggttgggctcaaattctggtcaaatttcaggtggatgagcacattctgtgtttccaacattttcctcggattttaaaagttaagtatagtattcctaactttgtatgatctatgcataagagtgtcttgtgaaagattcccaacaggtttagagtggagtttagacttggttacgtgagaggtcttccctcaccctcgcgaaatctaagggaaaagacttcctcaagttggcaaagaattgaaataggcttcttcaaaaagacagaaagacaaaaacaaaaaataaggacaatatgttgctaattaagatgcaaaattaaatgttactggttcagtgtaactgatttatatgaaacaaatagagatttttagggaatgatagaaaagaggaaaataggtaataaaatgaaggagaagcaagaaatgtgattgtgatagtatcgaggactggggctaaaaaggtactcttgggaataaatgcctgagacacaaaaatatcttggaaagatgatagtgaatgactagaaaataccaaagactggctcttagtatctgttatatagtgagtacttattacttaattgatgattgactgataaaatctcatcaatgaaaagcacatgctcatgtatattatagcttttcatgtatgaagatacataataacttctctgcatactattttttaaagaatttgttttttaaagttaatccagatggttatatttttgtcatcttaaaagtagttttttctgttatgcaagaaggatgattttaaaaatgtatgtgaagactcttgctaaagttcaagtgaccaaatattgtgcataaattctttatttctttcataaaactaattttgttgaattttccataaaaagtgcagcgactaaacattcttgtgatagcttctttgtgaatgtgtcactgttcttgatttgcacacgccttataatttaggctttcttttgttttgggctggcagctccaactgttaaagctcttgtctgattatgtggaactccattttaataggagcagcttctttgctgcatttttaaaaaatggtcttggaagcttcttacttccgagaagtggatctttgttgcggacaaaggattatttatgctaaaggaaaatgtattccccactgaattagctcgtgggaagcataacaagctcattaggaatgctcacttgtactttggccttttgctgtggtggagagaagggaaaatgacatcaaaaaggacattctgttgtcttttgccttcctgcaaagaaaatgtgttataatattaggcttttcagtatggtttagctcaggttcaactttggtactagaagaaatgttcctgaaaggaaagtggtatgtatagttgacactgtgcatgaggtatgtctgatataacttagaggaaaaaataactttttcttggaaagtaatagcattatagctttgtaattattatatattttttcttaaaatattttaaagatggtttataataaaactagactagcttattatgctgctatgagcaataaaaaatcctaggtttttatagtctatactgttgaatgtttttaaactcttcacttttatccctttgaaaatataggaaagaattgcatttacctaattcaatgaattaaagtattttttttccatgtagatttcaagaatactactttggagctaaaattgctgtttcttctttgtctttgggaaattattatggggaggcattgagcattttggttcacagttaaaattgatgtttatctttattagcagaataagcttatagtcaagtttgtgaatttatgcaaagtgcatatgacctgttaggactttgatgacagtcagataaaagatacttgactttcaatatcagttgttgtaatatttatatttacattatattcacaggggaaaataaaattctgggagacttttatatgagctaagttttgttgattttttttcaaaactgtccagatggttcaagaat

SEQ ID NO: 1741 - DNA, 6000 bp, Homo sapiens
agtggtgcaatcttggcttactgcaacctctgcctcctgggttcaagcgattatcttgcctcagcctcctaagtagctgggactacaggtgctcacacgcatgctcgactaatttttgtattttcaggagagacagggtttcaccatggtggtcttgaactcctggcctcaagtgatcgacttgcctcagcctcccaagcctatcacttgtgatttggattctactcctttttgtctgttcaaggactttgttcttgcaattgtcacctctctctcatatctttagcttttcccccactctactggatcattctcatcagcatataaataatctaagaaatccaatctctttcagacttttatgttttctttaagccagttggagttaggtttctgtgatttgccacttaaaaagtcttgactaatacaggacatagagacaggtgtgtatggaaacaacttgtgattggtaatgccattctcatatcatagggaagtaaactgaagctcagaaagattaaataccttgcctaaagtctacaacttttctattttaaaacaagcaaacaaaccaaaaacctccctttttttaaatcatcccctgcagtcacttccccttcaaccacttccctttattgaaaaacctcttgaaagaattgtctttgtattcccaccattgctcttgaacagacaccatcttgctttcaaataaaattgctcttatcaaagtctcttaccaaattcaccgaatgaccttcctattggcaaatttaaaggtcaatttctggtctttattcttacttgatctcttagctgcatttgacattgtggatcaattcatttttgaaaccttttgtcccctggcttttagtatagtagtgcctccaagtttcccattcatagggcttctagggtggtctattagtctcctgatattcctcctacaccattagctgctggatcttgcttgggcctcaatccaccaagctttcctctttcctttctgtattagattcctaagaaatctcatctactcttttggtttaaataacgtccccatgttggtgaactcatggatttataccttcagccccagtctcctcctaaacttgagtggtatatacaagtacccacatgaaacctccacttgattgcctaacgggcatctcaatcacaacagcctgaacagcactattgatgcgccaccaccaacaacctgcttctccccagggttttctgtctcagtaaatcacaggaccatttgcccaatggctttcccactttctctcacatactacatccagcatatcctgtcagttctactttcaaaatatgttcagacttcaactacctcccaacatttccataccctcgactttgacctatatctctcaaatctcttgcttgaaggattgcaaaagcctcttcagaacccagagatagtctttaaaaatgtaaatcagaccctgtcattcagttgctcatatttacagtggcttcctgccatatcaagagcaacacccaaagtccttccccatggactcagcgtcctctgtgagccagtgattggcatctcttcaacctcatctcctcccactctttcccgcctcgctgtccttagccacattggcctttctgctcctcctcaaagaggagcaagcctcagggccctcacacttgttctttccttcgggctgggcttccctgattcaattctcagctcaacagttgcacacctcaaagaatcctttccacttcccatgatcctctattcctttactaaaggttatcatacacttatcaacttgtatttgtttcttattatttcctccattagaatataaactccattagggcaaggactactttttgcttcagcctatatcctcagcttctagagaagagtctaacacacagtcggtgctacctagtgaatgattaacggcaaaagcagcattgtgctatcaaatgaaatgagattcatgaaaacattttttaaactctggagtatcaatcatgtataagttataataacacattatagtttagtaagtatttatcaagcaactgcttttgtgctaggtaatgtactaggcactctaattacagaaataaataagaccaagttcctacccattctagctggaaggttggaggtggaaacaaagagaggtaagtgttattctagaattatctcggcaagtgctactgaagcacactcaaggaaaggaaaatgtattctgcttggggggacaggagtaaatgaagacttcatcaaaaaagtcacattaaactgggatttgatgattgtggttgggtttgtcagacaagaggcaggagaaagggcttgactggcagaggaaagaatctcaatgcgtgtgccctatcatgcagtttgctaagcatctcccaaaacagctgccttcttcactcctgcctttctctcttactcctgaagccccaggccttctctgacctggccatcctgggtcctttttttgtgtctcactgtgtccttttccccactggccttcaatgggtcacaggttacacctccatataattcatcctctctctcttcagacatcacgacaactccagactgtccatctttatacttcctgtcaccaacttcacagctgaccagggatttcagagacagtggggtggatttctaaaatccacctgcataatagtttaataggaacagatatatactctttaatgaaacatttttaaatgttcatgttgacataaaaattcctcttatgtagtttctcacagattatcaaaggagaggatatttgccttcagaatttaaatgagaatcaaacaagtgggagacagtgcttaacactgagcagtctatatttaatacatgaatgaatgattggatgaattaacaaatgagataaattaaaaccatttatgcatgtgttgtatttccagatctacttttgtaacttagttgttttgaatttgggatagattttcccatagaaacaatgttgtaaacagttcttaagttccaagaaatcccactaaggctgtttagcccataatgtagcaagaaaatgcagaaaagtaatgggatagcttaaacaatttttgaatgttgaatactagtatttgaagaaaagtaactttaattagaagatgaggtggtacatgaaaaatgctgtgattcccaaggggctgtctgagccctttcaagggttctgagggcactaacttcttgtaatgcatattttcaaattaaaatgtgcacatttatttccctgggtataatactatccttgtactgttctcgcaatcaggatgaaggaagagcatgagtctggccgtgaggaattagatttcagtgagaagagagtctgggacactggatgaggtaaaatgaactgaatggcaggcggtataaaatagaggaaagggaagaaatatggtgtgagcatgattccacctatagggaagacaagagtatggtggaggcaagaaagaatagggaagaaagaatactgtggaggaaaatatggtagatggaggccataaaatggttcaggtcaggttggcgctggccagaccaagggaataatggccttggagttttcaagtgatcaggcagcatgctactatactagactgtcagaggtgtcagcaatgcagattgggtcttgatatacctaagaggtctctgcagaatgcagaatttatatattaccatatcccctctgttgattttggtgacacacatactgcatgatttttttttttttttttgagacggagtcttgctctgttgcccaggctggagtgcagtggtgccctctcggctcactgaaacctctgcctcccgggttcaagtgattcttctgcctcagcctcccgagtagctgggattacaggcgcatgccaccacgcccggctaatttttgtatttttagtagagacggggtttcagcatcttggccagactggtcttgaactcctgacctcgtgatccacccatctcggcctcccaaagtgctgggattacaggcgtgaaccaccacgcccggccagtcttattaacttctaaagaaggaacttcagaaacccttgccttccgtgtaaaaaggtgtcacgttccacttgccagtcttcttccatccctctcccttccttcttttcttcctctggcgtttactaactgaccctgggcagaccacttatttctctgggtcccattttctcatctctaaatgacaacactggaacctagattatctagcccttccaattctaaacatttgattatgaaattctccaaaatcacaaaacataaaccaggaggacgagacctaattatgaccacatcaaatagctgtggtttccaaagtggttatttctgattatcacagacgagtcagttatccagcttttctcctcttttctttgttcccatagcataggcgacctctttgctctcagagctgtttcaggggcgtcgaaatttatctagaaaaagtggtgtgggaagtgtgggtttttccttccattaaaagaaaaaatctgttcgctccttcaactcaaaaggctttctgggtagccataagcagataaaaccttatctttctaccctcgagttcctcttttggacttcatatgcattgacttgacggaccttcagcacagagaacaaacacccgaagggttccctcagcaacgggactggcacccagagccccccgctccccgcgagccggcgagcgcaggcggaagcgcgggcgccacatttccggtgtcgggaccggagctcaccacacttccggtttccctgccgggcgcgccacacttcctgttgatccggctcggccgggggctgggccggcgggcaggcggcggcggccactggccaggcgtggacgcgcgcggggccgccgcgggcacggagtggccgccgcgtcgcctgagcccagagccggggagtgctctcggccgccgcgtctcctgccctctgtccttccaacccagccctcggctgagccgcgccgcaccatgcccgccgtggacaagctcctgctagaggaggcgttgcaggacagcccccaggtacctcccgccgctccggtgcccctcgcccgcaggggtgaggccgaggaggcccctccagccccggagtggaggccgcgcccccggccgggcagccgcgggagtgcgcccggccccctcgcggcgcctcccaccgggttctctcgggctgaggagggggcgggccgggccctgagtcctgagccggggcagagctgtggaacaggggagagagccccgcggccggagtcttgatgtcgtgacccccctgcaagctcagctgcaactgagtctgcgagatctaaactttgattccatgtagtagctgagtgcctcaggaaaaccaccttattgtgccttagttttgtcgtctgtaaaataggaataataattgtgcctgcttcatagggttgttaggagaagtcaatgagaaatacctgtaaagttgtcagcagacaatgtccggtacagataatgagtcagtcttattactgctactcctaatgatgtgatgagacttgtgccagccagaatgagaggcagagggcctggatctcttttccggcggtaccaggcctccttttggcaccgttttcccattagtgaagagaaaaatacagtacctgccccatttgtcgcacaagggaacttcattagcacactcgagatgagagtcaagtcctttgagctctgcagatgaaaactggtgtgtaaatatagcaaatgagtgcaggatgacattagttcataattcagcacatctttccccaggggtcttttgttctcctttgtttaacatttctccagcttcgtacctacactcctggttcagcatcccgggtttatttaaataagtgcctttatttcctagtgtctcaactcttgaaaacttagaataagattaacctattttcgtttcacactttcccc

SEQ ID NO: 1742 - DNA, 6000 bp, Homo sapiens
cccattgcactgttgatgtcttttggatatcagaaatatttcatcatttaaaaatagatgtggccagttgtggcggctcatgcttataatcccagcactttgggaggctgaggtgggaggatttcttgagcccaggggttgaagaccagactgggcaacatagtgaaaccccatctctacaaaaaaaaaaaattgtttaaattagccagtcatggtggcatgcacctgtagtcccagctacttgggaggctgaggcaggaggatcacttaagcccaggaggttgaggctgtagtgagctgagatcatgccactgcactccagcctgggtgacagagtgagaccctgtgtctacaaaaaaaaaatttttttaattagccagtcgtggtggcacacacctatagtcccagctacttgggaggctgaggcaggaggatcatttaagcccaggaggttgaggctgcagcgagccgagatcgtgccactgccctccagcctgggtgacagagtgagaccctgtctcaaaaataaataaatgtgcatagagaaatatggagtagaattgtgaatgtgtatttttttcttgttttttgtggattctatatctgtaatgatctcatgttgtttttaagaaataaaatagttgttcaacaggtgaaaagcagttacgtttaattttttccaagtaagaagtaccacttccccaaatgatttgctttgaaaacaacactcatctgcatgtctgagttttgaaatattggtgatttgagaccatacgacatgagaaacatcctgaggccagaacacaagcctttagcccagggacactcacatggggtcccccaagccctgtttcttggggatgcctcagaaactgggtctgaccccaccaggtatgtcttttcttttttttttttttttttgagacggagtctcgctctgttgcccaggctggagtgcagtggtgcgatctcagctcactgcaagctccgcctcccgggttcacgccattctcctgcctcagcctcccgagtagctcggactacaggcgcccatcaccacgccaggctaattttttgtatttttagtagagacggggtttcactgtgttagcctggatgatctcgatcgcctgacgtcgtgatctgcccgcctcggcctcccaaagtgctgggattacaggtgtgagccaccgcgcctggcccccaccaggtatgttttaaaaggaggattaatcagtagcagggagaagggctgctgggctctctttttcagccacagcattaagttagacagagaaaaaaaaatcaggggtggggaaagatgagagaaatgaagaagcaagaacaggtgtggtgtattttctttttaatgaagttgagtcattctgcagccaactcaatgccatgtagcctcaagccggggagttttgtttttcctaagcaatagaatccgactctgccagcaagaagcgcttgactgctgttccttaaacatgcagaagggttttttgtcttgttttgttttgcataatggacatatttcccatgcagccactttctgggttctttgtcatgtgtcaaggtaagcgtttagaaaactcctccgtgggccacggggaggcaattttcacctagtacagaatgcttaagatggagaaagccaacttttcaatatcgcttcagggaccatattttgtgcattcaacacagctgaatgcagacaaagtcgagagttaaaattttttgagtgtaaactcctgacaaggagattgaaggagggaagtgatgtcaggtgaattactgccccctggtggccagacacagtaatgggctcattttgctgtaatagtcctttgagtcttttcttcctgcgttcccctgccatcttccactaccggctacaaaggggttacaatctggcggccctggaaagccagccggcagccatgccaactgccttaaaatctggagatactgcttaaaaaatctaggcctcacatttattttgaaaaattgaaaactctatccacttttagactgcatcccagctaataaatacgggttcgagctgagaagctgctgcccactttagacaaggcatgtgctctcaaatctgccatactccccacctctacctattgtctcatggccaggaagctttgctcattagcagttcctgcatagcctctggatttactactcgtagcctaagctaattaaagacttaacaaagagaggagggtgcctttagaagcagaggactacattgctttatacctgggtgtggacaggggtccactagtcccttaatacccagctcagtgaggataagtgacttgttcaaggtcacccagccagcaagcggtgggccttgcatttcaacgcacatctgtctgaccccagagcttcactgttttctaacatactgtcacccataagctggctgcctaccaggccctcctctggggaaggtttttacaatgacattactacttgggccatcaggaagtgcaattcagaggactccaagagaaaaatgtttatgaccttggttgaaaagattaaaaacgagaagccaccaaaataatcaccaccctgattttgttccttaaaaactatggatcttctggccaggcgcggtggctcaagcctgtaatcccagcactttgggaggccaaggcaggtggaccacttgaggtcaggagttgaagaccagcctggccaacagaatgaaaccccgtgtctattaaaaatacaaaaaaattagccgggtgcagtggcacatgcctgtaatcccagctactcaggaggctgacgcaggagaatcgcttgaacccagaaggtagagattgcagtgagccaagatcacaccactgcactccagcctgggtgacagagcaagactctgtctcaaaaacaaacaaacaaacaaaaaaacaattagcctgtgtgtgcctgtagtcccagctactagggaagctgagatgggaggatcacttaaacccaggacatggaggttgcagtgagccaagatcatgccactgcactccagcctgggcaacagagtgagatcctatttcaaaaaagatagataggtgatagatagatagatagatagatagatagatagatagatagatagtttgctctgtgccagatgtatagaatctcatttcaccctcacataaaaccttgtgaagtggtaatatcatcacactgtgcacagtttacagaaaagcctagacagatgatcaacaagatcaagtcacttgctgaatgtgattcagtttgcaaggggcagaactgggatttgaacccaggtctgtgtgactcccaacagtgacaccccacaaccaccacctagccctgcctccaagagcaatacacgtcacagaggaggtcagatcttgaagcatcaagccttctgcaaatcctgaactggatgccaaaagcaaggtaggctgtttgtccccattttacaagtggggaaagtgaggctaggagtaacgtgcccaaggtgacacggagagtaaatggcaaagtctgaatttgagctcaggtctctttgactccccagaatctgaactgctaacttctaaatgcttagcgtttctggggcacctccctagatgtttaatttcagtatttgtggattaagatggaggtttccattctctgcttcaaggaaaaaatttctctctgggaagccaaaagaactagccaggtccttctggagaggatacaaattaaaaagtcagggagaaccgagggggtggcttgcgcctgtaatcttagcgctttgggaagccgagatggagggagagcttaaggtcaagagttcgagaccagcccgggcgacatagtgagacccggtctctaaagaaaataaaaaatcagaaataggtcgggcgcgatggctcacgcctgtaatcccagcactttgggaggccgaggcaggcgaatcttctgaggtcaggagttcgagaccagcctggccaacgtggtgaaaccccatctctactaaaaatacacaaattaggcgggcgtggtgatgcgcgcctgtaatcccagctactcgggaggctgaggcaggagaatcgcttcaacctgggaggcggaggttgcagtgggccaagatcgtgccacttccctccagcctgggcaacagagtgcgattccgtctcaaaaaaaaagaaagaaagcaagacagagagagagaaaaaaaaagaaagaaagaaagaaaagaaaagaaaagaaaattcgccgggcatggtggcatgcacctgtagtcccagctactcgggaggctgagatgggaggattgcttgagcccaggaggtggaggctgcagtgagctgcaattgctccaccgcactccagcctgggcgacacaacgagaccctgtattttataagaaaaaaaaaagttgtttaagtcagggaggaaaagacacagagaggaaaagagtaaagaagaagaaggcggcaaactcagcagcatggggtggaggctaagaacaggggctgcgcagtcaagcaggctaaccgggtgaaggggtgaaaagcatcagcatcttcatttcacaaccgggaaaaatgaggcacacgacagcggctccgggacgaagagacccgaggaaaagaccgccgtggaacttccagtttccgggcccgccacctagtgtgccccaaatccgcacgcccatcgggtttccagcacctgctcctcctgcctgtggcctaggccccgcccctcccgctgcttattggctgctacgtgaacgagacaaacgcaagcaacaaccaatgggagtggcccacggcgcgtctttcccggggaagccgacgcggacgcgggaacccggaaatgcgagggaaggacaagtggggaaagccaatccgccgcgacgagggctgcgggcggttcaatggcaagtcgccgggggcggggccagaggccggcggagaaggaggacccgggagccggcggcccggagctgggagcgcggggaaggcggttggggttctgacagctgcgcgcggtgagaaggggaaaagccctaggggctcgagaggatgaagccgggaagggtgcgacggggccgcgagccctgggcggggttcgggaagggaggctctgcagtcttggaggggactcagaccggtcccctcccctctccgggcctcagttctccctttctagggaagtgtgggggagagattcgcgcctcccagaacgcactccttccctgcacacacccctggcaccggcgaactgccccctttcctgtaccgccccgcccaggagcctgtcccctcgggaagcccgcccagacccctggacccgcgcagcactccaggcgcacccctattaaagcgcaccccaagccatttcacatgttctgtggcaatgggccaggatccccatgagactcagaaccccgtgatccatcagtcattcccgggtcaggaccagcccagagcaggtgcacaggccctgcttagtaataaggtagaaatcgagacctggggaccgggttcagaggccctggggtttccttccggatgcctctgtttacctcctgtgggccttctggaatttaacttatgctctctgtgtcttggtttcccttgtctgtaaaatggagctagcggtagctcttccttcatagggtggcatgagggtgaaacgaggcaatgcgtggccagtacactgctcagcacctaggacaccatagttgcttaataagtgcttattgttagcatagtgtttgcatgcctggccccacctccactcccactgccagccccaagcacatacaagccatgttgtcactgaggccaagcactgtggcccacagcctgagttcctttcgagatgctcgaactgctcatcttcttgatggggtcccttctggacaggccagaaatggaaggccagagaggggaagggcactgtgggagctgtggctgaatatcagggtgagggcaataaatgagg

SEQ ID NO: 1743 - DNA, 6000 bp, Homo sapiens
ggagccatttcatatatcgtgtatgtcttttcacttatttttcttaacctttcaaaaactactctgtgctatttatacaactgaagaactgtataaactactttagagcagtggcctcattactgtcaggaacggaattaccaaatcaaagagacaacactgcgtattcgccatcactcacacactgacaaagtgcagtagtgttagacatcatgggctctgtcactgggaaagggacccagtgacttccacctctctgactctaaatagcagcagtcatattggcacctgtaccatatgattcaaagagaagattctacttccattggatgacagcttggaaacccggccatattacatagagcactacatcatttcacaagttgcgagaaaaataaggccactccgaggcaatctcttctgcctcccagggggatgggacacgggacagtgcaaagaccgtggaagatggcagtaagtagatgaaactccaggaccaaagggatgcagcctggccatggctgaaggtttttgctccattcagtagaaactggtgctctaattcattatcaaaaatgcttacttggtgtccacatggcacttgttttctcaggttaacatctgcctacagaaaactcaggcagaggggtgagggcagatgcctactagcataacacctggtttgcagcacgatacaggtggaatgacaagcccagagaatttcagacgaaaacatctggcctgagttgctacaaatgaagtgtgagagaaacgcggatacacaaagaaaaccaaactgcccgcccaccatgtttccccctccaacatacagctctttatggctaccccctattcttaattagaaaaatagtctcaatatgaaaaaaaaaaaaaaaaaaacagctgctggcactaaagtttgcaaactatggctcaaaaagtcttcctgcaggtaagtaaggaatgtcggcattcattttctcttctatgaagtttgcttggaagttagtcaccactaatctaaaccttgagaaagtgagctttcaaccatttctctcagctgcgacttgggtctgacttcccagttgcagtcacagaacctctcagcctgtttcagagaagcacttggaggagttatgtcagtggctctgggccccgtcccacacctcttggccgctcctccaccttagtgcaaattctgctccagaacctttgttctggtcacatggtggcactgttgcccctaaagcacggccaccagcaagacacagcagacaccatacaatactgactagcttgctccaaagaagaaaataaatagcttggttgaattataagttattttagagacaaggcttcataacttagtttttttttttttttaaaactaaaacatttggaggtaaagaatgtttctccttttgctttaggaagtgactaggtttctagaaatgctgtttctttttttttttcctacctcaggacagcctttgtcactgaggatttctagggttagggcttcacaggaagcgtctccttgaacccagagtggttgggttgggcttctggcagtgccaccgagtactcagttgtggcaaaaagcagggtgtccagggtggtctcagtacacttggcgatgaagcgaatgaaaggcctcacgtcgccctcgttggcagcttccaacacgtggtagtagtcggaccgctgctccttgcggatggtgatgggcgggtagcccgcctgcatgaggatgaggttcatgagcagacgggaggtcctcccgttgccatcaatgaaagggtggatgtaaacgagtttataatgggctaaggctgcaaactccactgggtgcaggttcatggcttcctcggagttgagccactgtacaaactcctgcatctgcttttccacatcctgcggatggggagggatgtggtgtccgaccaggacctgtgttgtccgaaacctgccggcttccacggggtccacgtagcccagcacccgcctgtggatctccagcacgtcgctgatggtgacggagccgatgcgcgaaaccagagtcgtgttgatgtacttcatggctgcatgcatgcctatgacctcgttctgctcctccaggctcttcccgggcacggcgtagcgggtctccaggatgtgcctgatttccgagagggtgagggtgttgccctcgatggccactgtgtggtagatgtgatggtagtaggtctcctccatgaccctgcgcagagctgagttccccttggggatggacatgaccttcttcactttgctgtcgatgatgctgaaatacctctggtcgatctcttccacaagaggcagtgtccgatcgcggttgaccagtgctttctcatggtagggtgagatggtcaatgctctggtgtacaagtagtccgcctggatgatgtccttgtcttcttccgagaagatgccaaactcggtgagcgcgtccacgaagtccgggtccatcttgagggcgtgcatgaagagcttttgggctttttcccgcttgccctggcgcttcatctccagggcctggttcagggcagctctggcttccaacttacccgctggaagagagccaaagaagcgctgtgagggagggaggctagggggcagaggacattcggggggctgtcccctgtgctggtctccgcaggaaaccatgatgaccagcctgtgtccctggccttgaggagcttgttgcagccgcatcgtgtgtactcaacatgcccggtaccactctgttgccccagccgtgtggtggtatgcagtcactatccgtgtgtccccagagccactctcttgtattctgggaggcacctccttggcttcctagcctcctgctttctggacatagaaagttctaggcatttacttcgcctgggccctctctgctgggcctttcctgtgggccacagctcccagtgtaggccgtctcctacatctccagctcatcttgtgctggtgacacaggttcctgccccgggaggcccaaaggcgttaacaactccccactcttcctagaccctgggggcgtcaaccatcccgggactgttctttaactcttttaacccagtggtttgattgtgcgccccaggggacatttggtgacgtctggagacctggttagttgtcataactgaggaggtggagggagtgctacaggcatctcatggggagaggccagggatgccaccaccatctaacaatgcactttcagtccccaccacagagaactggtggaggtggggagcctgctctagccctagccctcctgtcctggcccctcttggccacctgaggatcagccccacacattcaacttcctttagttcctcgaatgcccccaggctctcttacgacagttatgtcagttatgacaactaacctctggtctctgcctggagtccttttccttggatgcccttcaccctggatgactcctacttaacaactgggtcccagctcaggtgtcacttcctccagggagccttcctggtatgctcctacagccctttatgcttccccatcaccacacttgtgacactgtctcagtcacatcaccttgtctatactaggagctcagggctgacttgttcacaataccccgatgccccacatacaggacatgacacattctatgtctgtctatccagttaacaagcattgaggaagacggccagtctgtcttacctggagaggccttggtcttggccaccagcagcgtcgcgcccctggaggtgatgctgagctccgtggacgggctggtgcacttggtggcggcatgctgcgccctgtccggtttgctcctgagcaggtagaggcctttgagcacagccaagcactgctcctccacagcccccagcggcagcagcagggccagcagggaccccagcaccatgctcagcagcgtcacccagaggaagcggctccagaccgagacccatttcggttcagtcaccgccatcactgaagccattggtatgagcatcatctggactcaggagagggccctttgcgcatgtccacaggcggctgagagagagcaggatctgcaaggagccaagagtcgcaggagaaacagacacgttcaggacatagtgtgacttcagctgggaagatgggtttggagacttctgctcttttagctcactagagagatggggtgggggcaagtcaaggactggatctcactagaggaggggccagcctagaaggactggtgccacctcctgggcagtatgaatgtgaaaacactgctgtggtccaacaattaatgagcacttgccataatccaggccgtgtgctaagcaccaaatgcctcacatgggtcacctcctgcaatcttcaacgacttgagctgatgttttcacccttctccaggtgagggaactgaggttcagagaggtgaagtcccttgccgaaagtctcgccgggagcaagtgacagccttaggacttgaactcaggaaccccacggctctaaagtgtccccccttcccatatatccctgtggcttctgaccacaaacactggatttgtggacatatgtcaaacatttgggacataaatgactgacagacacccaggcagatcagccacagcagttctgacgcccaatctttgataagcacaattgttgggtggcctcatttattgccctcaccctgatattcagccacagctcccacagtgcccttcccctctctggccttccatttctggcctgtccagaagggaccccatcaagaagatgagcagttcgagcatctcgaaaggaactcaggctgtgggccacagtgcttggcctcagtgacaacatggcttgtatgtgcttggggctggcagtgggagtggaggtggggccaggcatgcaaacactatgctaacaataagcacttattaagcaactatggtgtcctaggtgctgagcagtgtactggccacgcattgcctcgtttcaccctcatgccaccctatgaaggaagagctaccgctagctccattttacagacaagggaaaccaagacacagagagcataagttaaattccagaaggcccacaggaggtaaacagaggcatccggaaggaaaccccagggcctctgaacccggtccccaggtctcgatttctaccttattactaagcagggcctgtgcacctgctctgggctggtcctgacccgggaatgactgatggatcacggggttctgagtctcatggggatcctggcccattgccacagaacatgtgaaatggcttggggtgcgctttaataggggtgcgcctggagtgctgcgcgggtccaggggtctgggcgggcttcccgaggggacaggctcctgggcggggcggtacaggaaagggggcagttcgccggtgccaggggtgtgtgcagggaaggagtgcgttctgggaggcgcgaatctctcccccacacttccctagaaagggagaactgaggcccggagaggggaggggaccggtctgagtcccctccaagactgcagagcctcccttcccgaaccccgcccagggctcgcggccccgtcgcacccttcccggcttcatcctctcgagcccctagggcttttccccttctcaccgcgcgcagctgtcagaaccccaaccgccttccccgcgctcccagctccgggccgccggctcccgggtcctccttctccgccggcctctggccccgcccccggcgacttgccattgaaccgcccgcagccctcgtcgcggcggattggctttccccacttgtccttccctcgcatttccgggttcccgcgtccgcgtcggcttccccgggaaagacgcgccgtgggccactcccattggttgttgcttgcgtttgtctcgttcacgtagcagccaataagcagcgggaggggcggggcctaggccacaggcaggaggagcaggtgctggaaacccgatgggcgtgcggatttggggcacactaggtggcgggcc

SEQ ID NO: 1744 - DNA, 6000 bp, Homo sapiens
cggctcactgcaacatccgccctctgagttcaagcaattctcctgcctcagcctcccgagtagctggtattacaggcgcctgccactgtgcctggctaattttttgtatttttagtagagacggggtttcaccatcttggccaggctggtcttgaactcctgacctcgtgatccacctgcctcagcctcccaaagtgctgggattacaggcatgagccaccgcgcctggcccttcttttttcttttttttttctttttttttttttttttttttttgagacggagtctcgctctgtagccaaggctagagtgcagtggcacgatcttggctcactgcaacctccgcctccctgattcaagcgattctcctgcctcagcctcctgagtagctgggattacaggcacacgccaccatgcccagctaatttttgtatttttagtagagatggggtttcacctgttagcctagtctcgaactcctgacctcgtgatctgccctccttggcctcccaaagtgctgggtttacaggcatgaaccactgcacctggccacttggctgatattttaaaatttctttagagacagggtctcaccatattgcccaggctggtcttgaactcctgggcccaggtgatcctcctgcctctgccacccagagtgccaggattacaggtgtgagccaccacgcccagctgggttttgcattttctttttttgagacagagtctcagtctgtcacccaggcagtgcagtggcgtgatctcggctcactgcaacctctgtctccctggttcaagtgatcctcctgcctcagcctcccaagtagctgggattacaggcgcgtgccactatgcccggctaattttttgtattttcagtagagatgaggtttcaccgtgttagccaggatggtctcgatctcctgacctcgtgatccacctgcctcggcttcttaaagtgctggaattacaggtgtgagccactgtgcccaacctgggttttgcattttaatagtcactttgtaggaaactggaaatagtagttggaggagcctgtgatggtggaaagggcttagcccctgcaggagctggggcctcagcatggggtctgatgttgggtgctactcctgtatgtgggacccctgcttctcttcttaaaacacctcttctcactatgtccttctcttctaggaatggatgtatatggctacctactggcacgagaagggcggctagaggatgttgagaaccttggatgccgccttttcaatatctctgatcagcatgcagaaccgtgggtggtttctgggtatgattatgcattctcttttctccccagttgtcagtagattaagagataatggttgctcttgaagagaatataaattgaaagcacaggtttaagaggtaatcacctggacaggcatggtggctcatgcctgtaatctcaacactttgggagactgagacaggtggattgcttgaacccaggaggcagaggttgcagtgagccaagatcgtgccactgcactccaggtgggcggcagagtgagattttgtctcaaaaataaataaataaaaataaaaagaggtaattacttgaggccagaaatttgagaccagcatgggcaatgtagcaagaccctgtctctataaatatatatatatatatatatatatatatatatatttttttttttttttttttttaaaaggataatcagccctggattcaaataatagtttatgactctggatgcattatttacctatctaggtctgtattctcatttggaaaatgggctaataacctctccttctagggttaagcattaactgagttggtgaatgcattgtgcttagtactgagccatcagtgatggggccagaagatgctcctttgtttattaacctggctttacaaattctctgaatgcctctctgctaataactaatatccagatcataggttctttttcataatttttctcttccatatcaagatttccccttaaaaataaatagtggattttttggtttgttttgcttttctactaatatcttaggttaaaactataagtgtggtttggaataaggattatgttcagggccttcaatatgatttttggatcaactttctttgtagtcttctcttggataacttctggggtttttgtgtttttttttttttttttttctccagctgtcacagcttctatagcaaacgctactcccgggccctctatttaggagccaaggccattcagctgaacagtaatagtgttcaagctctgctacttaagggagcagcacttaggaacatgggcagagtccaagaagcaataatccactttcgggaggccatacggctcgcaccttgtcgcttagattgttatgaaggtaagaaagaaaacataggtgaatggtgtgaatccgtgggtgtggcagcagccctcagatggaaggtttcattaggccagcacttcccaaactctgttagaataatctggggaagctggccggacgtggtggctcacacctgtaatctcagcactttgggaggccgagacgggcagatcatgaggtcaagagattgagaccatcctggccaacgtggtgaaaccccgtctctactaaaaatacaaaaattagctgggcatggtggctcacacctgtagtcccagctacttgggaggctgaagcaggataatcacttgaacctgggaggcggaggttgcagtgagccaagattgcgccactgcactccagcctggcgacagagcaagactccatctattaaaacaacaacaacaacaacaaaaaaacatcatccggggaagcttttcaatatcctgacgttgggtctctccagtgtagatggaaatacatggaattgggaatagacatcgatatttttggaggtccccaggggttaccaatgtgcagacaggtttgggaaccactgcattaggcattttacatttatttagggctttcactggatttgtcaccccatactttcataatccattttttctgattttttttctggtttttggtgagggtatagttgggatggggttttttttttttgtcctcccaccgctcgcccccatccagtgtggcgtactcattaatatgaatctctctgtgtcagacaccatgcaagatcacttagtttgcctattttttttctcttactcctcttttttttgagacagagtctcgctttgttgcccaggctggagtgcagtggcatgatctcggctcactgcaggctccacctcccgggttaatgccattctcctgcctcagcctccccagtagctaggattacacctggctaattttttgtatttttagtagagacagtgtttcaccgtgctagccaggatggtctcaatcttctgacctcgtgatccgcccgcctcggcctcccaaagtgctaggattacaggcgtgagccaccgtgcccgggtcctgttttttttttttttttttgagacagagtctcgccctgtcacccaggctggagtgcagtggcatgatcttggctcattgcaacctccaccttccgggttcaaaccattctcctgcctcagcctcccaagtagctgggattataggcgcccaccaccacacccagctaatttttgtattttttagtgagatggagtttcaccatgttggccaggctggtctcgaactcctgacctcgtgagctgcctgccttggcctcccaaagttctgggattacaggcatgagccaccacaaccggcctattttttttatttttatttgagatagagtctcactctgtcacccaggctggagtgcagtggtgcaatctcagctcactgcaacctccacttgccgggtttaagtgattctcctgcttcagcctcctgagtagctgggattacaggcatacaccaccacacccagctcatttttgtatttttagtagagatggggtttcgccatgttagccaggctggtcccgaactcctgggcttaagtgatctgcccaattcagcctcctaaagtgctgggattacagacgtgaaccactgtacatggcctgttaggcctattctttttcgtggccatcttaccttgggccagagttagtactcgtgggataactccacatccatatgatagtgttggctgtgggaatgggtctgttcattgtgacctccagagtgggcacaatcagggtccaactttgttttgttatgtaatattttaagttcatgtgaattgaccctgggagttcaaaggagctgtgccagtttcagcaacgtttggtgactcagtcacagacattaaaatagatcttacaagatgcagttcctccaaaacatatttttataagcatttaaaaataaacctaggagtctaggagtgatttgctcttaacaggaagatgagttcaaatttgagaaataaaatttggatgttgggaaagagaacaaatctgcttatatagccagagagctatgcctctggatttgttgagggggaaagagtattgtctttgttctgaaagaagctctagcaaaccaaccattgatttcagattaacttcttgatcctgaaactgtaacttccctgtcttcccagctgctgttaatcatgttaattccattatactgcatgcctatttcaccagagctcagggatgcggttgaatagtccgtcctataatatttggacagcggatgtttcccagttggccagtgaggcttcttaagctgccatttggagatttaggtcagggcaactctgactacaccctttgatatttcttacagtttccagttggagcttccttcttttgctggtagagatttaggttaggcaagtgcattctgtttttttctgaagttccagtagggctttagcagggaagtaaaactattcagtaagtaattgcaaacaactgtatgtggaatccaacatgttgcccttaagagttaggtaattggctgggtatggtggctcatgcctgtagtcctagcactttgggaggctgaggcgggtggaacacctgacgtcaggagttcgagaccagcctagccaacatggtgaactaccatctctactaaaaatagaaacaaatttagccaggcatggtggtgcacgcctgtagtcccagctacttgggaggctgaggcaggagaattgcttgaacccaggagacatgggttgcagtgagccgagatgtcaccactgccctccagcctgggtgacagagcaagactccatttcaaaaaaaaaaaaaaaaatagttagagttaggtaatttctggttaagtaaccatagtgtgtggaagggtgtgcatgaatgttataaatgctgctagggtggaggagtatgcagagaaaatctgccaaggattgtgtgggtttggggttttaagctgtttttttgttttgatgagcactttgtgccaaaaagttattcctctgttctcctcaacttactggcatgaagagttgagagttgactcttctcaaggtggcctcctcatagggcgtctcgctgtgggtgtggaaagaggcaagggctgccagttgcagtctgtttggtgcatgtggtaagtactgttcatctcgtttagggaagccctcagcaagtgccttttgagacagctgttacgtttcaaataaaagagtctttctccctaagttgcttgacaataagtcctttatttgtcaaactgtaaattcactttaagactctaggagccaggccaggcacggtggcttacgcctgtaatcctaatactttgggaggctgagctgggcggatcacctgaggtcaggagttcgagagcagcctgaccaacatggagaaaccccgtctctactaaaaatacaaaactagccgggtgtggtggtgcatgcttgtaatcccagctactcgggaggctgagggaggagaatcgcttgaacccgggaggcggagattgcagtgagccgagatggcgcca

SEQ ID NO: 1745 - DNA, 6000 bp, Homo sapiens
ttggactgtccaacccagcagccactcccagaccccctggaactctggcccaaggctctctgactgactccttcccagatcttctctgcttagtggctgaagactgacactgcccgatcacctcggaagcctacaggaccatcacagacgctttgggtaactcttacagtggaaggtaagtccgtccccttcttaatcaatacggaggctacccactccacattaccttcttttcaagggcatgtttcccttgcctccataactgttgtggatattgacggccaggcttctaaacctcttaaaacttcccaactctgatgccaacttggacaacattcttttatgcactcttttttagttatccccacctgaccagctcccttattaggttgagacattttaactaaattatctgcttccctgattattcctaggctacagccacacctcattactgcccttttccccagttcaaagactccttcacatcctccccttgtatctccccaccctaatccacgagtatatgatacctctactccctccttggagaccaatcatgcaccccttaccatcccattaaaacctaatcacccttagcccgccatgctttaaaaggattaaagcccgttatcacttgcctgttacagcatggccttttaaagcctataaactctccttacaattcccccattttacctgtccaaaaaccagacaagtcttacaggttagttcaggatctgtgccttatcaaccaaattgtcttgcctattcaacccatggtgccaaagccatatactcttctatcctcaatacctccctccacaacccctccataacccattattctgttctggatctcaaacatgctttctttactattcctttgcacacttcatcacagtctctcttcactttcacttggactgaccctgacacccattaggctcagcaaactacctgggctgtactgccgcaaggcttcacagacagctcccattactttagtcaagcccaaatttcttcctcatccattacctatcttggcataactctttgtgaaaacacacatgctctccctgctgattgtgtccagctaatctcccaaaccccaatcccttctacaaaacaacaactcctttccttcctatgcattgttaggtacttccacttttggatacctagttttaccatcctgactaaaacgttacataaactcacaaaagcaaacctagctgactccatagatcctaaattttttcaccactcctctttctgttccttaaaaacagccctagaagctgctcccacactagctctccctaactcatcccaacccttttcattacacacagccaaagtacagggctgtgtggtcaaaattcttgcacaagagctgggaccgcaccctgtagcctttctgtccaaacaacttgacctcactgttttaggctagcccccacattattccggataccacacctgacccacatcactgtatctctctgatccagctgacattcactccatttccccatatttccttctttcctgttcctcaccctgatcacacttggtttattgatggcagttccaccaggcctaattgccactcaccagcaaaggcaggctatgctatagtatcttccacatctatcattgaggctactgctctgaccccctgcactacctctcagcaagccgaaccaattgccttaactcaggccctcactcttgcaaagggactacgcatcaatatttatactgactctaaatatgccttccatatcctacaccaccatgctgttatatgggctgaaagaggtttccttactactcaagggtcctctatcatgaatgcctctttaataaaaactcttttcaaggccgctttacttccaaaggaagctggagtcattcactgcaagggccatcaaaaggcatcagatcccatcgctcagggcaacgcttacgctgacaaggtagctaaagaagcagcttagccttccaacttctgtccctcacggccaatttttctccttctcatctggtcactctcacctactcccccactgaaacttctacctatcaatctcttcccacacaagacaaatggttcttggaccaaagaaaatatcttcttccagcctcacaggcccattctattctgtcgtcatttcataacctcttccatgtaggttacaagctgctagccctcctcttagaacctctcatttcctttccgttgaggaaatctatcctcaaggaaatcacttctcagtgttccatctgctattctactactcctcagggattgttcaggccccctcccttccctacacatcaagctcggggatttgcccctgcccaggactggcaaattgaccttactcacatgccccaagtcaggaaacaaaaaaacctcttggtctgggtagacactttcactggatgggtagaggcctttcccacagggtctgagaaggccaccgcaatcatttcttcccttctgtcagacataattcctcggtttggccttcccatctctatacagtccgataacggaccggcctttactagtcaaatcaccgaagcagtttctcaggctcttggtattcagtgaaaacttcatacccattattgtcctcaatcttcaggaaaggtagaatggactaatggtcttttaaaaacacacctcaccaagctcagcctccaacttaaaaaggactctgtcaaggatagagccccaaaactcaccaaccaagcaggtaattatgctgaacccccttgagcactctctaattggatgtcctgggtcctcccaattcttagttatttaatacctgtttttctccttctcttaattcagaccttgtgtctttcatttagtttctcaattcatacaaaactgcatccaggccatcaccaatcattctatacgacaaatgctccttttaacaaccccacaatattgtcccttaccacaaaatcttctttcagcttaatctctcccactctaggttcccacacaccacccccaatcccacttgaagcagccctgaaaaacatcgcccattatctctccataccacccccaaaaattttcgctgccgcaacactttacgactatttcgttttattcttcttgttaacgtaagaagacaggaatgtcaggcctctgaacccaagcctgcatgtgtacatccagatggcctgaagtaactgaagaatcacaaaagaagtgaaaagggccggttcctgccttaactgacccctgacctagcaactgatgttatctacagattatagaaagacattgtgaaacttcccggtctgtttcactctgaccaccggtgcatgtcatgtaccccctgcttactcaatcgatcacgactctctcacgcggacccccttagaattgtgagcccttaaaagggacaggaattgctcactcggggagctcggctcttgagacaggagccttgctgatgctcccagccgaatatactccttccttctttaacttggtgtctgaggagttttgcctatggctcgtgctgctaccatcctgcctgcacccaggtgaaacaaacagccttgttgctcacacaaagcctgtttggtggtctcttcacacggacgcacatgacagtggtggcaggcgcctgtaatcccagctactcgggaagctgaggcagggagaattccttgaacccgggtgacagaggttgcagtgagctgagattttgcactccagcctgggcgacaagagcaaaactccgtctcgaaaaaaagaaaaaagaaaagttcacagtgatgatgcccaccaaaatcaaatagaaggtctcacacatccaggaaactagagtaggggatgagatgggaaaaggatctacaggagcttcaactgtgacaaaatgttaagagctgaaaaagttgctgatgaagatacactgtgattttttcagagcattttttttgcatctactactgtaaaaatcaaatgaaaacaaaatctagaccaaaacgactgtctcctttaagaaaggagcgataggctagatctgagaggatgactgtggagaatattcggactctgactcaacgacctaaactgcctcattggctcagttacctccctggtccctgtatacatttgagtttgcgatccaacataattaaccagtcgatctgattccaagtcaaccatttaacaacctgagcacaaaatttaagcaggcagtttcttcccttgtgggaagggaatgacaacttcaactttatggattgttgtgagcgtcccaataacttgtgtaaaactttcctaaaacgttaagtgtgccagacacatactggtttatatgggtatcagctaattcctggatccagcctttatttccacggatctagggaataattttacatggggaaatatacccctcgaaccaaggagttcccccagggccgaagcctgacttggcaggaacacaaaacacctgaggaggggcgcggcggccctagcctggtgcgcatgcgccactgtaaaggccgttaggtctgtccctggcgcccgattagaatatttaattccagttggagcgtttttcctcaccttactgtattttatttcggtaaatacccacacattttaatttctgagaggcacaaattcctctcagactcattcaaattgaccgagtagtcttataaggtgccttttgtctcattgtaaatcctcagtaaagtttgcagtttaggatgataacgtgatttttgcgtaaaaataacaactcatttcacctgaaaaggaccacgacaggagcagggactcgagtttctttttattcgggcacttcagtagttacctcttgcttgggggtggtgccgcgtgtggacccgatggaccccggcgacgccgccattttggagtcttccctaaggatcctctaccggcttttcgagtcagtgctgccgccgctgcccgcggctttgcagagcaggatgaatgtgatagaccacgtgcgggacatggcggccgcggggctgcactccaacgtgcggctcctcagcagcttgttacttacaatgagtaataacaacccgtgagttgaggcgggtagctgcctggggctgaggagaaagcggcggcggtctgggagcgggggctcagggcacgtgggaacaggcgggaaggagcggccgccggcgccagcggaggctccggggtctgcgagggcgtcctggagcggagcagacttcggagcgcaagttgggttcactgggtgccggcgtcaagtcccgcggggatgtggcgagcggcggcttggagacatagaaggcagaggctctgaggacgacccaggcgagggtttcctgaggcacctgtcgcggggcagcgcgactgtcacatcgctaggctgaatccttccctctcggctccttccagaagaacgtttttttctctcgctgcagctcagggacccagcctcctggtttttatgcgctagcccccgcatctgagattggtccccccgttaagtgtatcaggagggtccactttctggccttgggaaacccctgaaaacggggccgggcgcggtggctcacgcctctaatacgagccctttgggaggccgaggcgggaggatcgcttgagcccaggagttcaagaccaacctgggcaacatagggagaccctgcctctacgaaaagtaaaaattaaacaattagccgggcgtgatggtgcgtgcctgcggtcccagctactcgggaggctgaggcaggaggatcgcttgaacccaggaggtcgaggctgcagtgagccgtgatcgcatcattgtcctttaccgtgggcgacagaacgactgcctgtctcaaaaaaaggaaacgggagactccattaatgggtgggcgtggcgcctttcatgtttccttgaagcactgagctgattccatccttgagtgcatgtccctctcctgcttaatatcctttattggccg

SEQ ID NO: 1746 - DNA, 6000 bp, Homo sapiens
tatagtttttctccttctggcatatccacacccaggaagaatggcaataactttcctaaaactaaaatgtgctgaacaaagattatttttacagtattttacacattttgtgacccattttggattgtttaattaaaggtatacttcgatttgactattgacaaaacacagttcttaaagctttgaaaataggctgggcacagtggctcacgcctgtaatcccagcactttgggaggccacagcgggtggatcacaaggtcaagagatcaagaccgtcctggccaacatgaggaaacctcatctctactaaaaatacaaaaattagccaggcgtggtggcagatgcctgtagtcccagctactcaggaggctcaggcaggagaatcacttgaacccaggagtcggaggttgcagtgagccaaaatcacaccacagtagtccagcctgggtggcagagtgagactccgtctcaaaaaaaaaaaaaaaaaaaagctttgaaaatatcagttcagtaaagggtttcaagtcagaaaaggttttgaatctttaccttcaccttccttttgtgctcatcattgctgccaggacgggtttcaggtttggagtgaagaggtggttaaggaacttcaggtacttggcatttgctaatatgattatagggatatcagcaaagggttgtccctgtggccctcccctagaccacatcgtaacctagagtctccagatgcagtgtttttccatctcaattcacatagatatgttgagctagcacatttgttagaagtgcatcctagaaagattatattcacaaactgagcccttctactaccaccctttcccacaactggatgtttgcttggtctgtgaccttgagatccagctgataagatggggtggcaggaatcatcagggacaaaaattctatgggttctggactgactgatagcattgaacttgtacatgaaaggtattcaatattaacagtgattctgtgtcagagaagtaccagtaagccagttactactccttaggtagtgaaatgcaaggcaggtgtgatgggttttttttgtttgtttttgagacagagccttaggctggagtgcagaggtgggatcatagcttactaccacctgtaatttctgggtttaagcaatcctttcacctcagcctccctaagtgctgggattacagtcatgagccaccacacccagccaacactgtgttttggatacttattccaagtgttactcttgagttttttgttttttgtttttttttttttttttgagacggagtctcgctctgtcgcccaggctggagtgcagggcgcgatctcgcctcactgcaagctccgcctcctgggttcacgccattctcctgcctcagcctcccgagtagctgggactacaggcgcccgccactacgcccggctaattttttgtatttttagtagaggcggggtttcactgtgttagccaggatggtctcgatctcctgacctcatgatccgcccgcctctgcttcccaaagtgctgggattacaggcgtgagccaccgtgcctggcctgctcttgagttaaaggattccttttacatagctgttagcccagcaaatacttttcatgtttgcactgatgaattcaaatccagttgacctcatttttgtgacgtgtatcctaatgtaatgatactggctgcatcagtttcggtttctacttaatgcagaggcctttaaaaaatgacttagaagatcagtgttggttggtatcagtttcgactcctgtttggtcatcaacacaatttgtagatcttatgctcaagcttcctctctctcatcaggcagatataatttgccatccagtctacttgtgggcatgaaagtgcccttgacataggtggcttttggttgaaggcttgcagacatttaatatatatataaaatacttaactaattttattaaaatgaaaagttgtattcaaatgttgattttcatgggacaatttaaaaaccactgcctgttttccaggtacataagtactttatactaccatttcttttttttttttttttaactttgtaaatgtgatggaaaggctgaggtatatgttgttgggtaaaacatgagtgtttgttgatctgtttctgctgccgtagctgtctgatgtacagtaatgcgaaaccgcattacaggttatggctcagaatcttaggatttggaagctaggcgattaccctggctaaacctttcaggagccagatgttcctagtggtctgaggtagccttagggaggaaatgaagagagaatagaaagaggcaggcccacgcttaaagtgctgagagggaaaaggaggaaacaaactgatttttgatggagaagccagcaggaatcagcaggagaagctggagtatgtggcataactaaagaatcaaagccggggcgtggtagctcacgcctgtaatcccagcactttgggaggccaaggtgggtggatcacttgaggtcaggagttcaacctgatcacaagaggtcaggaggtctgaccaacatggggaaaacccatctctattaaaaatacaaaaattagctgtggtggtgcacacctgtagtcgcggacactcaggagattgaggcaggaaaatcactggaacctgggagaccatggttgcagtgagccaagattgcgtcgcttcattccccctaggtgatgcagtgagaccccacctcaaaaaaagtatccagaagtgaagctgaccttggggaaagaggaagtcactgtcactggggagctaagacagcagctctgtttttataatacaggttaagtattccttaccgggaatgcttggcactagaagtgttgcaggttttttgtttttgtttttaattttggaatatttgtgttataattactggttaaacatccctaatccaaaaatctgaaatccagaatgctccagtgagcatttcctttgagcatcatgtgagtgctcaaaaagttccaaattttggagcatcttggattaaggatactcatcctgtggtggtagtagtagtagtattgctgttggaaatgggagttggtggtttttggagattgcccttcagcctttcgtaagaaggagtttgcttttttttgagacggagtttcactcttgttgcccatgctggagtgcaatggtgcgatcttggcttactgcaacctctgcctcccaggttcaagcaattttccttcctcagcctggcgggagaagtttgttaaactttccgaaccccctagtgaaggacctctaaagaaatatgcaacagggtgaaccatagtcagtgttagacccagtcattgagaaaccagaaattattaggagaaaagataacactcctctgcagagagaaggcaaacatttgttgaatttacatttcatttcaagccctgtggtaaactccctaagctgcttgatttgcattacagggtgggaggtgtggttcaggtcagttgcttgggctggctctaactctcaaaggagaggtataggtttaaacctttagatgtccctgtattccccaggaaaagagactaaggacaaactcttggtttgttttgtttgttttgttttgttttttgagacggagtttcgctcttgttgcccaagccggagtgcaatggcacaatcaaggctcaccgcaacctccgcctcccaggttcaagtgactcttctgccttagcctcccaagtagctgggattacaggcatgcgccaccacgcccagctaatttttatatttttagtagagacgggatttcttcatgttggtcaggctggtctcaaactcccaacctcagatggtctgcccgcctcggcctcccaaagtgctgggattacaggtgtgagccaccgcgcctggccaaactcctggtttttaaagattgtgcttagtatagtaagtacaggaaacaaaggcatctggacaattggacaatcctcaaccaatccagagaaatttgttcttgcaaggtatgtgactaggttttaaactcagaacatcagtttcctgtagaaacagtgcatagaggcatatttctgtcagaactgcactctgactccagaatgtgtggatgcctgtgctgttgagggaacatgaccatcctgtgacatcaggcctgtgggagcatgtggagtctgtgcagtgttggaaacaaatgccctgtagtgcctgtgagaggcagccactgccgtgtgatcattgtgcctcctgctagagtactgagggctggggatcctctggtgtcagtaggttattgaggggcatatatgggggatgggtgctaactctcaggtttcctcagaaggaaggtcataacgccacatgtgtaagttcgtaattgaattcagaagtaggggactagctgcggtgagattggacagagcagacaatttcaaacagaattgatgctcccagataattcctgggatttgatggcagtccttaatcattatcaaatctggaattctggtttcatgcttctgtggaatttaaaaagatttcatgtgaaaatgtaagtcattgcttttagatcagatatgtgtctctcctaaaccccttccctctaggagagtctttctttaaagagatggggtctcactatgttgcccaagatggtcttgaactcctgggctcaagccatcctcctacctcagcctcccgaagtgctgggattacaggtctgacccaccacgcccagctcttattttaaaagagccttaaaataagatggttttattaagattcttaataaaaacatagtttcatttgcttaaaaggcacccagaatcttgctttgggggaagttaatcctgagagaatgagcctacggaacagtaatactctctttttaatgtaatactctctttttaatcacaggtaaaagaagatacaacattaaactatggaaaactttcacagactgttttaactgtttaccgatagcagccatcgtggatgagaagatattctgctgtcatggaggtaggtgggctgatttttgttccaaataggttttgatcccttccaaagggtgaacactttaacatttgtgagttatcattgggatgactttctctgacagaacactctcctttgttgatgtgttgcattgcactttcactctgatacagccaggatcatttggataaaaatcttaaggaattgatttattacagggaattctagactctgtaagctaggtttgaaaatagagcagaaaatttttatttttattttattttttgtaaggatgagttctcaccacgttgcccagtctggtcacaaattcctgggctcaagcagtcctcctgcctcggacttccaaagtgctgggttacaggtgtaagccactgtgcccggcttagaaaagtttttggttttttttgtttttgtttttgttttttgagacagagtctcgctctctcacccaggctggagcgcagtggcaccatctcggctcactgcaagctctgcctcccaggttcacgccattctcctgcctcagcctcctgagtagctgggactgcagccacccgccaccacgcttggctaattttttgtatttttagtagagacggggcttcaccgtgttagccaggatggtctcaatctcctgacctcgtgatctgcccgcctcggcctcccaaagtgctgggattacagacttgagccaccacgcccggcagaagagtgtttttaactataaaatgaacaatgtgtaatttgttgtgccagagatcctctagaacactcaagatgtgagtagattttcccttgattgttttttatcctctcagaactttctctgacttggattttaaaagttattttggccaggcatagtggctcgcatctgtaattccagcactttggagaggccaagccaggaggattgcttgatgccatgaatatgagaacagcctataacatatcgagacccctgtcattagaaaaagtt

SEQ ID NO: 1747 - DNA, 6000 bp, Homo sapiens
atgaagtcatgaagtcaggctgggcacagtggctcatgcctataatcccagcactttgggaggaggaggcgggcaaaccgcttgagcccaggagctcaagaccagcctgggcaacatagcaagaccactgtctccacaaaaaacttaaaaattagctgggtgtggtggtgtgcacctgtagtcccagttacctggaaggctgaggcgagagaatcacttgggcctaggaggtcaaggctgcagtgagccatgatatcaccactgtagtttagcctgagcaacagggcaagaccctgtctctaaaaaaaaaagtgaaataagatcatgttactcctctacctaaaaccctgcagtgacttcccattaagcttagaataaaatccgaacgtcttcttgtggtttaaaagaccctgagtgggccgaggcgggcagatcacctgaggtcaggagtttgagattagcctggccaacatggtgaaaccctgtctctactaaaaatacaaaaattagccggggcatggtggcaggcacctgtaatcccagctacttgggaggctgaggcaggagaaccgcttgaacccgggaggtagaggttacatgagccaaggtcgtgccattgcactccagcctgggcaacaagagagaaaaaaaaacaaaaaccctgagtgatctggcctctggccacttctccaatccccaccttcttcttcttttttttttttttttttgagatagagtctctctgtcacccaggctggaatgcaatggcgcgatctcggctcactgtagtctccacctcccgggttcaaacgattctcctgcctcagcctcccaagtagcttaggattacagtcacccgacactactcccggctaaatttcatatttttaacagagacggtgtttgaccatgttggccaggctggtctcaaactcctgacctcaagtgatctgcctgcctcggccttccaaagtgctaggattacaggcgtgagccaccgcgcccagccttccaacccccacttctgacactcttctcctacctttcacactgtgctctagccactctggcctttttcccattcctccaacactggaagattgttcctgcctcagggcctttgcacttggtggtccttctgttgggaatattcttcccctatgccaatccttcccatgactttctctttttcatccttcacatcttgactcaaatgtcaaatcctcagagtcctcctatgtggtcacatgaccctttctaattttctcacgaaatcgccactctctgaaattatcctcctcaaatggtttatctgttcccctctgtgtctttctctagactgggagctccatgaggacagggactaagtctggcttattcactgctatgtccccagcttctcacacagtgcctgacacccagtacggcctcgacaaacgttgcccaaaagaatacaagtgtctgccggtaacactacaggatgcagagatagaactgtggacgttgtcaaagagcattcacccgtattttttccccatggttccctcctttgtataaaacccctggaatatccagggaggtctagatttgcaggcaaacttcatcaccaacactcaacacttctttcttttcttttttttttttttttgagacggagtctcattctgtcgcccaggctggagtgcagtggcacggtctcagctcactgcaacctccgcctcctgggcttaagcgattctcatgcctcagcttctggagtagctgggattacaggcacccaccagcacgcccagctactttttgtatttttagtacagatggtgtttcactatattgtccaggctggtctcgaactcctggcctcaaatgatccacccacctcggcctccgaaagtgcgtgagccactgcgcccagccaccaacacttcttccaatcatctcaccacaatcctaatgctcattaaattggaaggacggagagaataaagttcatccccagccttctagaacagagttccaaattgctggcctagggccaaatgtaacccacagatatgctttgtctgcctcacactgttttagaagattttgagttcatgaccgactttttaaaattggaacatttaacataaaaatccatatgttcaagttttaccaaaaactcagaggatctggccacaagtggccccaggggactggagctgagaagtggccgcccccttggatgaaacgtgggctcagtttgctccagtccctacccagaggctgaattctttcgtattatcagccaggtccctttaggcactgggatcccccctcaaagcctaagtatcctcagagacactattgagtttccaatatttggccacagccactctcttctaatcatcagctccccatcatcttcagcagcccctaagaaagctctgtagagccaggaaagacagtttgaaaagtgcactttaatccactctcctcatttgacagataggcaaactgaggcctagagaggggaagggacattccatttattaggctgtatcctttctgacaggatgcttatatcaactcatctttggaaagccactggtgctgataatggcagaaaaaggcgaatagggaatcagtgctttcctccaccggctatttgctggttcctgggagctgtgagggcccaccctggtgagctatgccatgctcaggctcagagccagctaatcacttaggcatgtgccagcagaactgaactctggaggggagttgcccagcagaaaacaacctggggacagaggctctccccatgtcccagctcagtctgaagtcctcctccagccctgatgatgttgcaagaggttaacacacctgccattttgcatgaggaaaattatggcactcgtattgtgggcagagacacaattcagtcattccactgggttccaaattgatatgtgcccagtatgtgccagggatgtgaacactgctgggggttcactgccgggttttactgaatatgaacgagggctgtggtttcaggctgtcctgagttccagccctgactctgtaacttcctggctgtgtgaccttcagcaaccaccctagcctctctgtgcctcactttcttcatctgtaaatggggatgataggaataggacataattcctaggattatcttggggattcaatgagatcattttttggcacatactaagaaatgaacacagtagcattttttttcttgtttatttttctccactgcacttatcagaagctgatatttttatttgcatctttgcttaccatctgactgactaaatgactctccatagaaaaaagccttgtctgtcttgatcacccctgcttccctgtctagaacaatgcctggcacagagtgggtactccataaatatttgtctgctgaatgaattgctgtctttcatatttctaccctaaatgccattccgatgatgcaccctgccctggagtagcccaaagtcctgtggactccagcaagagccccccctgacctccatagccagatgttcacagcagcgctgggcaccaactccgaatgtcaccaactgggctcattgccttggcctgacaaatggcacttatgtgacttctggtggacagagctgtagcaggggaaagtgagttagtgcctgaggaaagtggatcgataggctgagttctgaaactcaagggccctgcaccagtagcgagggggcccaagtaaggggacatggagcccgcaccctgaggacattgctttggaagaggatgcctgggtggtgcaattacctcgtggcatactgagatggggattcgtgcatcctgcacgccttgggaaacaaaatgaatttctcggagagagggggctttgcaaaatgtaaagcgctgcaggaagcaacgtacatggaaaggtcaggaaagagagccgatctgtttgctgagtgtgggctgtacttccaaacccagccaaagtcgacgcgcagcccctggaggtggcacagtttgggggccccttggataggagtgccctcggggaggctgggaagccagagaggaatgggccaaagtttcttcgggtgtctgcagaacccaggaccgcccgcgcagcttgcatcttctcttcccgcccccggcctgcacgcgtgaaatctgcaaattccccttttaactgctgcacgcgctcgttcaactttgccctggctagaatcgggataaccgtcccgatgattacataactttccgagttcagggaagataaatccaagggacagaaatgataaaattttctttgagtatggattttttacccctaaagttacagaagtgcacaaaaaatatatatacaaatacccatatacccaccactcacaatgagttaactgttacattttgacttatctgaaagagggttttttctttttagttaccaaataaacctttctcttgtcccaagttccagtatatctgaatccaaaataagtcaaccttcttttctttattattcttttccatcctcaccccagatttatcttaaagggtaagttccaggacccccgaaatccctcggtgagctcccacctgtccaggtctgcaaacatctagactcaatgcacaagatccggcgatggccgcaaccggcggtgtgcacagctgcatttcctcccccagccccaactcccgcgtgcaactttgcaactctcgctcgggcccggcattgggggcgggcctatttactcggcccgtttggcggaaggatcccatgcggggacgcggttgcgctcagccatctgcgccccgcccagcgcccgggccccgccccctccagcgcccgggccccgccccctcccgcgccccctatggcccataaagaagtcccggccgggccgctgcactccccgcgcgcatccgtgcgccgcccgaggctgtctaaggagtcggcggccattttgttcttctcgtggttccagtggggagagaaggaggaagtagggagcggggtggcaggggggggacccgccgcggctgctgccaccgccgccaccaccgcctctgctcgtggcgtgggaaaggaggtgtgagtcccgggcgcgagccggcggcggcgccgctgcgggagggtcggcggtgggaaggcgatggcggatttagataaactcaacatcgacagcattatccaacggctgctggaaggtaaggggggcggcgggcggctgaagggggaggcgggcctgagggcggcaggcggccccgggggctcgagggaggggagttgggaggccggttgggcttgcagcaccgtggggagtgagctcctcgagttggcccacgggccggggactgcagccggagggaggccagcccgggattcccaacttgtcgccagctgcggaccctccaggctccgctcattcattgcacgaggatgcaggcttcctcccggccgtggaatttgaaaactccgctccccacccccacgtttcccgcccctacccgtttgcccccgcgcactggacgggtctttggagcgatggttggggatcccagtccagcctcctggacgacgtgtgccgtgctgtgcgagatggacttttcggtgctcgtcctctcggaaggcagtttgatgagggcatgagttccgccgggtttgggggctcttttcctgcttgcttttatttttatttttcgtggttctggggtcttggggggcccatttcttgttacttggtaacaagcgttcatgtctcaagaggtgtgagaacctgtcttcgcctgccctccaaatccttttaagttgttctaatcttggagaggtctccgcgctcttttcctgagcgtgcatctgaagaggaagccaacgaggctgacgctatcattatctttccaatgtgccaggctctgtcttaagcactttgcgtccatgaattattactgtaatcataactgacgcttctaaagcgcttactgtgtgtcaggcattctttgagcact

SEQ ID NO: 1748 - DNA, 6000 bp, Homo sapiens
gaggcagctggagctcaaaggagcatgttagaaggagtcccaagaggacaaatccatttggttcttctttccttgttttttttcgaatatttttgaggatgataatttttttcccctcaaaagcttttaatgaatgttaggattaaaaaagagagagagagaatttatagaagagaaattaactatagctcctaaaatagctctttgtttctgaaagccttgattctgctatctattttataactgaaacaaaaacaaaaacaaaaacaaaaaacaacctcaagaagttacttgtatagcctctgccactaaggagactgtgttctgatgttacctcaaacaggctgatttattaaaatatttaaaaatatatatggaaatatttttttctatttttttttttagtggcttttcccagtgaacaataggtcttactatatgatttcttatttgtcattagtgaatgtggtgggtatgtggcagctgggggagctgatgatttcataatactgtatcagaaatgattagtgtaggtacttattaacatatttctcagacagaacaatcttgacttttaaaacctcttcatttaattcaaacatcaagtaccctgtttgtggcctgtgttatgttaggtgctctctttacaagacctattttcttgctatttaattatatatttgcttagcaaatatttactctgcacctactaggtacctggcactgtgctgtgtactgaggtgccatgtgtacctccatcaacatagactcaagatcaatatgatttcagtgaactaaaaatacctttattgaagcaaaaaaaaatcacattttgtaaggatcaaaaaagagacattttatataaggtacaagaaatagaagaattatatccccaagatatatgtgataacatacttgttagtttttggacgtgaccagattttacacaatccttaaaaaatgcagcaaccagattttaaagtagttctctaatctctctttctgtgccccattagatgtatattggatcttctcattctgtctttgtcttttgacctctcatgttttccgtctctttgtctctgtgtgttgcattgtacacaaatgcttcttgaactgtggtgtgcacatgaatcacctggggaccttgttacaacgtaggttctgattccatgggtatggggcagggcctgagattcttagagaattaaattctaaccagctcctgagtggtggtgataatgccagtgtgtagaccatagcttaagtatcaaggttctatgtgattccctcagatctaactgctagttcactaagtttctcttcagctgtatctagtctgctatttaacatattcagtgaatttttaaccttaaattcaagaacaagactttttatttatggaagttcagtttggttcctttcaaatgtacctggttctttttcaaagtgtcatgttctttgataagaatttctactaatttaccttgataataaaaatttgtttcatggctcattttagattgttcttttatctgcagtttttggagggctaattctcccatttcttgtatctgttgttgcacccgtaaggtgtagttgttgatttttactttttaattgtgaatttatttctggtagggattggaaggaggttgttggggtgggggtggggtggggagaaaatcctgtgtgccctgggttgcaaaaacacccctacaagttgttctccacttgcatctgccagtgctccaagggctcagtgatcctggaccagtagtcatgttaatttcttgaattgtaacaggatactgtaaatgtggacactctacctgaggttactgcttctttctatctgctttatttccttcccactgaagggccctggacaagggtaaacatctcatcactttctgggtggcagaatatttccagttcccccacttctttttggcttaaggctgtggctttttcctctgcctgaatgtggccctaagaagcccttcttttcaaactttcctgttgtacttgaccgactagctgtctagaggtttatatccctagcttttaatctttgctgtgaatatcttacctgttaccagctagtatatttcacattgacttctctttccttttttttttttttttttttttttgagatggtgtttcgctcttgttccccaggctggagtgcagtggcacgatcttggctcactgcaacctccacctcccaggttcaagcgattctcttgcctcagcctcccaagtagctgggactacaggcatgcaccatcacatctggctaatttttttgtatttttaatagagatggggttttaccatgttggccaggctggccttgaactcctgacctcaggtgatccacctgcctcgccctcccaaggtgctgggattacaggcatgagccactgtgcctggcctacttcttcttccttttaacttgaagattatctgcccctttttctaatcttaaccgcattaagctggctttgagcatggcaagagttttatagatgaatcttattttatagtacaggatttcaaaatcataattatttcactgagggtggcttttactctccattaattatacttctcactcagaaatggaattctattttggtctcctaaagataaattagtatatagtggaaaggaattataaagttctgctaggaattaaatgatatgattaacacaaacatccacatggatgtgtctctgccctgtgcaggaaagatgaacattcagtacagattctgctctatgtcactagctttcaagacctgcaggttctctcctaagcatgcaattcctgtgagcagtagcaataatagcaggtcatatttgtggagtgattactgtatgctaagaactgtggtaaacacttttatatggattattttatttaaacctcctaatagtccattgaaatagatattgccatgttgaaaactgaggttcagagaggttaagtgacttacccagtgtcacagaactagtaagtggtggagctgggatttgaactgagattccagaacaattgccattaaccactttgcttccatattagtatcatctgcaaatctctctccataaatttcctcagtctttatctgagtttccttatttcaggaaggaaaacttctgtttttgatccttatgaaatacaatttccattaaaacttttttttttgctattaaaaaaggtaccggataattgaaaccagattggatttgagcctgtgttgatggaagtacacatgggatgtgggctgaagtgttcaatctaatttttctttccatcagctaatttttaaagtattaagcaagtagattctgacactaacagggaagatttaaattctcttgagagactggaggtgttaaataattttctggtagtgcacattttacatcttaaatcttcctcactctcccacctcatctcaatgtacctgaagctctgggaatgttcttttgtacttctcaggaacagccagacctctggcttcatctcctctcccctccacatccctttcctgctccaattacttcccagcgccacttggatgttgttgtcatcggggaactttggaaacagccagatttttttggagtctgtaagcagaaaacagactgcttgctgctcatatctggcacccagctttgtccagaaaacgaggagttaaaaagaagtctgggctgtgaagggctgtgacaactgtcctagggggagctctagcgagccctggcgggcagtgactcatgctgctctgtcactgggatcagcactggcccctggcaggcaggcggcagccaggtggggttccagccagagcacgcacgcacggagccgggagcatgcagcctgcactgcgggggatgtgatgctcggctctaactcgcctggctggcccgccacggacgcctcagcttgcaaccatggtaacgtttctggcgggggacacccccgggagcccaccgcgatgggcagcctcctggtgactgatggacgagtgtccacctcccagaccgagagcgcttagtaggtcggaggaagtggagaggatgtaacacgcccccagccgggagtgaagccctgaggaggtaggagccgcatatgtccatccgtgcattcccaccgtcagcgcgcaggggtgctgtagatcaccggtaggaactttatttggctggtgcttcattatgctgattaaactgcagtggatttgatgggcatgattgcgctggggaagatgcataatgaactaaaaaaaaaaaaaagtggttaataagatctcggagtcgacttgtccgggtatgaatgaagtagactgcagtggtatcctaacaggagttccagaacctcacacatcccttttcctggtccttcctcttatcccggttaatccacgaaatgtagaagttccatcttatttcaacgattagtgctaatcattaataatttagacctgtctggaggagggaatccataggtttaggtctcctagcatcctggcactagccagcagctgctctgtaggagccttctggaaacagcaggaaggagcggcttccccacgagttccccaagtgctttcgttggcccaagtgctttcgttggcccaagtgacctgtttgagtttgctcttcagtttaccccaggcgggaaggcagcctgtctgcgggttggtggccatgttggcagagaaggggttaatctcttgttgctgtaggagccgaggttgcgagctagattgaaagcaggcgctgcagtgccatcgccagcgccgaaggagtaagacgatcttctccgcaacagtgttgaatccggctgaaattttttttcctccccgcctcctttcttgtttttctttaaccagctcctccccccttcgttcccaccctcaagtctgacgatgacacctccaattttgatgaaccagagaagaattcgtgggtttcatcctctccgtgccagctgagcccctcaggcttctcgggtgaagaactgccgtttgtggggttttcgtacagcaaggcactggggattcttggtagatctgagtaagtgaaaatttgactttctaaagggacctgcattgatgcaaggcttttggagccaaaggtggtggtgggggggtgggggaataggtggggggagtgcagtggagggaagctgctagtcacctgcattgggaaagcagtctacctgttagggctttgcgggggtagcctgttaatattctcattttgcagtgtgtaaggtacctgttcctgtctgtggtatgataattgtcaattgggtactttgggttagttttccaatctttggtcttctttaaaggggagagagtgggagatttccagcagtgcagatccccggtcaaaggagaaatgtgcaggagttaagatgagctgcccatctatctaaccatctatgtatctgtctctcaagtgggtggatgggggttgctatcttggctgtataaagaatcctaaaaaccttgtctcataagctagaggtttcctgatgggtttaactgagctgcaagtggctgaaccagagctctaacagagagatggtgctcggctcctctccaagtatgctgcaagatcagggatctggcagctgagcctctctgagctggtggagcgctggcagccagagaaagccccgttactgtgagccaccaggagggagtgtgatgtagccgagtcattgattcacagaaactgggcttcatagggggaaaaaaaaccaggagactagaaaatggaaatataaatatcactgtaaacctcttgatctggtaggtctttctccattctcataaaagctattgaaaaatgcattaacagagcacttggaattagagggtcgaggcttccaggagcctcctggaatttctgtaaaatgcagtagcttctgtggatgtgggaggtcagtatcttgcctcattctctcatgatacaatg

SEQ ID NO: 1749 - DNA, 6000 bp, Homo sapiens
cttccacccatcactattgagatgattgtatccgtctcagtactgacactaacccagcactctggttttacatctgtcaatccatcaagacttcactttcactttcttccctgcctcattattcactatgctcttgggccattgctctggcttctggggcttttctaaagtagcacttttccccactccagcccatgaagataccttttaaccagctcttgagattaaatcccctccgtgacactttcctgcaggaacttgcaaaaaagtactgcattccccactggcaaaacttgccatcagccagtttatgtattctctgcttttcacacccatatcttgacctctgaacaacacacatattctcctcttcatttatttcacagttctgtcttcataacattgataagtatgatcacattagcgctctagattttaagcaactggaagatagctatttttttggtactcttcctttaaatttgaacatagtgtctaattagtcaattaacatttttttaaaagggcgagggacatcatggtagagagaacgaagttgaacgtgtttttggttgaatattagcgcatgcccactgtattctaggcacagtcctgattcattatatcatcacacaataattatttatgtgccttcatcctttatgacacagtgctggctcttattcatctcccatttctgcaatccatggtgatgattaaaagtcttaggagttttacgaggctcagtattttttttttttaatatgctagttcttcatgaatacattgggtactctgaagcatatcatttcctgggtttcctgaagtggtatgttgcgtggaatggcacattaggtctaaataattatcccctatgtaaggttcttgtttttcattcattctcttaaaaaatagatattaaacattaaataaggacagccaggtattgtttgaggtgttagtgggctatgctaaaaaatcaaaggtgggaatgaggcagctggagctcaaaggagcatgttagaaggagtcccaagaggacaaatccatttggttcttctttccttgttttttttcgaatatttttgaggatgataatttttttcccctcaaaagcttttaatgaatgttaggattaaaaaagagagagagagaatttatagaagagaaattaactatagctcctaaaatagctctttgtttctgaaagccttgattctgctatctattttataactgaaacaaaaacaaaaacaaaaacaaaaaacaacctcaagaagttacttgtatagcctctgccactaaggagactgtgttctgatgttacctcaaacaggctgatttattaaaatatttaaaaatatatatggaaatatttttttctatttttttttttagtggcttttcccagtgaacaataggtcttactatatgatttcttatttgtcattagtgaatgtggtgggtatgtggcagctgggggagctgatgatttcataatactgtatcagaaatgattagtgtaggtacttattaacatatttctcagacagaacaatcttgacttttaaaacctcttcatttaattcaaacatcaagtaccctgtttgtggcctgtgttatgttaggtgctctctttacaagacctattttcttgctatttaattatatatttgcttagcaaatatttactctgcacctactaggtacctggcactgtgctgtgtactgaggtgccatgtgtacctccatcaacatagactcaagatcaatatgatttcagtgaactaaaaatacctttattgaagcaaaaaaaaatcacattttgtaaggatcaaaaaagagacattttatataaggtacaagaaatagaagaattatatccccaagatatatgtgataacatacttgttagtttttggacgtgaccagattttacacaatccttaaaaaatgcagcaaccagattttaaagtagttctctaatctctctttctgtgccccattagatgtatattggatcttctcattctgtctttgtcttttgacctctcatgttttccgtctctttgtctctgtgtgttgcattgtacacaaatgcttcttgaactgtggtgtgcacatgaatcacctggggaccttgttacaacgtaggttctgattccatgggtatggggcagggcctgagattcttagagaattaaattctaaccagctcctgagtggtggtgataatgccagtgtgtagaccatagcttaagtatcaaggttctatgtgattccctcagatctaactgctagttcactaagtttctcttcagctgtatctagtctgctatttaacatattcagtgaatttttaaccttaaattcaagaacaagactttttatttatggaagttcagtttggttcctttcaaatgtacctggttctttttcaaagtgtcatgttctttgataagaatttctactaatttaccttgataataaaaatttgtttcatggctcattttagattgttcttttatctgcagtttttggagggctaattctcccatttcttgtatctgttgttgcacccgtaaggtgtagttgttgatttttactttttaattgtgaatttatttctggtagggattggaaggaggttgttggggtgggggtggggtggggagaaaatcctgtgtgccctgggttgcaaaaacacccctacaagttgttctccacttgcatctgccagtgctccaagggctcagtgatcctggaccagtagtcatgttaatttcttgaattgtaacaggatactgtaaatgtggacactctacctgaggttactgcttctttctatctgctttatttccttcccactgaagggccctggacaagggtaaacatctcatcactttctgggtggcagaatatttccagttcccccacttctttttggcttaaggctgtggctttttcctctgcctgaatgtggccctaagaagcccttcttttcaaactttcctgttgtacttgaccgactagctgtctagaggtttatatccctagcttttaatctttgctgtgaatatcttacctgttaccagctagtatatttcacattgacttctctttccttttttttttttttttttttttttgagatggtgtttcgctcttgttccccaggctggagtgcagtggcacgatcttggctcactgcaacctccacctcccaggttcaagcgattctcttgcctcagcctcccaagtagctgggactacaggcatgcaccatcacatctggctaatttttttgtatttttaatagagatggggttttaccatgttggccaggctggccttgaactcctgacctcaggtgatccacctgcctcgccctcccaaggtgctgggattacaggcatgagccactgtgcctggcctacttcttcttccttttaacttgaagattatctgcccctttttctaatcttaaccgcattaagctggctttgagcatggcaagagttttatagatgaatcttattttatagtacaggatttcaaaatcataattatttcactgagggtggcttttactctccattaattatacttctcactcagaaatggaattctattttggtctcctaaagataaattagtatatagtggaaaggaattataaagttctgctaggaattaaatgatatgattaacacaaacatccacatggatgtgtctctgccctgtgcaggaaagatgaacattcagtacagattctgctctatgtcactagctttcaagacctgcaggttctctcctaagcatgcaattcctgtgagcagtagcaataatagcaggtcatatttgtggagtgattactgtatgctaagaactgtggtaaacacttttatatggattattttatttaaacctcctaatagtccattgaaatagatattgccatgttgaaaactgaggttcagagaggttaagtgacttacccagtgtcacagaactagtaagtggtggagctgggatttgaactgagattccagaacaattgccattaaccactttgcttccatattagtatcatctgcaaatctctctccataaatttcctcagtctttatctgagtttccttatttcaggaaggaaaacttctgtttttgatccttatgaaatacaatttccattaaaacttttttttttgctattaaaaaaggtaccggataattgaaaccagattggatttgagcctgtgttgatggaagtacacatgggatgtgggctgaagtgttcaatctaatttttctttccatcagctaatttttaaagtattaagcaagtagattctgacactaacagggaagatttaaattctcttgagagactggaggtgttaaataattttctggtagtgcacattttacatcttaaatcttcctcactctcccacctcatctcaatgtacctgaagctctgggaatgttcttttgtacttctcaggaacagccagacctctggcttcatctcctctcccctccacatccctttcctgctccaattacttcccagcgccacttggatgttgttgtcatcggggaactttggaaacagccagatttttttggagtctgtaagcagaaaacagactgcttgctgctcatatctggcacccagctttgtccagaaaacgaggagttaaaaagaagtctgggctgtgaagggctgtgacaactgtcctagggggagctctagcgagccctggcgggcagtgactcatgctgctctgtcactgggatcagcactggcccctggcaggcaggcggcagccaggtggggttccagccagagcacgcacgcacggagccgggagcatgcagcctgcactgcgggggatgtgatgctcggctctaactcgcctggctggcccgccacggacgcctcagcttgcaaccatggtaacgtttctggcgggggacacccccgggagcccaccgcgatgggcagcctcctggtgactgatggacgagtgtccacctcccagaccgagagcgcttagtaggtcggaggaagtggagaggatgtaacacgcccccagccgggagtgaagccctgaggaggtaggagccgcatatgtccatccgtgcattcccaccgtcagcgcgcaggggtgctgtagatcaccggtaggaactttatttggctggtgcttcattatgctgattaaactgcagtggatttgatgggcatgattgcgctggggaagatgcataatgaactaaaaaaaaaaaaaagtggttaataagatctcggagtcgacttgtccgggtatgaatgaagtagactgcagtggtatcctaacaggagttccagaacctcacacatcccttttcctggtccttcctcttatcccggttaatccacgaaatgtagaagttccatcttatttcaacgattagtgctaatcattaataatttagacctgtctggaggagggaatccataggtttaggtctcctagcatcctggcactagccagcagctgctctgtaggagccttctggaaacagcaggaaggagcggcttccccacgagttccccaagtgctttcgttggcccaagtgctttcgttggcccaagtgacctgtttgagtttgctcttcagtttaccccaggcgggaaggcagcctgtctgcgggttggtggccatgttggcagagaaggggttaatctcttgttgctgtaggagccgaggttgcgagctagattgaaagcaggcgctgcagtgccatcgccagcgccgaaggagtaagacgatcttctccgcaacagtgttgaatccggctgaaattttttttcctccccgcctcctttcttgtttttctttaaccagctcctccccccttcgttcccaccctcaagtctgacgatgacacctccaattttgatgaaccagagaagaattcgtgggtttcatcctctccgtgccagctgag

SEQ ID NO: 1750 - DNA, 6000 bp, Homo sapiens
tgagttgctggctttagattttacaaagcatttcacatctcttagcttttaaatctccctatagctaggcaaaaatttaggctcagaggttaaatgatgtgtgcagaatcagaagtttgttcatatgtgaattcaataaacttttattgagagcctacaaagttgactgttgctaggctagaaagatcaagtgtctagaatttgatttccatttcagttaattttttaattttttaattttattttttgagacagagtctcactgtgtcacccaggctggagtgcaatggtgagatcttggctcactgcaacctccgcatcctgggttcaaatgattctcctgcctcagcctcctgagtagctgggattataggcatgtgccactctgcctggccgatttttttgtatttttagtagagatggtgtttcaccatgttggccaggttgatcttgaactcctgaccaacttcaggtgatccttatgccttggcctcccaaagtgccaggattacaggcatgagccaccatgcccggcctccatttcagtttaaaacctcaaatggaacaccattggaatgagagaaagtgaggggaaagaagagaaaaggacagaagaaagtggagaggaaatcaagttgtatgtcctttgcttgtgtatagtgcttgggaatctcttccttttgtatacccatcttcacttaaggctccaaatatgaaaacacgaaacacttattttagaattcagtccttacttaagccgagtataacccatactccccagtctccttctgttaaattacttagccatcaccctctttggtttcaccatagtagatcacagagcaaggactggaaggcccattctgaggtatccactttgcatctgagccagtgtgagagtgggtcctctccatagggacggactcttgttaacaaagattgataataaagccacattgtcagtttattaacttacaatgaaaaatacactttgacatttggttagtagtatatttgccctttctaggcaagtggttcatgacattggctgcacattggggtcacttggtgtattagtctgttttcacactgctgataaggacatacctgagactgggcatttacaaaaggaagaggtttaatggacttgcagttccacatggctggggaagcctcacaatcatggcagagggcaaggaggagcaactcacatcttatgtggatggtggcagacaagagaagagggcttgtgcagagaatctcccccttataaaaccatcagatctcataagacttattctctatcatgagaacaccacaggaaagacctgccaccatgattcaattacctcccaccaggtccctcccacaacacgtgggaattcaagatgagatttgggtggggccacagccaaaccatatcacttggggagcttgatcaacttccaattcctaggcttgatcctggaacagtgaaatgaggatctccaaggatggggcccaggtatcaatgttattttaaagcttcccaggtgatctcagtgtgaatgcaaggttgtgaaccactgcttctggaatacctgcaccatgagaaggtataataaatggtgtgtgtagaatcagaaggcaattcatttgtaaattcagtacacttctattgagagcctgcaaagttgattgttggtaggctggaaagaagtaattaaattgtaatcaaatgcacatggagttagatttcatcatttagtccacaaatatttataaatattatgtgctaggtgctgggataaacataagtcaatacagtttggtggttatcaaaatgggctttagaatgaaagaaccaactgatgtcctggctccactgtttactagtatgtgacttaatttctctaagcttgaatttctctgctggtaaaatggggttgctaacaataatgcctacttcagaggcttgcttaagaattatgtcaaatgatgcagtgtttcccaaatttcaagatttgttctaaagctatacccatgtacaacctgtactactgtttacttaatatttcctttactggctcattttttcttcttaaatatttcctttggtctcactccaagtggtatcatctataaaatacttggttggatgggctagctatagtttttctaacatatagtaaaatatataatttaacaaataagtgactttttttgccacttgaaagtgttgctcataccagttgtggggacacatctttgggaaacagggaatatctgggatatttgcctctgagccagcgtgagagtggctcctttccataggggtggatgctaataatagtgcctacttcaggggctattgaaggcttgcacctagaaacctagaaagcactcagccaatgataattattcttttttttttttaccgagtctcactgtctcacccaggctggagtgcagtggcaagtgagatctcagctcactgcaacctccgcctcccaggttcgagtgattctcctgctttaccctcctgagtagctgggattacaggcacctgccacctcgccaggctaatttgtatttttagtagagatggggttttaccacattggccagtctggtctcaaatttctgacctcaagtgatccaccaatcttggcctcccaaagtgttgggattacaggcatgagccattgggtctggccagttattttctttatatagaagtttctgggctgggcgcagttgctcacacctgtaatcccagcactttgggaggtcggggcaggatgattgcttgagtacaggaatttgagatcagcttgggtagcatagggagaccccatctctacaaaaaaaaaaacccaaaaaaacaaaaaaacagccaggcatggtggtacattcttgtggtcccagctactggaagggctgaggtgggatgatcacttgagcctggagaggtggaagctgcagtaagccgtgattgtgccactgaactccagcttgggtgacggagtgagattctgtctaagaaaaaagaaaaaaaaagaggtgcttgataaatagtagctatccattattggccccgggaacaagaagtaagttatgtttggggaaggaaaaaagaacaaatgtgtattaagcaagcctgtagctctaattatgtgctggtgtgcgtgtgtgtgtgtgtgtgtgtgagagagagaacacatctccagttctgtctactgtagaattaggagagtacaaaaaggactttacatatataaatagaacatacacacacacacatgcgtgcacacatatacacacaatttaatcattatgaaaccacatccatattgttgctacctaggttaagaaatagatcacagcagcaccccaacaccctgaaaggcctccatcccaaccccaggtaactactattctggctgttgctttctttatggttttgtcattactttaaacaatgacaaaaactgcaatgatttgcatcaacctaatacatccctccttaaacaatgttgctttgttttgtcctgttttggaacttataagaatggaatcataatggaatcatatgttattttcttgcttccttcattaggccttgttttgagactcattatgtcattgtggttagttgcagtttattctttttcattgcttgtgaaaacactgcaatatacaattttgtcttttctactgctgatggacatttatatcacttccagttttttgcgaacactattttgtattcttatacacatctcttggtgtacataagtaggagtttctcgccggcgtggtggctcagggcctgtaatctcagcactttgggaggccgaggtgggcagatcactcgaggtcaggagttcaagaccagcctggacaacacggtgaaaccccatctctactaaaaatacaaacaattgggcatggtggcatgcacctgtaatcccagttacttgggaggatgagacaagagaatagcttgaacctgggaggtggaggttgcagtgaggcgagatcgtgccattgcactccagcctgggagacagagcaagactccatctcaaaataaataaataaataggagtttttcttaggtagagaaactacacctagcaatagtcatagaatgcacaaatcttcaatgttagcaaataatgccaaacttttttttcaaatttcaaagagattgtatccatttacacgcctacgggtactgtataagtgtgtgtacttccacatcttcgcaaacactgtcacatccttttgttgttgttgttctcgaatttgagtgttattctttctcactgtgactttatttttcatattttctgattatgaacgaggttgacaactttcacacatttgttggtcatctggatttcctttttggtgaagtgcctgtttaagtatctcgtctataatttattttaaagtgtcctttcagacagtctcaatgactgtcaccaactccttgcagggcagtcagcccggagatagagtaatcaaggtaggttgaagtcaagctcaaaacattcgctgcctcagctgtagcagaggaccactgggcttccccaggtaacaagtacttctaccttagccacatgagagagaaagaagaccaggcagagcagcctggctgccttcctccttgcaggtggccgagagcaggggacagcgccctggcgacctcctcagggatcctagattaacagtcgcgtcctcaaacgcagcatcctgcgtaaccgccaatttcaaacttccaagacctgccctgctgattttgcccttccctttttcccgttggtcgcgagtcaaaggaagatgcaatttgattggctctccccttcactttcctccatgcctttagggacatgggcggggcctggctgagacgcccatgtctatcataggagcggagacgctgattggtccaaacacggctgagacccgcccgcgccgttcctcgggttcaaacgcggcggcgggaggcgcggggcggaacagatcgcagacctgggggttcgcagagcgtgagtctgatcccccagacccaattctaccgcacccggctctgcaaggccaggggagggccgcctccacccatacaagtcccgggtttccctcccgccccggggagggcggcgattccacccccagggctgcgggaggcctggagggtcttccggggctagctgtgcgcgcgcccaccttccttgggagccgaggggtcagccgagtggtgctggggcaggaggcttgctcctcccctaaaccaggcggagtgctttgtctcttcagctctgcctcctgtcagcactaactgcattattctgcccagtgtagtcggccggttccttattatctgcgtgaacttagccatttacttaacctctctgtttcagcgtattcataccccgtgcccaccccatcacctcatgatgcccccgcctctttcgctctgctccagtccgtctggcctcgctgttgctggagaggccaggtcctgcctcagtgcttttggcttggctgtttcgtttgccacggatgtctttctttccccagatatcaacatggcttgctggtcattcgcttcaggtcttcaagtcttgggtcaaatggtggcttctcagtgaagtcttatttgaccacactaaaaattgcaccatctcacccccattgtccttttcttgctcgattttgtttttaccccatagcacttaacaccttacaacaagctatatattttgcttatttcagtcattcatttaataactattcgcacctatttgtgtgccaggctatgtgtgcccccactgcatgggggcaaacatctctgcccttgtggagcttccattctaaggggggagataataaacacatttataagtaagagagtatgtcagataagtgtatcatctcctgtcacagtgagttaaaatctggtgtttaatctccatgattagactgagcttcctaaaactggagtggtagctg

SEQ ID NO: 1751 - DNA, 6000 bp, Homo sapiens
gctgaaaaactcttttcctttctcttcttttgtcagtgtttatttttaaagttctaataattccattccttaatggattttttactcggaaaattttcttaaatagtatttggattttccatctgactttgggtgcagaaatatatctattttgcttcctagtaactgagatctgcctgttagggaagtttcagtgattaaaaaaaaaatgaaaataattaacttagtaaactagtaagtctcagtgtgttttaacttgtacattaataaaacttaattttataatttgtatatgaattcaggttttaggatctttaattctgaacactcagttttcctcaatatttgaactaggtaaggcccagtattctcatctatcactcatgtaaccagtggcatagtggagtatatttgagataaaactgacacaaatactaatggaactcccatttttaatttgtggactccctctagggggaatgtgtcttgaagctgttttattctgcctctagggagaagattaagctaaactatgaccatcttattagaagggtatgggatacactagtgtttgtagacagtggaactctctgcagttgtcttacaccagagatatttacagcgtttaaaatacattgattatttcttgttttagcattatctcagctacttaaacaacctccgtgtccaagatgttttcagttcaacacacagtctcctccattattttgatcgtctgattcttaccggagccgaaagcaaaagtaatggggaagagggctatggccggagcttgagatacgccgctctgaatcttgccgccctgcactgccgcttcggtcactagtaagtttatagacctttgtccttgcgcaaattgaaggaaccgatgacaataaaaagtctgctgtttggcctggtgcggtggctcacgcctatagtcccagcactttgggaggccaaggcgggtggatcacgtgaggtcaggagttcaagaccagcctggccaaaatggtgaaaccccatctctactaaaaatacaaaaattagccaggtgtggtggcaggcacctgtagtcccagctactcaggagactgaggcaggagaatcgcttgaacccgggaggtggaggttgcagtgagccgagagcacgccattgcactccagcctgggcaacaagagtgaaactccgtctcaaaaaaaaagaaaaaataaataaagatttgctattttgggagaaaagaaaagggaaaagaaatggaagaaatgaattctcaaatgttaattgtgatgcatttttaaaaaatgtattttttaaaaagaagataggaaagcagctcatcaacctggactagtcagtaacttccatagagggaaccttattggcactggaacagtttatgaaaaccttctgcctaaatagtctgccccctagtgtcactatgtaacattgccgtcttagtgcctagcctctttcattacttctaagaacaacaggccgttcagtgaaaaagaaattaggtcattaggccagagagtccctaaaggattttttggaggtaaaaatggggatgcagaagctatttttagtatttcaaaaagccagaaggcagttgtacctttactggatgaaagactacataggcttactgaaagtcaggtttgctttcaggtagaattcaggctgctcagtcaggtgacactggtttatactgttgcctcagtgtgcctctgtttttaatgaatagaaataggaaaatcgatcaattatgttttagtaaatagaattaagtagataaaacaactttcaaaacatggaggctatcttggaaataatgaaataatgtaaataatggtgaaaggtgggaaattactaattcaaagatcccttcacccccccacctgccctgtggctttttaccagttgagagaagtgtggtctttgctacaggcatccttctatacagactatagcgtgtattaatgggagcatagtgttcacagttcaataatggagacatctatccctttctctgtgtcaggcagcacctagggaattctttttatctctggttgtcaggtttttgtttttgtttttaagagacaaggtctcactcagtcacccaggctggagtgcagtagtatgatcatagctaactgtaacctcaaactcatgggctcaagcaagcagtccatctcagcctcctagctgtgactacaggcatgcaccacaatgcccagctaatttttttaaaaattattttttgtagaggtaggatcttgctttgttacccaggctggtttcaaactcctggcttccagcaatcctcccaccttggccttccaaagtgctgggattacaagcatgagccactgggccaacccagttgtgaggctttaaaagggatgtagacaagctgaagcttgtgtggggagggaacagtctcagggtgttgagacattcaaagccatatcatataagtaatgtgggagggatgtgagacatgtttagcctggaaaaaaatgacttatccaagcatgtgtttgacatcttcatgtagtgaaaagtcatgtgaaaagagcttagattgattgagggtatggctacgggagaagattgagagctggtaagtaagtgtaggttaaaggacaaaatatttctgctcattataaggaaacagtttccccttattgaaccctctgaggaaggtgtcagtgaggtgctgaggcctagaccaaagatgttattaagggtattcaaacatcagattgatagttgtacccaaaaatatttaaggctcctcaaaactccatgatttttgcaacattccatgatatcttgtaataactaacttcttttggtcttcccacatttaataacctctcgatcagagcctttctttttttatgtactcaaaaataatagaaatgccatttttaatatttaccaataacctatttaacttagtaaggaactgcttcccctgggggttagaaatttgtacacagccttctggatacaaataatctttatttaattaattaatttatttgttttttgagatggagtcttgctctgttgcccaggctggagtgcagtggctcgatctcgactcactgccatctcgccacctgggttcaggtaaaaaattctcctgtctcagcttcccgagtagctgggactacaggtgcatgccaccatgcccaactaatttttgtatttttagtagagatgggatttcaccatatcggtcaggatggtctcgaactcctgacctcaggtgatccacctgcctcggcctcccaaagtgctgggattacaggcgtgagccactgcgcccggccacaaataatattttgatgaacagaatttcttctttttatttttaaaaatatagagacaaggttttgctatgttgcccaggttgttcttgaacgcctggtctcaagtgatcctcccaccttggcctcccaaagtgctgggattataggcataagctactgcacccatctcagaatttgtctatgtttacaatattatcaatgggtagacagctaattgcacagaatataaatgaggagaggtagatttttattaatgtgtacattttccttaattcctgatttactcaggcccaggcttctttgtttctggtcttggatctatgggcctgtgtaaatctttgtcacttagctaaaaggatttcttgaaaatccttgtagttgtttattgagcatttactgtgtactaggcactattgtaggtactagggatacagcagtgaaaaagaaaaaaaaaaacttgttatagagcttatatcaggggaaatagggaataaacaacgctaagcatagttgtaatatctcagatagtgatagaccaggataagaggttagaaagtgaaggtgaagtgctcttgttttcctgagtaacactcttactccagatacatatacaggtcactcaactccttcaatttgtaaatctctggttaaatagaaaggtagcagatcagccctccttgatctctgccaacttaatatttgaacagagatttaaaggaaaaaatattacagaagtgggaatcctcaaaatactttctaaaactagctttgggctgggcaccatagctcatgcctataatcccagcactttgggaggccaaagaaggaggatcgcttgaggccaggagttggagaccagcctggggaacacagtgagactttatctccttaaaaaaattagctgggcatggtggtatgagcctgtagtcccagttacttgggaggctgaggcaggaggatcgcctgaggccagaagtttaccagcctggggaacatagtgagactctatatctatttttaaaaaaattagccgaccaagcatggtggtgagtgccttagtcccagctactcaggaggctgaggtccatcgcctgagtccaggaattcaaggctgcagtgagctaggattgtgccactgtactccaacctgggtgacagagggagaccctgtctctaaaaaacaaacaaacaaacataaaagtgattttgaaaaaatgataaaagtaacaaatgcacatagtaagaaaaaaggtcaaataatgtaggagagaatgccatgaaaagtaaaatattatatcctctccttgcccttcccctcagcagtggacctttaaaataaacatcttagaagcggagataaaagcctttgctttatgcccttttcgtagcaattccccttagaagagacatgtcctatatttccactgtcagtgttttctgctgctagggttggggcacgcctctgagagaataagcccagaaatagttacagcttccaacccagagacctgcatttggatgactgtgtacagatgacttcctgctatggttgcttatgcatgtttgtgattattaatgggatattaatgtttagtctgtcattagtcaacaggcagagctcgccctgcaggaggcaattaggattgcccaggagtccaacgatcacgtgtgtctccagcactgtttggtgaggccatcctctggtcttgggagttttgttcacgggttgaattggccttcacaaggccccgttgaattgggttgttttgcagttggagcagagatcttcagcagcaaaaggaaacaagttaggtggtcatgggaattcagaaagggcaacttatctttacttacctttcttaattcatgacatctgttttgcttttggcatatatctgctctacaaagtttaatgcaacttgccatgaaagaagagaaacctttatcacatttagcactggcattaacaaaagatgtatactacacttagtaactgggtgagatgttgtcctgtaatagcaaaatcaccagggcagtggaacacagaagctacttgacaagcacctgagaatcttatttctcaattgaaggccatatgggagcttcatgctttttttctgaaacacctgccactcagtggctgtcaggtgaagcagaacaatgactcatttatttcagcctggttttaatgatgttgatatgtttgacaggtctcattgagattcttgatatttcttgaaagagtatttgagaggattcattttgtcccttttaaattctttcttatgaccacattgatatttcactagaacatcagccattgccactgttatgatatattttgatgatttctcttgccagagctggctttatgtgctggggcagaagagatccgatagctatgttctgctggagcattctgtgaagaaggcagtacattttgggttaccggtaaggctcatctttctgtgagattgtttccataaatggtcgagcctttgtctctttttctgcccacctctgtcattaaccagcgatagatttagaatgggtttcaaagtgtggttttattcttggcagtttcatatgactttaattattaatcagaccactaaattctgtgtggtaggtttctctctgttccctgtatcctaa

SEQ ID NO: 1752 - DNA, 6000 bp, Homo sapiens
gattgcgctactgcactctggcctgggtgacaaagtgagactccgtctcaaaaaaaaaaaaaaaaatttacggaattacctctgcagatgaatttcaaacagattagaaaaacctgtctatgtgattggttaactgtaaggaaaaagtacagctggatccttccttaccttaccttgtacctcagtatattacagatggattacagggttaaatgtaaatatttacagctttagttagataattaggctagaatgagctacacattgttggttttttttttttttttgagatggagttttgcttttgttgcccaggctggagtgcggtggtgatctcagctcactgcaacctctgcctcccgggttcaagcgattctcctgcctcagcctcctaagtagctgggattagaggtgcctgccaccacagctgcctaattttttgtgtttttagtagagacgggattttgccatgttgggcaggctggtctcaaacacctgacctcaggtgatctgcccacctcggcgtcccaaagtgctgggattacaggcgtgagccactgcgcctggccagagctttctaacataaaagctatggaatacttcagaggctgaggcaggagaatcgcttgaacctggggagtggaggttacagtgagccgagatcacaccactgcactccagcctgggccacaagaacgacactccatctgggaaaaaaaaaaaaaaaaaaaaaaactggaagaaaacatgtaggagaagataatttgattttcagaataaaaattgaaagcatctccatgtcaggacttgttttaacataattaacaggcaaacaggatgggcgtggcagctcatgcctgtaatcccagcaatctggaaggccaaggcgggtggatcatttgaggtcaggagttcgagaccagcctgaccaacatggtgaaaccccgtctctattaaaacacaaaaactagctgatgtggtggcatgtgcctgtcgtcccagctacttgggaggctgaagcagaagaatcgcttgaacccatgaggcggagtttgcagtgagccaagatttcgccactgtacttcagcttgtgcgacagagcgagactccttctcaaaaagaaataaaattaaaaaattaaaaggcaaataacaaaggtgttcttgggctccaatactttgggaaaaagtatttacaataaatatgacagtgaaagtttagattttggttttggtttagaaatcacattttcaggccgggcacagtggctcatgcctataatcccagcactttgggaggcagaggcaggtggatcacctgaggtcaggagtttgagaccaccctggccaacatggagaagcactgtctctactgaaaatacaaaaaattagccagatgtgatggtggatgcttgtaatcccagctacttgggattcaagaagaatcacttgaacctgagaggtggaggttgcagtgagccaagattgtgccactgcactccagccttggcgacagagcaagactctgtctcaaaaaaaaaaaaaaaaaagaaaaaaaagtcatatttgatgatgagacaaagtttacaatataaaatgaaaagaacaggaaataaagttacatatcatattctgattttgttaaaaatataatgtgtatatacacattatataaatttggaatacaccctgtattataaacatatattgtgattttgttaaaaatgtaatgtatacacaatatatgtttacaatacagggtatattgtaaatttatataatatgtatacacatatttttaacaaaatcagaatatgatatgtaacatatatacacacatacagaacaaagactaggataatatacactaaagtattaatagcgttatttctgggtagtgagattgcagaagatttttgttttcttctgtaggttttctatatttttggaataatttttccccatactacacctacataataatttgttttttgttttgttttgttttgtttttttgagactgagtcttgccctgtcacccaggctggagtgcagtggcgtgatttcggctcactgtaatctctgcctcccgagttcaagtgattctcctgcctcagcctcccgagtagctaggattacaggtgtgcgccaccacacccggctaatgttttgtatctttagtagagacagggtttcactatgttggccaggctggtctccaactcctgacctcatgatctgccctcctcggcctcccaaagtgctgggattacaggtgtgagccaccacgcctggccaataattttctataatgacataaattaacaatggaattagaaattatttttactttaaaaaaattttttttaaagaaattattatttttaaatagagatgaggtctcagtatattgcccaggttgttcttgaactcctgggctcaagcgatactcatgcctcagcctctgcctcccaaagtgctgggattacaggcatcaaccaccacaccctgcccttagaaattattttacttatagaaaaactcatctaggtaaaattggagttaagtgtctataacccagttaaatgtaaacatttaatttgtagctaactttctacatattttatataattgttgctgatatcgtccatatgaaacaaataagtagagctggggcaagccacctggctcccataaggccccatacaggcactggaaatacaagaagcaaacacattacctgcctggaaggagcttacagtctggggtggggtcagattggcaattttactatagtttgatagtgccacagggggggtaagtgcagagggcttatgggagcatggaggggcttataggatctcaccttcatctagaaggtgacagaagcaggtggcccagaggatgagctaggcatgggcgtcggtttgctcagctttgggtagtatatggctggggagcgatgggtgggaggcttggtgtttctggaagaggaaacagtgttgtagatggtcaagaggagagcatgtggcagggtccaccttcagtgttacctagagtgagggaaggccagccaaggctggcgagatgaggggccagagcctgaagggacccctgtagaaaagaaaataatcaggtgatgctagttagtatatcttttcatatgtttattgaccctttctttctactgagttaccatttttaaatttcaggcttctttgctaaagaatgatgagactaaggccctcactccagcttccttgcagaaggaattaaacaatttgttgaaatttaatcctgattttgctgaagcggtaagtctttcccagaatttgttgctgtgttggaaaggaatgacaaggcaactttttttgtttgtttgtttttggaaacagagtcttactctgttgccaggctggagtgcagtggcacgaccttggctcactgcaacctccgactccctggttcaagtgattctcctgcctcagcctcccaggtagctgggattacaggcacgtgccaccacgcccagctaatttttgtatttttagtagagatggggtttcaccatgttggccaggatggtcttgatctcctgacctcatgatctgcccgcgtcggcctcccaaagtgttgggattacaggcgtgagccactgcgcctggccaaggctactttttatattgagtagctgtgcaaatgagaatcagcccattggcccaggttcttgaaggaaatcgtgttcttggtaggcaaacaactcggtataggttgcaaagctcctccctccctcctcgggccataggcgatttcttcttactcttgatgttctctttcagtcatcatcctcctgatgttgtaaagtttggactggagataatatactagactgatgcaaaaaacagtgtttgtttgtttgttttggagactgagtttcgctcttgttgcccaggctggcgtgcagtggtgcgatcttggctcactgcaacctctgcctcccgggttctcagtgattctcctgcctcagcctctcgagtagctgggagtacaggcacacgccacaatgctcagctaattttttgtatttttagtagagacggggtttcaccatgttggccaggctggtctcgaactcctgacctcaggtgatccaccctcctcggcctcccaaagtgctgggattacaggcatgagccatcacgcccagcctaaatgacagttttgaggctgaaaaactcttttcctttctcttcttttgtcagtgtttatttttaaagttctaataattccattccttaatggattttttactcggaaaattttcttaaatagtatttggattttccatctgactttgggtgcagaaatatatctattttgcttcctagtaactgagatctgcctgttagggaagtttcagtgattaaaaaaaaaatgaaaataattaacttagtaaactagtaagtctcagtgtgttttaacttgtacattaataaaacttaattttataatttgtatatgaattcaggttttaggatctttaattctgaacactcagttttcctcaatatttgaactaggtaaggcccagtattctcatctatcactcatgtaaccagtggcatagtggagtatatttgagataaaactgacacaaatactaatggaactcccatttttaatttgtggactccctctagggggaatgtgtcttgaagctgttttattctgcctctagggagaagattaagctaaactatgaccatcttattagaagggtatgggatacactagtgtttgtagacagtggaactctctgcagttgtcttacaccagagatatttacagcgtttaaaatacattgattatttcttgttttagcattatctcagctacttaaacaacctccgtgtccaagatgttttcagttcaacacacagtctcctccattattttgatcgtctgattcttaccggagccgaaagcaaaagtaatggggaagagggctatggccggagcttgagatacgccgctctgaatcttgccgccctgcactgccgcttcggtcactagtaagtttatagacctttgtccttgcgcaaattgaaggaaccgatgacaataaaaagtctgctgtttggcctggtgcggtggctcacgcctatagtcccagcactttgggaggccaaggcgggtggatcacgtgaggtcaggagttcaagaccagcctggccaaaatggtgaaaccccatctctactaaaaatacaaaaattagccaggtgtggtggcaggcacctgtagtcccagctactcaggagactgaggcaggagaatcgcttgaacccgggaggtggaggttgcagtgagccgagagcacgccattgcactccagcctgggcaacaagagtgaaactccgtctcaaaaaaaaagaaaaaataaataaagatttgctattttgggagaaaagaaaagggaaaagaaatggaagaaatgaattctcaaatgttaattgtgatgcatttttaaaaaatgtattttttaaaaagaagataggaaagcagctcatcaacctggactagtcagtaacttccatagagggaaccttattggcactggaacagtttatgaaaaccttctgcctaaatagtctgccccctagtgtcactatgtaacattgccgtcttagtgcctagcctctttcattacttctaagaacaacaggccgttcagtgaaaaagaaattaggtcattaggccagagagtccctaaaggattttttggaggtaaaaatggggatgcagaagctatttttagtatttcaaaaagccagaaggcagttgtacctttactggatgaaagactacataggcttactgaaagtcaggtttgctttcaggtagaattcaggctgctcagtcaggtgacactggtttatactgttgcctcagtgtgcctctgtttttaatgaatagaaataggaaaatcgatcaattatgttt

SEQ ID NO: 1753 - DNA, 6000 bp, Homo sapiens
aaggctgtcctttccctatcaaatggtcttggcactgttgccaaaaaccatttgaccatgcatgccagggcttctttatgggctctgtgcattgatctcaacatcactttttatgtttttctttcctagttctgaggagagagttaaattttttgaactctttcgatacaagaatccatctgattttataaatgttatcatttttacttttgtgtaattctttactatttttgtttttttattttttccagagaagaggaggtatcttgcagtgggcctctgtcccaaaaacaagcagaattttttctttctcaacaggtatgtgaattctgtaatttatcatgaacttctgttctagtcctgtgatgtgtctagtcctgtgatgtgtgttgtggcataggcccgttatgtgcataggtttgttggtcagtctgtgtcagcctttactcttggtcccctctgcctcactaacgaagcacttgtagctctgtgccccttcctattttgtgtgtgattttatttttctattaaagttataatccaggtttcatttagtaatggtatgtgactaacagcctaaaaccctgtgatttaacccttctctcaacattttattatagacatttgcaaacataaagagagcctgaaaagcagtgtatggtaattacccatacctattacctcgattctacaattaatatttttgttctatttattacttatctaaccactctctattcagccaccatttcatcttattttttgatatatatttccagttgcagatattaatacactttgctccaaacacttctctctttttttgttgtttttgagacagagtcttactctgttgcccaggctagagcattgcccaggctggagtgcagtggcatgatctcgggtccctgctacctctgcctcctgggttaaagctattcttatgcatcagactcccaaatagctgggattacaggcgtgcaccaccacacttggctaatttttgtatctttagtagagatggggtttcaccacattggccaggctggtcttgaactctcgatctaaggtgatccacctgccttggcttcccaaagtgctgggattacagacatgaaccagcgtgccccaaacatttcttttttgtttcttttttttgagacggagtctcactctgtcactgaggctggagtgcagtggcataatctcagctcaccgacacctctgcctcccgaagtgctgggattacaggtgtgagccaccacgcccagcccaaacatttcttatggatgcttttcagccatattttttcattttcttggaaacataatctgaacatttttctgtgttattttcagcatagaatttttagtttttgctctatttttctacttttccctaattttgttatgagctttctgcagaaagatgtaatgtttatatctagacaaaagtgatggaggctgggcatggtggctcacgcctgtaatcccagcactttgggaggctgaggcaggcggatcacaaggtcaggtgtttgagagcagcctgaccaacatggtgaaaccctgtttctgctaaaaaaaacacacacacaaaaattagccgggtgtggtgatgcccgtctgtaatcccagctactcgggaggctgaggcaggagaatcgcttgaacccgggaggtggaggttgcggtgagcggaggttgcagtgagccaagattgcgctactgcactctggcctgggtgacaaagtgagactccgtctcaaaaaaaaaaaaaaaaatttacggaattacctctgcagatgaatttcaaacagattagaaaaacctgtctatgtgattggttaactgtaaggaaaaagtacagctggatccttccttaccttaccttgtacctcagtatattacagatggattacagggttaaatgtaaatatttacagctttagttagataattaggctagaatgagctacacattgttggttttttttttttttttgagatggagttttgcttttgttgcccaggctggagtgcggtggtgatctcagctcactgcaacctctgcctcccgggttcaagcgattctcctgcctcagcctcctaagtagctgggattagaggtgcctgccaccacagctgcctaattttttgtgtttttagtagagacgggattttgccatgttgggcaggctggtctcaaacacctgacctcaggtgatctgcccacctcggcgtcccaaagtgctgggattacaggcgtgagccactgcgcctggccagagctttctaacataaaagctatggaatacttcagaggctgaggcaggagaatcgcttgaacctggggagtggaggttacagtgagccgagatcacaccactgcactccagcctgggccacaagaacgacactccatctgggaaaaaaaaaaaaaaaaaaaaaaactggaagaaaacatgtaggagaagataatttgattttcagaataaaaattgaaagcatctccatgtcaggacttgttttaacataattaacaggcaaacaggatgggcgtggcagctcatgcctgtaatcccagcaatctggaaggccaaggcgggtggatcatttgaggtcaggagttcgagaccagcctgaccaacatggtgaaaccccgtctctattaaaacacaaaaactagctgatgtggtggcatgtgcctgtcgtcccagctacttgggaggctgaagcagaagaatcgcttgaacccatgaggcggagtttgcagtgagccaagatttcgccactgtacttcagcttgtgcgacagagcgagactccttctcaaaaagaaataaaattaaaaaattaaaaggcaaataacaaaggtgttcttgggctccaatactttgggaaaaagtatttacaataaatatgacagtgaaagtttagattttggttttggtttagaaatcacattttcaggccgggcacagtggctcatgcctataatcccagcactttgggaggcagaggcaggtggatcacctgaggtcaggagtttgagaccaccctggccaacatggagaagcactgtctctactgaaaatacaaaaaattagccagatgtgatggtggatgcttgtaatcccagctacttgggattcaagaagaatcacttgaacctgagaggtggaggttgcagtgagccaagattgtgccactgcactccagccttggcgacagagcaagactctgtctcaaaaaaaaaaaaaaaaaagaaaaaaaagtcatatttgatgatgagacaaagtttacaatataaaatgaaaagaacaggaaataaagttacatatcatattctgattttgttaaaaatataatgtgtatatacacattatataaatttggaatacaccctgtattataaacatatattgtgattttgttaaaaatgtaatgtatacacaatatatgtttacaatacagggtatattgtaaatttatataatatgtatacacatatttttaacaaaatcagaatatgatatgtaacatatatacacacatacagaacaaagactaggataatatacactaaagtattaatagcgttatttctgggtagtgagattgcagaagatttttgttttcttctgtaggttttctatatttttggaataatttttccccatactacacctacataataatttgttttttgttttgttttgttttgtttttttgagactgagtcttgccctgtcacccaggctggagtgcagtggcgtgatttcggctcactgtaatctctgcctcccgagttcaagtgattctcctgcctcagcctcccgagtagctaggattacaggtgtgcgccaccacacccggctaatgttttgtatctttagtagagacagggtttcactatgttggccaggctggtctccaactcctgacctcatgatctgccctcctcggcctcccaaagtgctgggattacaggtgtgagccaccacgcctggccaataattttctataatgacataaattaacaatggaattagaaattatttttactttaaaaaaattttttttaaagaaattattatttttaaatagagatgaggtctcagtatattgcccaggttgttcttgaactcctgggctcaagcgatactcatgcctcagcctctgcctcccaaagtgctgggattacaggcatcaaccaccacaccctgcccttagaaattattttacttatagaaaaactcatctaggtaaaattggagttaagtgtctataacccagttaaatgtaaacatttaatttgtagctaactttctacatattttatataattgttgctgatatcgtccatatgaaacaaataagtagagctggggcaagccacctggctcccataaggccccatacaggcactggaaatacaagaagcaaacacattacctgcctggaaggagcttacagtctggggtggggtcagattggcaattttactatagtttgatagtgccacagggggggtaagtgcagagggcttatgggagcatggaggggcttataggatctcaccttcatctagaaggtgacagaagcaggtggcccagaggatgagctaggcatgggcgtcggtttgctcagctttgggtagtatatggctggggagcgatgggtgggaggcttggtgtttctggaagaggaaacagtgttgtagatggtcaagaggagagcatgtggcagggtccaccttcagtgttacctagagtgagggaaggccagccaaggctggcgagatgaggggccagagcctgaagggacccctgtagaaaagaaaataatcaggtgatgctagttagtatatcttttcatatgtttattgaccctttctttctactgagttaccatttttaaatttcaggcttctttgctaaagaatgatgagactaaggccctcactccagcttccttgcagaaggaattaaacaatttgttgaaatttaatcctgattttgctgaagcggtaagtctttcccagaatttgttgctgtgttggaaaggaatgacaaggcaactttttttgtttgtttgtttttggaaacagagtcttactctgttgccaggctggagtgcagtggcacgaccttggctcactgcaacctccgactccctggttcaagtgattctcctgcctcagcctcccaggtagctgggattacaggcacgtgccaccacgcccagctaatttttgtatttttagtagagatggggtttcaccatgttggccaggatggtcttgatctcctgacctcatgatctgcccgcgtcggcctcccaaagtgttgggattacaggcgtgagccactgcgcctggccaaggctactttttatattgagtagctgtgcaaatgagaatcagcccattggcccaggttcttgaaggaaatcgtgttcttggtaggcaaacaactcggtataggttgcaaagctcctccctccctcctcgggccataggcgatttcttcttactcttgatgttctctttcagtcatcatcctcctgatgttgtaaagtttggactggagataatatactagactgatgcaaaaaacagtgtttgtttgtttgttttggagactgagtttcgctcttgttgcccaggctggcgtgcagtggtgcgatcttggctcactgcaacctctgcctcccgggttctcagtgattctcctgcctcagcctctcgagtagctgggagtacaggcacacgccacaatgctcagctaattttttgtatttttagtagagacggggtttcaccatgttggccaggctggtctcgaactcctgacctcaggtgatccaccctcctcggcctcccaaagtgctgggattacaggcatgagccatcacgcccagcctaaatgacagttttgaggctgaaaaactcttttcctttctcttcttttgtcagtgtttatttttaaagttctaat

SEQ ID NO: 1754 - DNA, 6000 bp, Homo sapiens
tacgtgagtgatggccttctctcccattagacggtaacctccaccagctcagtacttagtcctgtttttgtttactggtacatccccaaagcctcctagaatgcctgagtagttttttgtaaaatgaatgaaatgcgatagaggtggatgagtgcactcatggagaggattttttttttttttttgagacggagtctcgctccgtcgctcaggccagagtgcagtggcacgatcacggctcactgcaggctccgcctcccgggttcacgccattctcctgcctcagcctccggagtagctgggactataggctcccgccaccacgcccggctaattttttgtatttttagtagagacggggtttcaccgtgttagccgggatggtctcgatctccagacctcgtgatctgtccgcctcggcctcccaaagtgctgggattacaggcatgagccaccgcgcccggcccgaggatttcttacagaaagtgtgaagctgtgccttgatggataagcattgtctgttgagtaacagtgatggcagaaacagatctgggtccctgggcctctatattatgggatcttaaaagataaacctaataaaattagtgtctagagttgcatttatattccttagtatagtttataaaggcttttttaaaaaatttatcacttgtatttgtgggtgaggggcatgggaagaggggagaactgaggacaccatggtcaagagacctacccagttaaataaaagggatgtctttataacttgtggctcccagggctagccacgtctgctattactataaatgcatttccctccattattaaagttataatactaaaattttggtaaataaaaggccgggtgggatcacacctgtaaccccggcactttgggaggctgaggtgggtggatcacttgaggtcaggagttcgagaccagcctggccaacacagtgaaaccccatctctactaaaaatacaaaaaaaaattagccgggcattgtgatgtgcgcctgtagtcccagctactcgggaggctgaggcaggaaatcatttgaacccaggaggtggaggttgcagtgagctgagatcacatcactgcactccagcctgggcatccgtctccaaaaaaaaaaaaaaaatagaaacagtgattctggtctcttaactctcaccttcctgctcatgttgttttttgctgtttggaattctttctggtttttaacctggctaactactatatagttattttatttaattttttatttttaaatttattttttttttaatttttttagagtggtgggatctcactccctcagtcacctgggctggagtgccgtggtgcgatcctagcttaccatagcctccacctcccaggctcaagctgtcctcctacctcagtcttctaagtagctaggactacaggcacctgccaccatgcctggctaatttttaaattttggtagagatgtagtctccctatgttgctcaggctagtcttgaactcctgggctcaagggatccacctgcctcagcttcccaaagtgctggcattacaggcatgagccaccacacctggccccctactgtatagttttaatcaaaatgtatgtagagttcatctagtagcatcccagccagacctcaactcctttactaactgtttgatttcttaaattagttaatttttggcttggtgcctagactttgggaggccaacgtgggaggatcacttgagcctaggagttcaagagcagcctgggcatgggatttcaccatgttgtccaggctggtctcgaactcctgacctcaagtaatctgcctgcttcagcctcccaaggcgctggtattacaggcgtgagccactgcgccaggccccaaatggtctttttaatggctgcattatatttcacagtaagaaaagcaacataattcaactctgtattataaattaagtctttattggacttacaggctcctttcagtttttcttcatttcaaacaatgtatgccaaaataacttccctagaagtgcaattgctgggttatccacatctaaagttggcatatatgcagtcatcttattctctgaaaaagagtctaaatttagttttaaatctcaactagactgtaatcttcttggtagctgaggttgcatactctttattccttgtggtactcttttttttttattggagacggagtcttgctctgtcgcccaggctggagtgcaatggcgtgatcttggctcactgcaacctccacctgccaggttcaagccattctcccgcctcagcctcccaagtagctgggactacaggtgtgtgccaccatgcctggctaatttttgtgtttttagtagagacggggttttgccatgttggccaggctggtcttgaactcctggcttcaggtgatctgcccaccttggcctcccaaaatgttgggattataggcatgagccactgtgcccggcctctcgtcatactctttatagacttcagcacatagtatgtctgcctaccttacaaggtttgggagaagatcaaatgagattgtgtttgtgaaaaatagtatttgtatagtgttttccagtttacaaagcactttgtattatcttatttaatctttgccaaaaacaagggagatattattatctccattttactgatgaaggaaactagaactcagaggtcacaattttgcaatgattacaaagctaagaaggaaggaacagtggatcctcagactataaatcctatgctttttttctattttagaccattccactgactagacaaaaatggtatgcaaatgtgaagtattactttagtgttttaggtagatagaaaaatccttatttgcatgtttggagtgattattaaagcagaggggttgataaatgaatttatgtttgcaattctttatcagtctccagctctttaaaatccatacctccctatctctcctttacacagggcccagatattacactgtcaaaactttacaagttaattgaagagtcttgtccacagctggcaaattcagtgcagatcaggtaaacttcattttcttctttatatatgaaaaggtgtgaaggtagatgaaaatcacaaaagggtatgtggtagttaattcttttaaaaagatacctttattaccctaggttgttttcccaagagcctttacttaattctgttttgttgaaaaatggatagctttttctttggagacagggtctcattctgttgcccaggctggagtacaatggtgcaatcagggctcaacgcagcctggacttcctgagctcaggtgatcttcccacctcagactcccaagtagctgggactacaagcatacaccaccaaacctggctaattttttgtatttttagtagagatgggattttgctttgttgcctaggctggtcttgaactcctgggctcaagcaatccctccgcttccacctcgcaaagtgctgggattacaagtgtgagcaaccgcacctggctgaaaaatgggtaacattaagcatactgttttatagcttttttccccaaattttattattccttatggatccatcttactctttttagtcattgcagataattgaatgtttattggttgatgtgatagtttgacaaattttatgatcaagaaaacaacaatgatacttttcagaaatacgggagtaacattttgaattatgaagtttgttttatgagccaccattttatacaaatctctgaattgcctgtaaaatacattatttgaggtaattgaggaatatgaaacatgagaaattattcaaagggcctttctaaaatatgcacctcgattttctcattcagaatcaaactgatggctgaaggcgagttgaaggatatggaacagttttttgatgacctttcagattctttctctggaactgaaccagaggttcacaaaacaagtgtagtaggtatgaaactcttctaagaagagcagagagtattttcattgaagtgagcagctttctaagtcatgtctatcattgttctgctatatctgtgaacagacacagtggggatgttggaggtgttgcagtttgtatttattgccttactgttttgatctatatttaaatcattaactgtggaaaagcaccttctgttttgtctacaatagtaagagtcagagcctggtcctggggtttttaggggttcccagctctttctcacagtcctctggatcacttgcctgcatggtccatctgtaagtgagggtcaccagcccagacttatgaagagaggtaagtaaaaatacattattgatatagtatgcaaagtgagggcatacgtggtgtttctttgatgcttttctattagctttatcccatgctctatccctctggcttttttgcatggtaatttttatgttattcagcgtgagctatttctctctctcttcctatgtgccaggctctggacgtgtaagatagacatggaatttcctcttatggagattacctctggttgggggagccagttggtaaaagtaaacacataaatatcatttcagatagtgtaacagccatgaagaaagtaaaatggaagccttcaggtggaggtggggtgggtagattgtgccctgtataagaagaaaccagctttgtaaaggactggggaagaacattccaggaggagggaatggcaactgcaagtgtctctttcttactcttctgaaggaagaattccagcagacagtcattgccattgtggagttgccattgcgtagcctggatgtcagttaatgctttccccttgtctctcgtcttattttgtaggtttgtttctgcgtcacatgatcttggcctacagtaagctttctttcagccaagtgtttaaactgtacactgcccttcagcagtacttccagaatggtgagaaaaagacagtggaggatgctgatatggaactgaccagtagagatgagggtgaaagaaaaatggaaaaagaagaacttgatgtatctgtaaggtaatttggcttttctgacagggatccttttcctgtgaaatagtataatttcaagtgcaataagtccttgttcatttagaattcacgtgctggcttatgccctttttacccttccagatctgggaagttaactgataagggctgcaccagtgggtcccttgccctctgacttgtgattggccaatgggaggcactggcaggaaatcccaagggccagggagaatgacgtggagtgtggattcattggctccctttcttgggggtcctggggggctggctgtagggtcacagcttctgtcaggtcgctctttctgcactccttcagggggttcggtgactaggagcaagtgtttgcaggccccaggtgaaaggtaccccactgttatcagtcctggggactgtattgtgtcttatgacttctctgtcctttcccctacttttgtcaattgatcctttgttaaactcttctcagactactcaatttgaatgtgttctttgttttctgctgggtccctgactggtattgttcatcacatcagagtgaagtaacacttgattaattcagtgaaaatttattgaatgccttctaaggtctagcctctaaggaagctgttgtaaggaagttactcacttagttggtcaagcccaaaatgcagtagtatccttgattcctccctgtccttcaccccagtccctcagcagatccagtcagtccttcctccctgctatgtttggaacttgttcacttatctcatagccactgctacccctggagtctaagcacccaatctctaccaaatctactcaccaaatctgcactagcatcacttttctccttgacttaactcctgtctccctacatctgttcttcaggcagcatctggggaagcccctaagaatattaatcagatcccagcacttttctgcctaaaccctttggaacttagagaggagtttgagcttaccatggcct

SEQ ID NO: 1755 - DNA, 6000 bp, Homo sapiens
tccctccttctctctctttctctctctctctccctttctttcattttgatacaatgtctcactgtcacccaggctggagtatagtggcatgctcacagctcactgcagccttgacctcctggactcaagtgattctcccacctcagcctcctagtaactgggaatacaagcacacaccaccatgcctggctatttatttatttttttaatttcttgtagacacagggtcttatcatgttgtccaggctggtcttaaactcctgggctcaagcaatcctcccaccctcggcctcccaagtgctgggactacaggcataagccactgtgcccagccttgggtagtttcttatgacaattgttttcctccacgaggtcaaacacctagtttgtatattcactgctgtactcgcatggacttagcacaatgtctggcatatagtacgtactcaaaaatatttgttgagtgaatgtaaggatttgcagcacagttgactcaaaggcatattgacaataactgagcatatactaaatgtgtcagaaactaaggatgcaaagatttttttaaaaaagcaaacctgctccctgcctatgacagcccaccagaggaggcagttacttaagtaagtcattgatataaaatcatacacataataaatgaagcttgaacaaagtgctacaaaaatggtcacatgatctctaagatgatggagtaagtccaaaagagttcaaatgttttcagggttttgatatttagccatgttctttttttttttttttttttgagaaggagtttcactcttgttgcctaggctggagtgcaatggaatgatcttggttcactgtatcctctgcctactgggttcaaacgattctcctgcctcagcctcccaaatagctgggattacaggcatgcgccaccatggccggctaattttttatttttagtagaaaaggtttcaccatgttggtcaggatggtcttgaactcctgacctcaggtgatccacctgactcagcctcccaaagtgctgtgattacaggcgtgaaccatggcgcctggcctagcaacattcttaaaatcagatatatacatatagaaaagtctaggccgggtgtgatggctgacacctgtaatcccagcatcttgggagactgaggtgggaggattttgtgagcccaggacttacagaccagcctgagcaacacagtgagactctatctctacaaaaaaattaaaaattagccacatgtggtggtgcattcctgtggtcccagctattcgggaggctgaggtgggaggatcgcttgagcacaggaggtggaggctacagtaagctgtgatcatgccaccgcactccagcctgggccacagagtgagaccctggctccaaaaaacaaaacagaacaaaacaaaaaacccaataacgattgatgaggattgtagtgagttggaaacggcatgccctaaataaaggtggcttatttatttatttatgagacagagtctcactctgtcgtccaggctagagtgcagtggtaatcataggtcactgcagccttgaactcctgggctcaaggtatcctccggcctcagcctcccaagtagctgggattacaggtgcatcccagcacacctggctaatttttgtatttttagtagagacagggtttcaccatgttggccaggcatgtgtcaaactcctggcctcaaagtgatccacccacctctgcctcccaaggtgctgggattataggcatgagccgccacctccagcctatttatttatttatttttgagatggagtttttgctctgttgcccaggctggagtgcagtggcatgacctcggctcactacaacctctgcctcctgggttcaaccgatcctcctgcctcagccccccgagtagctgggattacaggcaccccccaccatgcctggctaatttttatatttttaatagagacagggtttcaccatgttgcccaggctggtctcgagctcctgacctcaagtgatctgcctgccttggcctcccaaaatgttgggattacaggcatgagccattgcacctggccaaaggcagcttatgctgtgcatatccagtcagttgttaccatctaggaataaatcatgttaccaaattttcaaatttttcaagtgaagctggaaatgtagttctttgttggcagaaatatcctaatttttaagtgttggcaaacaccatgcaaagcaaataaaatatatctaatgagccgcatttagtttagattgcaacttcagtttgcaacttctggcttagaaattcatcccttttggtccccagcacctagaacagtgccttaaatatagcaggagcttagcacagtgttactgaataaatgaatcaatggcttgaaagtcttaccaatttacagtaaaattgttatttaggattttgtaaaattactttcctctttccattcattaagtgttcctactcaggattttaaggttgaatactagtttattccacacagaccctttgtcaaaccttatttatggtatacacatatgcaaaaatatcctaaagagctgggagattgtaagtatgctttttcattaatagagtgaggcataaaaataaaccgaggcaaagaaagaggttaagtgagtattaaattcctggcaaaagccagcttctcctttcacaaataaaagatagttatataataattatgtatggtaactaaaacatacagagttctcaagataggaaagcttgtattacaagatatcaatgtcttcttttttgatagcatcatttagcttatacatatctgccttcttttttgtttttgtgaactaataatgcatattcattcattattcattaaacaaatagcgattgagaaaacaaaaaccaggcatgaggctgcatgcagtggcccatgcctttaatcgtagcaatttgggaggctgaggcaggaggatcacttgagtccaggagttcgagaccagcctggacaacatcgcaagacctcgtgtctacaaaaaataaaaaaattagccatgcatccaggcacagtggctcaggcctgtaatcccagcacttttggaggcggagatgggcgggtcacctgaggtcaggagttcaaccagttcaagaccagccgggccaacatggtgaaaccccatctctacaaacaatacaaaaattagccgggcgtggtggtgcgtgcctgtagttccagctactcgggaggctgaggcaggagaattgcttgaacccgggaggtagagattgtagtgagccgaaatcgagcgactgtactccagactgggcgacagagcaagactccgtatcgggaaaaaaaaaaaaaaaaaattagccatgcatggtggcacaagcctgtagtctcaactactcgtgaggctgaggtgggaggattgcttgagcctggcattcctgagggcgagggggtctcctgccctgctcatgtctaattacctactttaactggaggctgaggttgcagtgagccgtgagcgtgccactgcagtccagcctcggtagcagaatgagagagagagaaagtataatttaaacaaacataaaaatgggcacaaggcaggccgggcgcggtggctcacgcctgtaatcccagcactttgggaggccgaggcgggaggatcacgaggtcaggagattgagaccatcctggctaacacggtgacaccccgtctctactaaaaatacaaaaaattagccgggcgtggtggccgatgcctgtagtcccagctactcggtaggctgaagcaggagaatggcgtgaaccagggaggtagagcttgcagtgagcagagatcgcgccactgcactccagcctgggcgacagaggagactccgtctcaaaacaaaacaaaacaaaacaaaaggcacaaggcacagtgtgtgcatgtggatagccaaagttgaatggtatgtggtttttctttcaagggacataaagactaatagggataccagatcattaataataattcagggtatagagaactaagtgtcttgggagaggtacagatgaacggaaggggaattgtgaaaaatcaggttcaaaatgttggctggggattgcttttggagggctttgaaatgcagagtatagattttgtagtttattaggtaggaaactgactcagcacatggaggtgatgttgctaatgttctatttcacgtaaggatacacgaccactggcaacctgatctggctgtctgcaaatggcatttgtgaaacgctgaagaaaaatctcatgttcctatctttaaaaagacagagttaaactcctaaacatttgagtttaaaagtaacataataaatacatactttaagggtgcaaatttaatttcggtacttttaaacacaatcatttaaacattctatttgaactattttcaaattacatgaacaagccaggcgcgctgcctgtagtcccagcttctcgggaaggcgggaggatcgctcgagcccaggatttgggagggtgcagtgctctttgagggcgtctacgaataaccactgccctccagtcttggtaacatagcgagatatcgtctcaaacaacaacaacgacaaccaccaccaccaccaccaacaacaacaaccaacaacaaaaaaaccactttgggagctcctcagtcccttcagccccgaccccaagcatcgacttcccctcccatccggtccctgtccacgtagcctgggaacctgctcccactcggcaaaagtttctgtagggagtcagtcttttggtgcacccctccccgcactcttgtacattctgactggctgtcgctctcccatgtgctctgacagactgctctgattggttaacaaatgccgcgagcacgcggatgtctgtttcctgggatattgtgagggcgggcggagatgtagacccggtagtgttgtgccttgtggtgacaactggcggcagcgcgccgcgggcccgagacttagtctcgggccgccatggccagcgtccacgagagcctctacttcaatcccatgatgaccaatggggttgtgcacgccaatgtgttcggcatcaaggactgggtgacgccgtacaagatcgcggtgctggtgctgctgaacgagatgagccgcacaggcgagggcgccgtcagcctcatggagcggcggaggctcaaccagctgctcctgcccctgctgcaggtgagaggcgcccgctggctcctgctcgtgcagcaaacttttactgagcatctgctctgtgcggaaccctgggcttggggacactcgtgtccatcagatactctccctgcctggaggaacgtgaagaaataaagatagctactaccggtagctaacacgtactgagcgtttacggtgggccaggcgctttacatgcattttttttttttgcaagttcatgtctggctccagtatttattagctgagagttagagtctcagatcctgtatcttctttaaaatggggctatacaatagagcgttggagacacagggataagtcatacaggctccctatcctagaggaccgtaataaacagtaaaaatgccataaaaccgggccgggcgcagtggctcacgcctataatctccgcactttgggagggtaaggcgggtggatcacgaggtcaggagttcgagaccagcctgaccaacgtagtgaaaccccgtctctactaaaaacacaaaaaattagctggacgtggtggcgggcacctgtaatttcagctactcgggaggctgaggcaggagaatcgctagaacctgggaagcggaggttgcagtgagccgagatcgcgccactgcactccagcttgggcgacagtgcaagactccgtttcaaaaaaaaaaaaggcataaagccaaggacgagcactgattgaatacttaactgtgtgctaagcactttacttaaaatttgttttaaattattattatttttttgagacagggtctcgctttgtc

SEQ ID NO: 1756 - DNA, 6000 bp, Homo sapiens
cggcctcccaaattgttgggattacaggcgtgagccaccgcatccagccgctggctgactttttatttttaaaacatttttttgtttgtttgtttgtttttgagatggagcctctctctgtcacccagtccagagtggagtggtccgatctcggctcattgcaacctctgcctcccgggttcaagtggttctcatgcctcagcctcccgagtagctgggattacaggctactgggattacgcctggaatcccagcactttgggacgccgaggcaggcggatcacgaggtcaggagatcgagaccatcctggataacacagtgaaaccccgtctctactaaaaatacaaaaagaaattagctgggcatggtggcgggcacctgtagttccagctactctggaggctgaggcaggagaatggcgtgaacccgggaagcggagattgcagtgaaccgagatcgcgccactgcactccagcctggcgacagagcgagactccgtctcaaaacaaacaaacaaacaaaaaatttttaaataaaaataaagagtaacaagtcagaattttagcactgcagatgacttaacacatcatctagtacagacctttcattgcgaaggcgattaacccgagataaaaaactgggttgtcgcttgaattacagagctggtttcgaggccaacactagaacctgggggttctgattcccagggtagctcttttgtctcatcgatcacaaatattcttgaatcatggtttttctcattatgcttgattctatttctctttgcagattggccttcttctctttctctacaggcagcaaagaatatgccatctacagccttgcttagcaacctcaggagaaagggagctcttctttctctagagtccatagtgcaatcccagagaagcgttgattagctgtgctagggctccatgcccatccctgtatccagagggacatgttctacaacttcgtgcaaattaaaaacaacacatttttgaggaggacagtagagtatgctgggcaaactaaataaataaaaataaataaaccaaagtccactgcaggttacaaagccgtgcttcctttattaccttggagtgctgctttgaaatgttggtgtaaggaacagcatttatagcagccaatgacccatctataatggcaggtcctccttagtctcctggagacagagactggtgcatcaaagggacttctggctagtttctttcttttctttcttcctttccttcctttcattctctctttgttttctttttctttttcttttttttttttttgagatggagtctcactctcttgcccaggctggagtgcagtggagtgattttggctcactgcaacctctgcctcctgggttcaagcagttctcctgcctcagcctcctgagtagctgggattacaggcatgcgccaccacacccagctcattttttgtatttttagtagagatagggtttcattgtgttggccaggctggtctcgaactcctaacctcaggtgatccacccgccttggcatcccaaagtgtagggattacaggcatgagccaccgtgcccaggcctctttcttttcctccctccctccctccattctttctgtctctctctctccttccttccctccctccctctctctttctctttctctctctctttctttctctttcttctctctctttctttcccctccctccctccgttctttctctctctctttccttccttccctccctccctttctttctctttctctttttttctctttcttctctctttctctctctttctttctttctttctttcttttccctccttccttccctcccttccttccctccttctctctctttctctctctctctccctttctttcattttgatacaatgtctcactgtcacccaggctggagtatagtggcatgctcacagctcactgcagccttgacctcctggactcaagtgattctcccacctcagcctcctagtaactgggaatacaagcacacaccaccatgcctggctatttatttatttttttaatttcttgtagacacagggtcttatcatgttgtccaggctggtcttaaactcctgggctcaagcaatcctcccaccctcggcctcccaagtgctgggactacaggcataagccactgtgcccagccttgggtagtttcttatgacaattgttttcctccacgaggtcaaacacctagtttgtatattcactgctgtactcgcatggacttagcacaatgtctggcatatagtacgtactcaaaaatatttgttgagtgaatgtaaggatttgcagcacagttgactcaaaggcatattgacaataactgagcatatactaaatgtgtcagaaactaaggatgcaaagatttttttaaaaaagcaaacctgctccctgcctatgacagcccaccagaggaggcagttacttaagtaagtcattgatataaaatcatacacataataaatgaagcttgaacaaagtgctacaaaaatggtcacatgatctctaagatgatggagtaagtccaaaagagttcaaatgttttcagggttttgatatttagccatgttctttttttttttttttttttgagaaggagtttcactcttgttgcctaggctggagtgcaatggaatgatcttggttcactgtatcctctgcctactgggttcaaacgattctcctgcctcagcctcccaaatagctgggattacaggcatgcgccaccatggccggctaattttttatttttagtagaaaaggtttcaccatgttggtcaggatggtcttgaactcctgacctcaggtgatccacctgactcagcctcccaaagtgctgtgattacaggcgtgaaccatggcgcctggcctagcaacattcttaaaatcagatatatacatatagaaaagtctaggccgggtgtgatggctgacacctgtaatcccagcatcttgggagactgaggtgggaggattttgtgagcccaggacttacagaccagcctgagcaacacagtgagactctatctctacaaaaaaattaaaaattagccacatgtggtggtgcattcctgtggtcccagctattcgggaggctgaggtgggaggatcgcttgagcacaggaggtggaggctacagtaagctgtgatcatgccaccgcactccagcctgggccacagagtgagaccctggctccaaaaaacaaaacagaacaaaacaaaaaacccaataacgattgatgaggattgtagtgagttggaaacggcatgccctaaataaaggtggcttatttatttatttatgagacagagtctcactctgtcgtccaggctagagtgcagtggtaatcataggtcactgcagccttgaactcctgggctcaaggtatcctccggcctcagcctcccaagtagctgggattacaggtgcatcccagcacacctggctaatttttgtatttttagtagagacagggtttcaccatgttggccaggcatgtgtcaaactcctggcctcaaagtgatccacccacctctgcctcccaaggtgctgggattataggcatgagccgccacctccagcctatttatttatttatttttgagatggagtttttgctctgttgcccaggctggagtgcagtggcatgacctcggctcactacaacctctgcctcctgggttcaaccgatcctcctgcctcagccccccgagtagctgggattacaggcaccccccaccatgcctggctaatttttatatttttaatagagacagggtttcaccatgttgcccaggctggtctcgagctcctgacctcaagtgatctgcctgccttggcctcccaaaatgttgggattacaggcatgagccattgcacctggccaaaggcagcttatgctgtgcatatccagtcagttgttaccatctaggaataaatcatgttaccaaattttcaaatttttcaagtgaagctggaaatgtagttctttgttggcagaaatatcctaatttttaagtgttggcaaacaccatgcaaagcaaataaaatatatctaatgagccgcatttagtttagattgcaacttcagtttgcaacttctggcttagaaattcatcccttttggtccccagcacctagaacagtgccttaaatatagcaggagcttagcacagtgttactgaataaatgaatcaatggcttgaaagtcttaccaatttacagtaaaattgttatttaggattttgtaaaattactttcctctttccattcattaagtgttcctactcaggattttaaggttgaatactagtttattccacacagaccctttgtcaaaccttatttatggtatacacatatgcaaaaatatcctaaagagctgggagattgtaagtatgctttttcattaatagagtgaggcataaaaataaaccgaggcaaagaaagaggttaagtgagtattaaattcctggcaaaagccagcttctcctttcacaaataaaagatagttatataataattatgtatggtaactaaaacatacagagttctcaagataggaaagcttgtattacaagatatcaatgtcttcttttttgatagcatcatttagcttatacatatctgccttcttttttgtttttgtgaactaataatgcatattcattcattattcattaaacaaatagcgattgagaaaacaaaaaccaggcatgaggctgcatgcagtggcccatgcctttaatcgtagcaatttgggaggctgaggcaggaggatcacttgagtccaggagttcgagaccagcctggacaacatcgcaagacctcgtgtctacaaaaaataaaaaaattagccatgcatccaggcacagtggctcaggcctgtaatcccagcacttttggaggcggagatgggcgggtcacctgaggtcaggagttcaaccagttcaagaccagccgggccaacatggtgaaaccccatctctacaaacaatacaaaaattagccgggcgtggtggtgcgtgcctgtagttccagctactcgggaggctgaggcaggagaattgcttgaacccgggaggtagagattgtagtgagccgaaatcgagcgactgtactccagactgggcgacagagcaagactccgtatcgggaaaaaaaaaaaaaaaaaattagccatgcatggtggcacaagcctgtagtctcaactactcgtgaggctgaggtgggaggattgcttgagcctggcattcctgagggcgagggggtctcctgccctgctcatgtctaattacctactttaactggaggctgaggttgcagtgagccgtgagcgtgccactgcagtccagcctcggtagcagaatgagagagagagaaagtataatttaaacaaacataaaaatgggcacaaggcaggccgggcgcggtggctcacgcctgtaatcccagcactttgggaggccgaggcgggaggatcacgaggtcaggagattgagaccatcctggctaacacggtgacaccccgtctctactaaaaatacaaaaaattagccgggcgtggtggccgatgcctgtagtcccagctactcggtaggctgaagcaggagaatggcgtgaaccagggaggtagagcttgcagtgagcagagatcgcgccactgcactccagcctgggcgacagaggagactccgtctcaaaacaaaacaaaacaaaacaaaaggcacaaggcacagtgtgtgcatgtggatagccaaagttgaatggtatgtggtttttctttcaagggacataaagactaatagggataccagatcattaataataattcagggtatagagaactaagtgtcttgggagaggtacagatgaacggaaggggaattgtgaaaaatcaggttcaaaatgttggctggggattgcttttggagggctttgaaatgcagag

SEQ ID NO: 1757 - DNA, 6000 bp, Homo sapiens
aaaatacaaaaaattagctgggcatagtggcgggcgcctgtagtcccagctacttgagaggctgaggcaggagaatggcgtgaacctgggaggcagagcttgcagtgagctgagatcatgccactgtactccagcctgggcgacagagcaagactccatctcaaacaaacgaacaaaaatactaaaaaatagacgtcatttcctcattatagaaactgtgctttcagatgtctcgaaggattcaaaaaatttaaaaaaaagaaatgctgcacttgaaatttttgcctctaataaataatgacaaaaaatacaatgagatttgtactactcataattaatgtttatcttatactaattatcttattgttggattatactgcctttaacatgattcatggtacatttaaagcggtacaaatcaggcacagtgactcatgcctttaatcccagcactttgggaggccaaggcaggcggatcacttgaggccaggagttcaagaccagcctgggcaaccccatctctactaaaaatacgaaaatttttagtagcatggtggcacacacctgtaatcccagctacttgggaaattgagacaggagaattttttgaacccaggaggcagaggttgcagtgagccgagccgagatagcaccacagcaagaaaaagcagcacagttccacagacaccagcttaaagctgcataaagaatgatttctttttaaaatcccatcagccagtttaaaaaaaaaagtcaaaagcatacatttaattccctttaggaataacgtccacagtggatgccctgccttatctgtcagattccatttgagtgaaaaaaaatttcttttattaaaaaaaaaaaagaattaaataccagcctcccaagtagctgggactacatgtgcatgccaccacacccagctaatagtaccttctatagaatgcaaagaataaggtttcaggcatgaagcaagaatggtgcaattactgacagaagaaagttaaaatgtagaaagaaatgcacggataaacctcatactcagcagggtgcttgactctggtaggaaacaggaggaacacagattcagggatggaccctcagagccttcaactctatttgtaacattttatttcctaagtcagtcgtagatattctttgtatgccgggagtgatggctcacacctgtaatcccagcactttgggaggctgaggtgggtggatttcttgaggccaggagttcaagaccagcctggccaacatggagaaaccccatctttacaaaaatacaaaaaattagctgagcatggtggcacacaactgtaatctcagctacttgggaggctgaggcacgagaatcacttgaatctgggagtcagagattgcagtgagccgtgatcacaccactgcactccagcctgggtgacagagtaagaatctgtctcaaaaaaaaaaaaaaaagatatcctttgtatcaacttacacatatttttgtatgcatgaaatatcaagaggaactaagaatccttcagttgtgaaaatactgatcctgacatgatgcagagggtattcagacgtgaatttctagcaatctgagattgaatcttgattccctgaggaagtgctatgttcattcacaaaatatttactgtgggccactagccctactaagcactcagtaaaaattctgtgaatgaaacagtcagtgtaataatcactaccttttcagaagagatcttcactagcaaatctacttgatataaagcagttccatgttcttttcttgaaccgacactcaggtacccacttccggtatcatcatttgttagcagctcaatatcattccacatgtttctgagactgtcttcctgagtcaggaaccactgtctttcctgaacaacataaaattagacaccatattatcttgttgcatagaacctggttccttgggaaatgataaagcttactcacaaaacaaaaacaaaagtctaacattaacatatacagacatcttagtcttcttgttattgctgtggccactaaacacttcgggccaataacataaatggaactagagctatgatggttaccagagaacaacatattggtttatgcacacaaaccaacaattctgatcttaccaatgtatcttagagcttccattactttgtgtgtctagtttggaattataccaagttttcattagaaataaacctttaattataccaagttttcattagaaataaacctttcattagaaataaacctttaatagcagcaaacagtgtaggtttagatgccagattgtcagggatatcataggatgataagattccagatgaagttcagaaaaagtccattgatgctatcatagtattattatacaacaaataaaaatgataaggggaggagaaaaaaatgaattaggtttctggatcaaagactaagcttgaaaccttatgaggtttacccatctcaaaaagcaaaggtttacataaaccatattacctggagtctgggtgggaaaagaacactaaggataaaaacaatccttggatcaagactggtagggaatgataatcaaataattacaattggtttcataagtgctactagaagtatgtttcaatatctataaaaggtatagcacaaggtagaaacaatttctgacttggtgctctttcacaatgactaggcagctgtccttgggtgatcacttaatctttctgttcctcaattctctaatttataaaataggaatatacagaccaggccggcgcggtggctcacacctgtaatcccagaactttgggaggcttaggcaggtggattatctgaggtcaggagtttgagaccagcctggccaacatgacgaaaccccctctctactaaaaacacaaaaaattagccgggcgtggtggtgtgcgcctgtaatcccagctactcaggaggctgaggctgtagaattgcttgaacccgggaggcggaggttgcagtaagtcgagatcgtgccacttgcactccagcttgggcaacaagagtgaaactccgtcttggaaaaaaaatatatatatacagtttgccgtcaatatccatgtgttccacatccctagattgcacctacaggcatagcacatttacactgttacgcaagataagaaatcaagagatgatttaaagtatacaggcagatgttcctaggctacatgcaaatactatgccatttaatgacagggacttaagcatcctagggttttggtatctgtgggaggtcctggaaccaatctcccatggataccaataccaagggactaatttagttgtacccacctgaaggagttttctatttttcacttctggttttttgagagacgagggtctcactattttgccctggctggccttgatctcctgggctcaagcaatccttctgcttcagcctccaaatgttttgagttttaaatgttcacagaacaatgcttggttgatggcaaacattcaattttaggtgttagctaatttgttattgggctgagaattgaagatcatagttttataaatgtttaaagagttcttcctaagagcataagcaagggaacagaaacaaaacatgtttggagaatagagaagtttcagtggctggtgtttgggtgggagtgaggagatgaagaaggagggacaggttggaatgaatacctttatgggtctcaatttcccacatctgtgaaatagagaaaccgcccgtaactgccatatttacttattcaacaaatgtttattgaatacctatttactatgtgccagacacctttctaggaactgggaatatagcttgaacagaacacaaaatgtctttgccattatgaagtttatgtttttgcgggaaaaacggacaaaaataaaattgttaatacgtatcttgttatgctacctccacaaaaaagcaactgcacaaataattacaaaaagtgctaaatgatttgaaggaaacagtgattaaatggataaggtgaggcgtcgctgaagaaggatttgtttgggaagggaaggaggtgacatctgagctgagacctgaataacaagaagtacgcaaaacttaggcggaacgcgacgtaggcagagggaacagagtgcaaagactcggaggctgggtaggaagcgtttgatgctgctgccgggtcaaagcaaaagcagaagacagtgagggagagagcagtggagtccaataaaacctcgacctcaagattgaattttattctcagtacaaggggtagaaggggaactcagcaaacgagtggtctgattttataattttgagatcactctggcggcggaatgcagaacagattcgcgaatacgagagaatgagcaagatgaaacacttgtcagttaggcctccatacttaaacgctctccgctggacatcgccgccagcaaaaaccgactccaacctctctcctgccagcgtcaaggggaaaacaacaggaactgagcagaggctgcagctacttcgtcctgaacccacccccagttccctacacagcgcagctccccgtcctcacctgcaattgaagaaactaaagaggaacactcagatatctggcccctcttcctgactcacacaaccgcctctagtctttaggttccatgccacaggcttaaattggcgggagaacactaaacccaacccctttacggcggccggaagagaccaagattactttagactcgaaataggaagttgccccaccctgagttccgcccattccgttctcccgactgcgcattccgggggtgtattcttggccccgccctcttcacggtctttacactcccctatgaaagaacacccaatcaccgcctcgaattgcgttgttatagaaacttttgttaccgcccctttttctcccagcaagctgtgcgacgcgccgggcctcctcgcctttgtgccatccgggtctctcgcgcgagcgatttagtctgaggcgaagcttcggagcggccggtactgttgaaagcgacaagtggaggcgccgctctagcggccgggactctgaactatggcggtaggtaccgaatctgagtttaaagccagggatatttttctgctacgttccaacagtgggtgaacggctcccagaaccttgttcgtgtgtatgtgtgtagacaaaatggcgccgcggccttcttctgcgcccgccatcatggctgcctgctgtagggagggggaagtaaggcggtgttggtgggggtggggagccgcagggagtgcctttttttttccagaactttcctcctctcttccccaaccctacgttcctttcgcctcactgaacttcctccattttcgcttattcaccctggctagtgatttattctaagttttttttagggcctgagaatttgcggtggagaaaggggctggggaagagaaagacgatcaggagtggtctctgaaaagtattgggtcaaaaaggcagtgtctgtaaagggtagtgtgggagaagagagcgacttgtagctatttttttttttgtacgctcaatgagatgcttctagttgcataatttcaattagtgttcgtccgtgtaaaccttattattgtgtattaacgagctaggaaggtattgctgaaagggagtgaaaattcaacttaaaaggttgtggaactaccaattctgactgatgcgcggtttccgaagtggcccgtgatgtaatcaatttgaagtccgagaagcgttacagttaagtcttgtcactgaccttgttcctttaaatttaaacccttcgttggccgggcgcggtggctcacgcctgtaatcccagcactttgggaggccgaggcgggcggatcacgaggtcaggagatcgagaccatcccggctaaaacggtgaaaccctgtctctactaaaaatacaaaaaaattagccgggcgtagtggcggacgcctgtagtcccagctacttgggaggctgaggcaggagaatggcgtgaacccg

SEQ ID NO: 1758 - DNA, 6000 bp, Homo sapiens
tagtccatctcgctctgtatcactagcctaaaagtttaaaaacaaatgattaaagttcttaattacattttaaatgttttcaatttcttaaaagagggacaaagggagggaagatagccccccacaatcaataaatcagaatgcctgctttccaagtaactaaatgtgctttgtacactaataaggctgaatggcttgaaatgacgaacctgatactaaagcaagacctacatatttagactgatgtatctttaattttctaacgatgatttgtataacttttaaaacatggggtggggtgggggaggaataagggctccaagtagttctaataagcattcaagcagagaaaatagtcctttttagatgtgtgaatgcatttagctgactttaccaatacttttaaattagcatacatgtcaaacatcaaaaatgagttgttaaagcttaaagatactcaagacgataaaatcttaaaacaatgccctaagaatattataaaataataaacagaaaattaacttacctaagtgagaacctcatcttaatgtcattaaccctctttaatgaaaacagccccttggcacagtgctgctgcaaaatatggtctgcctctcctcacatgtgctctgggctatgaaaacattaagttgtttctgctttaaagcattttataagtaattattacaatataaattttacaagtttcaactaatgcagaaggtagacaatgctcggctatctgaccagagaagataacatgaaaataaaataattgatacacctggggaattgattacttaggaagggttggcaagctatggtcctcattctgtttctgtatggccttgagctaggaatggttttttacgttttttaaaactattttaggcatatttaataaataacttcagtaaatagcactgtaaagactgaactgttaaaactaaaggcacttaaaacgccagtgttgtggctcatgcctgtaatcctagcactttgggaggttgaggcaggcggataacctgaggtcaggagtttgagaccagcctagccaacatggtaaaaccctgcttctactaaaaacacaaaaattagccaagagtggtggggcgtgcctgtaatcccagcaactcaggaggttgagacaggagaatggcttgaacccatgaggcagacgttgaagtgagctaagattgcgccactgcccctccagcctgggaaagaatgtgacagagactgcacatggcccacaaagccaaaaatatttaccgtctggccctttacagaaacagtttatggacttttcacgtataacatcaaacggaatctggattgaataaatagggaatcgatagtcttcagcaggaggaatcacattagagaacttcctcctttaggaaagttagtccagaaaatgaataccaaatatcaagtacaataaatgggggtattgtattttaacaaattttaaacaagtatcaagtacaataaatgggtgtattgtactttaataaatgaagttgtgagaggtcgagttacttcaacaagtatttactaagggtcaaaaatgtgccaaaaccaatgctagacttagggaataaaatgataaattaaaaacagaaaggttttgcagttcaattatgagatgaaagacataaattacgtgttattcctctaacaatggcacaaaaagaacagtaagaaattaactaccagggaggctctcatgccagcatattgtatatgtacttatttctccagtctgggtgacttctggaaccataaaatttttatgctgaaaggttttcaccccttagaatagagttcaactttctcgtttcacagatgagatccagcaacattagctgacttgcttaaaatgatactgcatctccgtatctttactgtttactactaataaataatgctgtatcattaaggatgattctgatttttcacaatgaattctggacacttttttttttcatcgttatccttgaggactatttcagactcatttattacttgctgagtgtttgtacagcttacacttggtaaacagaagtgatctcgaaaattttaagcaccgctattacttctctcagttgcacgacacttttgccagagacagaattccttaactagtggcaaatcccatttacttttgcagagaacaagactagaatcgaaaacaaccttctcatggaaaatctagtgcttagcctaggcagttttcaggcaatggtttatctaactttaacttcatgcttaacatcacaaagctggacaacagagaaacctccctgtgacataggctaacttaaacttacatcatcaaccattttcatctgtaaaatatactacagagcaacaacaaaaaccatcttaacactaaacaaataggaatgataggtggtcattgaggccatggaaaacttttatttccctgaggatattttatagtagcataatacaggtatccaggaaaaaaacctaccaaaaactgagtattaaaattgctctgaaattttctaagctttaatttagtactaatctatgtgtacacataaacgttaactgcaaaacagccttctattccagcagtggctctacgaggtagccactttggtttcttataatttacattttgttgcaaactctaataacggctcgaaacatagacaaatctttttccactgcgaaggaggtaagcactggattgaatactaggtcacttctctaggggactgtctttttattgaacaaggcacggcataaataaatgtttaaattcactttttaaaatactagaacccggccgggcgcggtggctcactcctgtaatcccagcactttgggaggccgaggcgggtggatcatctgaggtcaggagttcgagaccagcctggccgacgtggtgaaaccccgtctctaccaaaaatataaaaaaattagccgggtgtggtggtgggcgcctgtaatcccagctactcgggagtctgaggcaggagaatcgcttgaacccgggaggcggaggttgcagtgagccaagatcgcgccatcgcactccagcctgggcgacaagagcaaaactccgtctcgaaaaaatacaaaaaaacctgcaacccaagaaaaatagtattactctttaagtatactgaggcccaaaacactaaacaaaggaagacagtaaaagaaacgggtttaaactcaatcacctaaataatagaggggtatgggggaaaaagaaaatcatctgcctaatcccaggcattccaatcgttaggaagagcaaactttaaaactatcactatgtttaagagtcataattattatcgaaaatgatgtaattttttagtcagtaaaaaggaatgcaaaatctttacattttccttttaacggaataaaaatgaggtaagcacaaaataatgtggatccgtcagaattgggtatcttatacacacgcaggcttattgttcagaatagataatttacgaactgtagctcctctggggtcaacgaagagttttttttttttttttttttttttttttttttttttttgagacggagtctcgctctgtcacccaggctggagtgcagtggcgggatctcggttcactgcaagctccgcctcccgggttcacgccattctcctgcctcagcctcccaagtagctgggactacaggcgtccgccactacgcccggctaatttttttgtatttttagtagagacagggtttcaccgttttagccgggatggtctcgatctcctgacctcgtgatccgcccgcctcggcctcccaaagtgctgggattacaggcgtgagccaccgcgcccggccaacgaagggtttaaatttaaaggaacaaggtcagtgacaagacttaactgtaacgcttctcggacttcaaattgattacatcacgggccacttcggaaaccgcgcatcagtcagaattggtagttccacaaccttttaagttgaattttcactccctttcagcaataccttcctagctcgttaatacacaataataaggtttacacggacgaacactaattgaaattatgcaactagaagcatctcattgagcgtacaaaaaaaaaaatagctacaagtcgctctcttctcccacactaccctttacagacactgcctttttgacccaatacttttcagagaccactcctgatcgtctttctcttccccagcccctttctccaccgcaaattctcaggccctaaaaaaaacttagaataaatcactagccagggtgaataagcgaaaatggaggaagttcagtgaggcgaaaggaacgtagggttggggaagagaggaggaaagttctggaaaaaaaaaggcactccctgcggctccccacccccaccaacaccgccttacttccccctccctacagcaggcagccatgatggcgggcgcagaagaaggccgcggcgccattttgtctacacacatacacacgaacaaggttctgggagccgttcacccactgttggaacgtagcagaaaaatatccctggctttaaactcagattcggtacctaccgccatagttcagagtcccggccgctagagcggcgcctccacttgtcgctttcaacagtaccggccgctccgaagcttcgcctcagactaaatcgctcgcgcgagagacccggatggcacaaaggcgaggaggcccggcgcgtcgcacagcttgctgggagaaaaaggggcggtaacaaaagtttctataacaacgcaattcgaggcggtgattgggtgttctttcataggggagtgtaaagaccgtgaagagggcggggccaagaatacacccccggaatgcgcagtcgggagaacggaatgggcggaactcagggtggggcaacttcctatttcgagtctaaagtaatcttggtctcttccggccgccgtaaaggggttgggtttagtgttctcccgccaatttaagcctgtggcatggaacctaaagactagaggcggttgtgtgagtcaggaagaggggccagatatctgagtgttcctctttagtttcttcaattgcaggtgaggacggggagctgcgctgtgtagggaactgggggtgggttcaggacgaagtagctgcagcctctgctcagttcctgttgttttccccttgacgctggcaggagagaggttggagtcggtttttgctggcggcgatgtccagcggagagcgtttaagtatggaggcctaactgacaagtgtttcatcttgctcattctctcgtattcgcgaatctgttctgcattccgccgccagagtgatctcaaaattataaaatcagaccactcgtttgctgagttccccttctaccccttgtactgagaataaaattcaatcttgaggtcgaggttttattggactccactgctctctccctcactgtcttctgcttttgctttgacccggcagcagcatcaaacgcttcctacccagcctccgagtctttgcactctgttccctctgcctacgtcgcgttccgcctaagttttgcgtacttcttgttattcaggtctcagctcagatgtcacctccttcccttcccaaacaaatccttcttcagcgacgcctcaccttatccatttaatcactgtttccttcaaatcatttagcactttttgtaattatttgtgcagttgcttttttgtggaggtagcataacaagatacgtattaacaattttatttttgtccgtttttcccgcaaaaacataaacttcataatggcaaagacattttgtgttctgttcaagctatattcccagttcctagaaaggtgtctggcacatagtaaataggtattcaataaacatttgttgaataagtaaatatggcagttacgggcggtttctctatttcacagatgtgggaaattgagacccataaaggtattcattccaacctgtccctccttcttcatctcctcactcccacccaaacacc

SEQ ID NO: 1759 - DNA, 6000 bp, Homo sapiens
gcggccaaggtgggaggtttggttgaggccaggagtttgagactagcctgggcaagatagcgagaccctgtctctacaaatataaatacataaataaattagctggtcatggtggcacggtgtctgtagtcctagctacttgggaggctgatgtgggaggatcacttcaacccaggaagtcagggttgcagtgagctatgatcacagcactacactccagcctgggtgacagactgagaccctgtctctctctatatataaaaaaagagaacctgtaatcccagcacttgaggcagaggtggatagcttgtgcccagagtttgtgacctgcttgggcaacatagcaagaccccctcagtaaaaaaaaaaaaaagtatatataaattttatttcataggataatgctcaagatagactttcctaaggctggatttgatagttttttatagaaatgtttaaaccattattaattcttagaaagcactagatcttgttttaaacgttaattgtacttttagaagcataatttgtgttatttttcagaatgtagagtaagcgaaatgaaagattacctggtttaagaattcgatagcagcaactgctaagtgtaattatttatatccattatccataattattgaaattataaaaaagtattattatatgcttaaaaaattgagttttcagtttttatactttatgcttgtttgcatataataatcagtatgcactaacgtgaaagacctttaaaaatgcccatgcaaatgcaattaaaaatggaatgttttattaagtatattaaatgcttcccttaatgtatctactcataagctttttgtttatttgtttgtttgtttttgagacagagtcttgctctgttgcccaggctggagtgctatggtgcgatctcggctcactgccaccactgcctcccaggttcaagtgattctcctgcctcagtctcccgagtagctgagatcacaggcgagcgccaccatgcccagctaattcttgtatttttagtagagaaggggtttagccatgttggccaggctggtctcgaactcctgacctcaggtaatctgcctgatttggcttcccaaagtgctgggattacaggcatgagccaccgtggctagcccttattagcttttgataactgaattaacatgctttaggacaaaggaggcattgccacaatgtattttaacttctggaaaatttgtgtttaactagaaattgttacttttgataattagaaatcaaccttttttttttgacattagcatcttaagtcagaatcagaatatattccctgccccacctctcctctcccctccctcccaccccctccctccctcccttcctttcttccttccttccttttctttgtttctttttctcctctttcattctctctcttttctttctttctttttttttttttttttgaaatagggtctcattctgtcatccaggctggagtacagtggcacaatctctgttcactgtaccttcaacctcttgggctcaagccatcctcccacctcagcttcccaagtagctgggactacaggtgcacaccaccatgcccagctaatttttgcattttttgttgagacaaggttttgctatgttgcccaggttagtcttgaactcatgaactcaaatgatccacccaccttggcctcccaaactgctagaattacaggcatgagccgctgtgcccagcctctgagctctgtttttataacagctttcaaaataacatcaatttatattatcctgaaatgaaattcataggtaatataacctacctttacccgctttaaaaaatcaatatactatcctaaatgtgacataaaggagaaataaaaaatttacagtaaaataacatgtatttggatatatccatgtcaggcacatgttcattagaagacataatgaagtagtcatgtttacctgtatgtactcactgtgaattcagcagctgaacacagatcaatatagctatggtgtgttgatgatccaggtattgtgtacagcacctccactggtgacatgcttttctgaaagggtgaccaacttctcatgagattttgaaacttaagtttgttttgatgttatgaatactgtgcgaaatatttattgttttataacataaaatggacacaggacaattcttcatcatgggggactgccctatgatccgcatgcctggaccctgcccactaaatgccagtgatgtccccccagctttgtcatgaccgtgacctcacagatttccaacatggagttccttccccattgagatcactgcatcatatttaaatttaaaacttaggcctgtaatcccagcactttgggagaccgaggcgggtggatcacttgaggtcaggagttcgagaacagcctggccaacatggtgaaaccatgtctctactaaaaaatatgaaaattcggctgggtgcagtggctcacgcctgtaatcccagcactttgggaggccgaggcaggcggatcatgaggtcaggagattgagaccatcctggctaacatggtgaaaccccgtctccactaaaaatacaaaaaaattagccgggtgtggtggcgggtgcctgtagtcccagctacttgggggctgaggcaggagaatggcgtgaacccaggaggcagagcttgcagtgagccgagatcatgccactgcactccagtctgggcgacagagcaagactctgtctccaaaaaaaaaaaaaaaaaaaaatgtgtatatatatatatataaattagcaattagccgaacatggtgacacatgtctgtaatctcagctacttgggaggctgaggcatgagaattgcttgaacacgggaggcggaggttgcagtgagcccagatcatgccactgcactccagcctgggtgagagaacgagagactccgtctcaaaaaaaaaaataaataaataaataaaacttaatccttttagccatctatgagatattattattcccattttataaagtaggaaactgaggtacaaattaatttgtccaggaccccacgagtttttagtggagagcttggagttagagtggggcaggggtaggagacagagttcacaaagtgaacatttaagagactttctgatgtggcaaatactatgaaggaaataaataggatgacaagaaagaaaggaactgttaggatggtttgagaagatgacaattaggctgaaattgcagggtgggaagacagcagtcatggtgagagctgtgcaagagctcgcgaggtgatgggcacatcaggtgctcagctgtgaggtgggagacaattttggcatgctcacgaacagaggatgcccgtgaggcaggtgcgtagtcagcaaaggacagagggctgggatgaagtggagaggtgcgtaggagacagacagtgcagagccgtctaaggagagcttaggagtggaaagatgctgaaaggctttacgcaggcagttagttttcatagccacttcctgatgttgtatattgctgcatgtggtctgtggctgaaagtttcccagccttgaggctgaacgtagccttctgtagaactccctgctctcttggtgtggcgcgccagcatactctagctatgagagtgctgatggctcttgggatttgggatggatcatgacctaaaaagggctcttttacactggaggaattgttctgtgaaatgttaagtcaaaaaattatttttaactaaaatattttataatttaatagaccaggtggttacagctattcaatttggtggaaaaacaatgccaagaacagatagttgcccagcaggagcagttccacaaccaaattcaagtaagttaccatttacattgattcctttttttatatacatatacatacgtacatatacacacacacacacacacatatatatatacacacacacatatatagaaatggagtctcactcttgttgcccaggttggagtgcagtggcttgatctcagctcactacaacctctgcctcctgggttcaagccattcttctacctcagcctcccgagtagctgagattacaggcacctgccaacacgcccagctaattttggtatttttagtagagacgggttttgccatgttcactaggctggtctcaaactcctgacctcaggtgatccacccacctcggcctcctgcccagcccttttttacttttattttcatttatttttttttgagatggagtctcactctgttgcccaggctggagtgcaatggcacggtcttggctcactgcaaactccgcctcccaggttcaagcaattctcctgctccagcctcctgagtagctgggaatacaggtgtgtgccaccatacctggctaatttttgtatttttagtaccaaccatgttggccaggctggtctgggactcctgacctcttgatctgcccgccttggcctcccaaagtgctgggattacaggcgtgagccaccacacccagcatccttttttatatttgtaagaaaaaacaatacgttatatcaatttttttttttttttttgagacaaggtctcactctgtcacccaggctggcgtgcagtgacatgattttagctgactgcaacctctgcctcctgggttcaagaaattctcctgcctcagactcctgagtagctggaattacagatgcgcaccaccgtgtctggctaatttttagtagagtcagagtttcaccgtgttggccaagctggtcttgagctcctgaccttgtgatctgcccacctcggcctcccaaagtgctgggattacaggcgtgagccactgtgcctggccaccagcctcaattttgtttataaactaaagataaagtatcacattatctttagaataatatctcatcatattttgaaacatgatattcttgtaacagtcataaaaatatgatgtttaatatactttcttacccaaatctataactttttatttccagcatatacaggaggagataaaaaatttagtcaaattacagactagtagtgcttccttagcttcctgtgaaggaaattcttcaaacaaacaagtatcttcggaaagtcaaatgggttttttttctctaagcagtgagagaaatgaatctgttatccattatcctgaatccacagaacctgaaatacagcaagaaatgtccacgtcacaaccagactgcaatgtggatagttgctcagtaagcagtggatatggcaccttttgtatctcagaattaaatctgtacaaatctaaagaccctaaggagttcatggagcacatagatgttcccaaaggacagtatgtagcacctgcggtgccggctgagtcacttgtagatggtgtgaaaaatgagaatttttatatacagactcctgaagagtgtcatgtgtctttaaaggaagatgtatccatttctcctggtgaatttgaacataattttcttggtgaaaataaggtttctgaagtatacagtgggaaaacaaataggtaagtagaatttctatcatttgaagggagtttattacatttagaatctagtgttccttttaatgcactataatagaatgagatgtatttgaacatttatcagttcattgcctgtagaaaattgaaataaacaaagcacactatattctaatgacactgactttcttcccatctgtaatgttataagactactaaactcttaaggtcggaagctttgccagaaaatagaaaagatatttttagcagacaggactgtatcaatagtggaagtttgtcatacatgttcatgtaatttgaacaattttttttcgttttttgagacggagtctcgctctgtcacccaggctggagtgcagtggcgcaatctcggctcactgcaagctccgcctcccgggttcacgccattcttctgcctcagtctcctgagtagctgggactacaggcacccgccaccacgccaggctaattttttgtatt

SEQ ID NO: 1760 - DNA, 6000 bp, Homo sapiens
ctcagctattccagaggattatttcccccaactttcagaacagcccttcattgtgcagtggggattctttccccactgccccaaatgacagtcaaatcttgttcactggacacccttaatttggtacgataagctgatgcttatctctgcactatctctgcataaaagttgtgccaagcaaatcagcagcaaatattcaggacttatttagcctactcagtgtgtaaaacagcactgagtttttccaggagtactgcttttccaaacttcaggtaagttatttcggatttgttttataaacacacaatatatttcaggacattaaaatgtacttaaaatctagtcaccaaaagatcattttaatttatttactgcttgatatcctgctttctttcacaaataatttgtttaaaaaaataaataaaaataacaataaaataatagttaggaccagtgaaaatattactaaaaattcaaaggaggccaggcgcagtggctcacgcctgtaatcccagcactttgggaggccaaggcgggcggatcaccaggtcaggagatcaagactgtcctggccaacatggtgaaacaccatctctactaaaatacaaaaaattagccgggtgtggtagtgcgtgcctgtagtcccagccaatcaggaggctgaggcaggggaatcccttgaacccaggacacggagatcgcaatgagctgagatggcaccactgcaccccagcctagtgacagagcaagactccgtcaaaaaaaaaaattcaaaggaaagaatatatgttatcagtaaaggattttacatagctgtaataatcaagtttaaatgtggccaatttaactgccagtcacaatgaaaaggaagacaagtttaattgcctaattttcactagcaaggcacagttagcttcctccagccaaatcaaacactgttctaacaggaatatcttctagaagtgtactttaaagggaccaccaagtaatacaagaaccaaaatgcgtggccaactttctgcaagtgcatacagattactgtaggaccatttcctgtgccttttaaaatttccttttctcgttttatttcacatattcctttgttttttacaactccccacccccattgttttatatacccatgtaagctgccttaaattcctcctgaaaagggcagagaattaacaacttttaaagtaatgtatttatttataatacacaatttcttcaagacctaccgtgtttaaagctccttgcccctttaccagtaaggccccaaaaccgctgttttccttccttgtacccgctctttatagatgctctcctctcttacagtccttgcctctttgctgtttctacactactataaatttagaaacccaataaccaagcttgtcagactatgtgcaaattgaaagtaaacaggctctgatgaaaaacaaaccatgatctgtgttaagaccattaaaaaataaaaaaccaatcacaggatagcttaaaaataaaatgcattttaaaaaattaataaaatgcataaaacacactttgataacatctatttagtccactattttgtctacttagagtctgttattgtcttaacttcctaatactcaactttaactgctacttcccacattggtgaagtatttctgcaacataaaacatcaattgtcccaatcatttaaaaatgtagaaataatatttaggcaactaaatgttaaagatatgcttgtaatttaccaaaaacaaacaaaaaagtataaaggaaagtaaaacaagcaaaacaagttctttttcagaatgctttccatgcaaaagtacatatctctgagagaaatgagaaacatgaaaagaccaaacctattcctgacttaaacatctgtccccgaacattttttttttttttttttgagacagagtgtcgctctgtcgcccaggctggagtgcagtggcgcaatcttggctcattgcaacctctgcctcccaggttccagcaattctcctgcctcagcctcctgagtagctgggactacaggcgcgtgccaccacacctggctaatttttgtatttttagtagagacgaggcttcaccatgttagccaggctggtctccaactcctggcctcaggtgatccacccgcctcagcctaccaaggtgctgggattacaggcatgagccaccgcgcccagcctccctgaacattcttgatgataggttaaaaaataataataattcaaatcagtaactatgacactatttggataagttgataaacgtatgcaaataaggttattctgatttggtacattttttttaaatcccattcttacctatcagtatttaagttcagtccaagagaatgaagagaattttcatcagatcctacagaagatgaagttttgtgtaaggttttcaccaagtcaaactcttccatagtgtacagaaattgttatattctcttattggaaaataaaggttcttgggctgtttgagaaaaatgaatccgtgtcatcttcagaggcttcatcatctactggcattttcagtggctaacattcagaactgtgaaatatcctaaacttccaagagagtctgaaaatgaatgggggaaaaaaatactactataaaaagccaccaaagctagcaactgtttttacataactttggaaaccttaactgctttcatacagatctccattaaggatagcaacagtattcataataatcaaaatgtagaaaccacccaaatgtccatcaatggataaatggataaacgaatgaagcatattcatagaacaggataggattcagccataaaaagacacatgctacaacatacatgaacactgaagatactatgctaagtaaaaaaagccagtcacaaaagaccacagactatatgatttcattgatatgaaatatcttgaatgggcaaattcatagacaaatggctgccaggagctggggaaggagagaatgtgagtgagtgcagctggtatggagtttctttttggggtgataaaaaattctggaattagatagtggtgatggctgcacaaccttgtgaactaaaaaccactgaattgtacacttgtaaaagactgaattttatggtatgtgaattatgtatctcaattaaaaatctacattaaggattatttgcaaaagtagcatcacctttttcaggtaatatttcagatttttatatgtttaataatcaaggttcttttttttagagacagcatcttgctatgttgcccaggctggtctacaactcctggcctcaagtgctcagcctcccgagcagctgggattatagcgcaaaccattttgccaggctttacaatgaaagttctagatataattctattatgtaacaattggaatacttgcatgccttgttcatttgtttaataaattctaccaagtatatatgtttgttgacttatacagagacaagaagaactgaactacttaatatttaatttgtattaaaaagagccaattaaactgttaacaaccatagcttccccattgtctggaagtacattttgaactatatatatggtcttttgtctctgtgcagctattcttagaaaataaaccactgggcacactggagcctgcctgcagctactgggagcatgtcccagctactctggaggctgaggtgggaggatcacttcagcccaggagttcaagactgcagtgagctatgatcctgccactgcactccagcttgggcaacagaccaagaccccatctcttaaaaaataaaaataaaaataaaaaaattatttgccaggccaactaaaatttcagtgaagctggatatataccatggcaaattggctgtaacaggtcaaacaagatgcctccttcctggggaattcatgcacttataaaagagcaagggagcaagaggaaaaaggagaaagaaagaaaacttcagctgcttacaaactgaaaagcttagagagtgcaacaggaatattatctagtattccgcttctgctagattcccactttctagggcctgcttttataaagcattacacaaaaacagggaccatttccttcagggacaggagtgaatgcaaagggtaaccggacctaactaaatggacttttccccagtggctcagcccatcacccacgacaaatggggcattgaaacagtcaaggactgccccttccaactggcaacagaaatacctggattccaatcaccatgctattacaccaggaaaacacaagctctccagggagatgaacctgcaaccccatctattatttcccctgctaaggtaatccggatccggatgcagatccagatggaaaaccactagaaattcaaagatgcttctccatttggggtggaggtgctggggggagggcagggaagtaagagggaaaaatccttaaacacccacaaatacaatgcaaaaaaaaatttttttaacttgatacagaatgaatataagagcagagcttttatatttcccagcaacaagatatgacgcttttggtgtccctaccccctagcaaaaaaagggagctggggaaaaggaacgattgatggttatgaaacatgaaagttaactgggcgctccgccttgacgggaggcttgggggagaggaagagatttcagatggggatgaggccagatcccgacattctgagctcacagtcagcccgcaatggctggtggcggctatcgggtcaaagtgggaaggagagggagaatctatgcagtcgcctaagctacggaaagcagggaggacggagaaaagccaccgctcctgcaactacaaccgcgattccaaaaggaaaccggggcaccttggcaaaaaatggggggaaaaattaaaaaaaccccacaaaccccccgcccctcaggaagagcgatctgcgattgggccgcgcgagtgtcactcaagggcgccgagtctagaaaaggcgcaccgcggccgggcagagctcccacacgccgaagggctccgagggggtcaggccaatcggcagccgtcaccccacaccccagcccatcaccacactcaaggggccgctaagacagtgtctcctaagtctcgtctcctgtccccagcggcctacagctccctgcaggctggtggccgcttacctggccgccgctcccgctgccgatgtcagggtcatgcaagcggcctctcgcgaccgttacccgagggagcgcgcgcgcgcccggcgtctctccagtgattggctgcccggaaggaggcggagacagcctcgcatggcgcgcgcgtccacctcgccgttccccctcgcgcagctccaaccaaagagagacatccaaccccgggggagtgacaagggggcgggattgctgtgaaactctcttctctgattggctctctgggagccagccgctgccacgagggaaagaagcttcagtttctcgcatgcgcagtgagtaaacatgagcctctggtagataagagaaaccgcgatcggagtacggcgcgtgcgcagatcagggatcgcgattgcgaatcctccgctgaggtgatttggatatccctagaacgttgagggcacgagtcgggtcctgagaccaggtaagcatctgcggagaagccaggtaaccctacggctgccgacgactgtcaaaggctccggagagaggactgcgagccgggacgcctgggtttttcccgacttgcgaccccgagtggcgcagccagtttacctgaggccgcgctggcggtggggtggggccggccgtgacacccgagctcagttttctcgggacctggtttacgctaggtgctgtgggtcggccctggggctgttcaggcactcagggcaggggagaggagagactaccgtcctggagataacggttccacggaggcccaaggcgaaacggaaggatcctcatgtacaaaactgagcggaatggagctgtgagcacgcatcaggtgctgtttcaggcctggcacgtagtagaggt

SEQ ID NO: 1761 - DNA, 6000 bp, Homo sapiens
ctgggcaacatggtgaaaccccctctgtactaaaatacaaaaaattagccagatgtggtggtgtgcacctgtagtcccggctactcgggaggctgcagcagaataatggattcaacctggcaggcagaggttgcagtgggctgaggtcacaccactgcactccaccctgggtgacagagtgagactccgtctcaaaaaaaaaaaaagtgttttggtgctgtctgtaaaatggtagttaaaaagaaagtagcatttccctgtctttcacatcctcctgttagctcatcctcctgctgtaggtatctgaaatccttaagggctgaaacctctcaaatggaaccagtgagtattgctggtaaggcttgaaacagaccatgccatttcctagacttggggttttacgctgaagataaagcacccttcactcacagtaagtgtttgcagatagttatttctcaaacaaggaaagcataatagattgagcaggaaatgcagagctgtagtctttgattttggcggacgggaggaaaaagagactactctaggtctggtctaaatttaacaggcttaatgcttgaatgcttaatgctgcagaattcaagagatagctaatgaagtaaagaggaaaacattcacttcacacaatcccaacatctcgttcatttttattttatttttgagccggagtttcgcttgtcacccaggctagagtgcaatggcgtgatcttggctcactgcaacctctgcctcccaggttcaagtgattctcctgtctcagcctcctgagtatctgggactacaggcacctgccatcatgcccggctaattttgtatttttagtagaggcgggggtttctcctgacatcaggtgatgcgcctgccttggcctcccgtagtcctgggattacaggcgtgagccacagtgcctggccccgtttatttttttttaagcagaaaactttgaatccacagaattacacctgtgctatttgtgtgtatcatatttcttctatttttttttttagccggagtctcactctgtcacccagcctggactgcagtggcgcaatctcagctcactgcaacctccgccttccagattcaagcaattctcctgcctcagcctcccaagtagctgggactacaggcgcatgccgccacgcttggctaattttttgtatttttagtagagatggggattcaccgtgtttctcaggctggtgttgaactcctgacctcaggcgatccgcccgcctcggcctctcaaagtgctgagaggtgtgagccaccgcgcccggccccatatttgttctatttatggcatctaacgggaactttataatttatcaactacactattaaaacagaaacacattaaaaaagcaggaataacaacactgtatattttcttccaaaagtctcaaagcctatatttctattaacgatgccttgtgtttgtttaggacttaaacatatacaaaccaaagcagtttcttcttcttttttttttttttgagacagggtctccctctgtcacccaagtggagtgcagtggcataaaaatggctcagtgcagccttgacctcctgggctcaagcaagcttctttgcctcagcctccccagtagctggggccacaggtgtgtaccaccatacctggctagtttttaattttttgtagagatggggtcttgccatgttgcccaggcaggtctcgaactcatgggctcaagcaatcctcctgcctcagcctcccaaagtgatgggattacaggcgtgagccaccacgtgcagctgcaaagcactttcaaatacattattgtatttaatacaaataaagaaaataagagatgcacacttcctgattatctcagtaagacctatcttggaaaccattaggttttcaatttttgaaactaaattatcctttctacaccttgtttcattacctttcatatctccagatctttttccagtttcttaggcaatgttagctccttttccttaactttttctgttttaagtttttatttatttatttttttgagacgagtctcactctgttgcccaggctggagtgcagtggcaccatcttggctcactacaacctttgcctcccgggttccagcgattctcctgcttcagcctcccaagtagctgggattataggcaccagccaccacgcccagctaatttttgtattcttagcccagatggggtttcaccatgttggccaggctggtctcgaactcctgacctcaagcgatccgcttgcctcggcctcccgaagtgctgggagtacaggcatgagccaccacgcccggccaactttctctttttaaaaagactagtcaagtacagtagagaagggggaaagagtagaacaagaagtttgatctgtgactgtgaacaattaattaagataactcactaccaggccgagcgcggtggctcacgcctgtaatcccagcaccgtgggaggccgaggcaggtggatcatgaggtcaggagatcgagaccaacctggctaacacggtgaaaccccatctctactaaaaatacaaaaaaaaaaaaaattagctgggcctggtggcaggcacctgtagtctcagctactagggaggctaaggcaggagaatggcgtgaacctggggggcggagcttgcagtgagctgagctctgtcacacacacacacacaaaactcactacgtttggaccagcctgactttctgtatttgacgactcctctcattttttcttttgtcccaaaaaggccttcctgccaaggattgcgagctctgtggccaacagacctgcgttcaatgtctcaatgccacaatttacttactgggtaactttggctctaattcctcatctgtagaatggagatactactacctagagtgcgaacaaaatcatacatgttgccataaatgtaaagtacttagtggtcactaaatgggagcatgtcagatctctcaactacaaggctgaggaactttggaatgacacaccacatacactgttgtcttatgacacaaacccagtctgggaactgattatttcatcggcctttgttttagagcttagggtgaaaaggcatctacaacagtggcttgtaaattattttacttggtatggtccaatttaagaagtacttgataagccatgacattactgaaaacatgttatttggtgggatcataattctggtctgtgaaatcaggtactaaggagatcactgtgatgccaaaaatatagcctgacttcccagcaggttcacactgaaagataaaaccatcttcaatgaagtaagtcctggtttaaacataaaatatcttttggaattatgtaatataatttaaaaaatcatgaaagataggataacatcaaatttaccctttgaaaattgccaggcgtggtggctcatgcctgtaatcccagcactttgggtggccgaggcaggaggatgacctgaggtcaggaattcgagaccagcctggccaatatggcaaaaccccgtctctactaaaaatacaaaaaattagccggatgtggtggcgggcaccggtattcccggctactcgggaggctgaagcagaagaatcacttgaacccgggaggcagaggttaaagtgagccgagatcgcgccactgccctccagcctgggtgacagagagagaccttgtcccccctacccccctcccccacaaaaataaaaaaagtaaaaaaaaattggtaggtatacttaggaagctccaatgagatgtaacgcctcctggcagatctgttattccaagggcagatccatttcctgggttgtggaggcctaagtgatagtgccagggaagtccctttactgtgagccagaactcctggaggtaaatcgagtagctggaaagaccttaaaggttaactatgctgaagaatgtggcctgcacagtgcgcatgaaatgggctggggtcccacggggaggagagcgagttccctttggtccttcaaaagtagggctgggtggcttgcgcctgtgatcccagcactttgggaggccgaggaaggaggatcgcttgaggccaggagttcgagatcagcttgggcaacacagtgagacccccccaccccacgtctattaaaaaaaaaacgagtatctccgcaaaagcctagcaagggcagtgctgacctctactacgtgccaggcctgaaacagcacctgatgcgtgctcacagctccattccgctcagttttgtacatgaggatccttccgtttcgccttgggcctccgtggaaccgttatctccaggacggtagtctctcctctcccctgccctgagtgcctgaacagccccagggccgacccacagcacctagcgtaaaccaggtcccgagaaaactgagctcgggtgtcacggccggccccaccccaccgccagcgcggcctcaggtaaactggctgcgccactcggggtcgcaagtcgggaaaaacccaggcgtcccggctcgcagtcctctctccggagcctttgacagtcgtcggcagccgtagggttacctggcttctccgcagatgcttacctggtctcaggacccgactcgtgccctcaacgttctagggatatccaaatcacctcagcggaggattcgcaatcgcgatccctgatctgcgcacgcgccgtactccgatcgcggtttctcttatctaccagaggctcatgtttactcactgcgcatgcgagaaactgaagcttctttccctcgtggcagcggctggctcccagagagccaatcagagaagagagtttcacagcaatcccgcccccttgtcactcccccggggttggatgtctctctttggttggagctgcgcgagggggaacggcgaggtggacgcgcgcgccatgcgaggctgtctccgcctccttccgggcagccaatcactggagagacgccgggcgcgcgcgcgctccctcgggtaacggtcgcgagaggccgcttgcatgaccctgacatcggcagcgggagcggcggccaggtaagcggccaccagcctgcagggagctgtaggccgctggggacaggagacgagacttaggagacactgtcttagcggccccttgagtgtggtgatgggctggggtgtggggtgacggctgccgattggcctgaccccctcggagcccttcggcgtgtgggagctctgcccggccgcggtgcgccttttctagactcggcgcccttgagtgacactcgcgcggcccaatcgcagatcgctcttcctgaggggcggggggtttgtggggtttttttaatttttccccccattttttgccaaggtgccccggtttccttttggaatcgcggttgtagttgcaggagcggtggcttttctccgtcctccctgctttccgtagcttaggcgactgcatagattctccctctccttcccactttgacccgatagccgccaccagccattgcgggctgactgtgagctcagaatgtcgggatctggcctcatccccatctgaaatctcttcctctcccccaagcctcccgtcaaggcggagcgcccagttaactttcatgtttcataaccatcaatcgttccttttccccagctccctttttttgctagggggtagggacaccaaaagcgtcatatcttgttgctgggaaatataaaagctctgctcttatattcattctgtatcaagttaaaaaaatttttttttgcattgtatttgtgggtgtttaaggatttttccctcttacttccctgccctccccccagcacctccaccccaaatggagaagcatctttgaatttctagtggttttccatctggatctgcatccggatccggattaccttagcaggggaaataatagatggggttgcaggttcatctccctggagagcttgtgttttcctggtgtaatagcatggtgattggaatccaggtatttctgttgccagttggaaggggcagtccttgactg

SEQ ID NO: 1762 - DNA, 6000 bp, Homo sapiens
tggccaacatggtgaaacaccatctctactaaaatacaaaaaattagccgggtgtggtagtgcgtgcctgtagtcccagccaatcaggaggctgaggcaggggaatcccttgaacccaggacacggagatcgcaatgagctgagatggcaccactgcaccccagcctagtgacagagcaagactccgtcaaaaaaaaaaattcaaaggaaagaatatatgttatcagtaaaggattttacatagctgtaataatcaagtttaaatgtggccaatttaactgccagtcacaatgaaaaggaagacaagtttaattgcctaattttcactagcaaggcacagttagcttcctccagccaaatcaaacactgttctaacaggaatatcttctagaagtgtactttaaagggaccaccaagtaatacaagaaccaaaatgcgtggccaactttctgcaagtgcatacagattactgtaggaccatttcctgtgccttttaaaatttccttttctcgttttatttcacatattcctttgttttttacaactccccacccccattgttttatatacccatgtaagctgccttaaattcctcctgaaaagggcagagaattaacaacttttaaagtaatgtatttatttataatacacaatttcttcaagacctaccgtgtttaaagctccttgcccctttaccagtaaggccccaaaaccgctgttttccttccttgtacccgctctttatagatgctctcctctcttacagtccttgcctctttgctgtttctacactactataaatttagaaacccaataaccaagcttgtcagactatgtgcaaattgaaagtaaacaggctctgatgaaaaacaaaccatgatctgtgttaagaccattaaaaaataaaaaaccaatcacaggatagcttaaaaataaaatgcattttaaaaaattaataaaatgcataaaacacactttgataacatctatttagtccactattttgtctacttagagtctgttattgtcttaacttcctaatactcaactttaactgctacttcccacattggtgaagtatttctgcaacataaaacatcaattgtcccaatcatttaaaaatgtagaaataatatttaggcaactaaatgttaaagatatgcttgtaatttaccaaaaacaaacaaaaaagtataaaggaaagtaaaacaagcaaaacaagttctttttcagaatgctttccatgcaaaagtacatatctctgagagaaatgagaaacatgaaaagaccaaacctattcctgacttaaacatctgtccccgaacattttttttttttttttttgagacagagtgtcgctctgtcgcccaggctggagtgcagtggcgcaatcttggctcattgcaacctctgcctcccaggttccagcaattctcctgcctcagcctcctgagtagctgggactacaggcgcgtgccaccacacctggctaatttttgtatttttagtagagacgaggcttcaccatgttagccaggctggtctccaactcctggcctcaggtgatccacccgcctcagcctaccaaggtgctgggattacaggcatgagccaccgcgcccagcctccctgaacattcttgatgataggttaaaaaataataataattcaaatcagtaactatgacactatttggataagttgataaacgtatgcaaataaggttattctgatttggtacattttttttaaatcccattcttacctatcagtatttaagttcagtccaagagaatgaagagaattttcatcagatcctacagaagatgaagttttgtgtaaggttttcaccaagtcaaactcttccatagtgtacagaaattgttatattctcttattggaaaataaaggttcttgggctgtttgagaaaaatgaatccgtgtcatcttcagaggcttcatcatctactggcattttcagtggctaacattcagaactgtgaaatatcctaaacttccaagagagtctgaaaatgaatgggggaaaaaaatactactataaaaagccaccaaagctagcaactgtttttacataactttggaaaccttaactgctttcatacagatctccattaaggatagcaacagtattcataataatcaaaatgtagaaaccacccaaatgtccatcaatggataaatggataaacgaatgaagcatattcatagaacaggataggattcagccataaaaagacacatgctacaacatacatgaacactgaagatactatgctaagtaaaaaaagccagtcacaaaagaccacagactatatgatttcattgatatgaaatatcttgaatgggcaaattcatagacaaatggctgccaggagctggggaaggagagaatgtgagtgagtgcagctggtatggagtttctttttggggtgataaaaaattctggaattagatagtggtgatggctgcacaaccttgtgaactaaaaaccactgaattgtacacttgtaaaagactgaattttatggtatgtgaattatgtatctcaattaaaaatctacattaaggattatttgcaaaagtagcatcacctttttcaggtaatatttcagatttttatatgtttaataatcaaggttcttttttttagagacagcatcttgctatgttgcccaggctggtctacaactcctggcctcaagtgctcagcctcccgagcagctgggattatagcgcaaaccattttgccaggctttacaatgaaagttctagatataattctattatgtaacaattggaatacttgcatgccttgttcatttgtttaataaattctaccaagtatatatgtttgttgacttatacagagacaagaagaactgaactacttaatatttaatttgtattaaaaagagccaattaaactgttaacaaccatagcttccccattgtctggaagtacattttgaactatatatatggtcttttgtctctgtgcagctattcttagaaaataaaccactgggcacactggagcctgcctgcagctactgggagcatgtcccagctactctggaggctgaggtgggaggatcacttcagcccaggagttcaagactgcagtgagctatgatcctgccactgcactccagcttgggcaacagaccaagaccccatctcttaaaaaataaaaataaaaataaaaaaattatttgccaggccaactaaaatttcagtgaagctggatatataccatggcaaattggctgtaacaggtcaaacaagatgcctccttcctggggaattcatgcacttataaaagagcaagggagcaagaggaaaaaggagaaagaaagaaaacttcagctgcttacaaactgaaaagcttagagagtgcaacaggaatattatctagtattccgcttctgctagattcccactttctagggcctgcttttataaagcattacacaaaaacagggaccatttccttcagggacaggagtgaatgcaaagggtaaccggacctaactaaatggacttttccccagtggctcagcccatcacccacgacaaatggggcattgaaacagtcaaggactgccccttccaactggcaacagaaatacctggattccaatcaccatgctattacaccaggaaaacacaagctctccagggagatgaacctgcaaccccatctattatttcccctgctaaggtaatccggatccggatgcagatccagatggaaaaccactagaaattcaaagatgcttctccatttggggtggaggtgctggggggagggcagggaagtaagagggaaaaatccttaaacacccacaaatacaatgcaaaaaaaaatttttttaacttgatacagaatgaatataagagcagagcttttatatttcccagcaacaagatatgacgcttttggtgtccctaccccctagcaaaaaaagggagctggggaaaaggaacgattgatggttatgaaacatgaaagttaactgggcgctccgccttgacgggaggcttgggggagaggaagagatttcagatggggatgaggccagatcccgacattctgagctcacagtcagcccgcaatggctggtggcggctatcgggtcaaagtgggaaggagagggagaatctatgcagtcgcctaagctacggaaagcagggaggacggagaaaagccaccgctcctgcaactacaaccgcgattccaaaaggaaaccggggcaccttggcaaaaaatggggggaaaaattaaaaaaaccccacaaaccccccgcccctcaggaagagcgatctgcgattgggccgcgcgagtgtcactcaagggcgccgagtctagaaaaggcgcaccgcggccgggcagagctcccacacgccgaagggctccgagggggtcaggccaatcggcagccgtcaccccacaccccagcccatcaccacactcaaggggccgctaagacagtgtctcctaagtctcgtctcctgtccccagcggcctacagctccctgcaggctggtggccgcttacctggccgccgctcccgctgccgatgtcagggtcatgcaagcggcctctcgcgaccgttacccgagggagcgcgcgcgcgcccggcgtctctccagtgattggctgcccggaaggaggcggagacagcctcgcatggcgcgcgcgtccacctcgccgttccccctcgcgcagctccaaccaaagagagacatccaaccccgggggagtgacaagggggcgggattgctgtgaaactctcttctctgattggctctctgggagccagccgctgccacgagggaaagaagcttcagtttctcgcatgcgcagtgagtaaacatgagcctctggtagataagagaaaccgcgatcggagtacggcgcgtgcgcagatcagggatcgcgattgcgaatcctccgctgaggtgatttggatatccctagaacgttgagggcacgagtcgggtcctgagaccaggtaagcatctgcggagaagccaggtaaccctacggctgccgacgactgtcaaaggctccggagagaggactgcgagccgggacgcctgggtttttcccgacttgcgaccccgagtggcgcagccagtttacctgaggccgcgctggcggtggggtggggccggccgtgacacccgagctcagttttctcgggacctggtttacgctaggtgctgtgggtcggccctggggctgttcaggcactcagggcaggggagaggagagactaccgtcctggagataacggttccacggaggcccaaggcgaaacggaaggatcctcatgtacaaaactgagcggaatggagctgtgagcacgcatcaggtgctgtttcaggcctggcacgtagtagaggtcagcactgcccttgctaggcttttgcggagatactcgttttttttttaatagacgtggggtgggggggtctcactgtgttgcccaagctgatctcgaactcctggcctcaagcgatcctccttcctcggcctcccaaagtgctgggatcacaggcgcaagccacccagccctacttttgaaggaccaaagggaactcgctctcctccccgtgggaccccagcccatttcatgcgcactgtgcaggccacattcttcagcatagttaacctttaaggtctttccagctactcgatttacctccaggagttctggctcacagtaaagggacttccctggcactatcacttaggcctccacaacccaggaaatggatctgcccttggaataacagatctgccaggaggcgttacatctcattggagcttcctaagtatacctaccaatttttttttactttttttatttttgtgggggaggggggtaggggggacaaggtctctctctgtcacccaggctggagggcagtggcgcgatctcggctcactttaacctctgcctcccgggttca

SEQ ID NO: 1763 - DNA, 6000 bp, Homo sapiens
gggtgatcctcctacctcagcctcctaagtagctgggactacaggttagcctccgctctcggctaatgtctgtatttttagtagagatgtggtcttgttatgtttcctaggctggtctcaaactcctgggctgaagagatccgccttcctcaacctcacaaagtgctgggattacaggcgcgcaccaccacggcccggctttctttttttgtttgtttttgtattttagtagagacggggtttcaccatgttggccaggatggtcttgatctcctgaccttgtgatccgcccacctcggcctcccaaagtgttgggattacaggcgtgagccaccgcgcctggccgagttgtatactttttttttttttttttgagacggagtctcgctctgtcgcccaggctggagtgcagtggcgccatcttggctcattgcaagctccgcctcccgggttcatgccgttctcctgcctcagcctcccgagtagctgggactacaggcgcccgccaccacgcccggctaattttttctatttttactagagacggggtttcactgtgttagccaggatggtctcgatctcctgacctcgtgatctgcctgcctcggcctcccaaagtgctgggataacaggcgtgagccaccgcgcccggcctcttaagttgcatacttttaaaggatgaattttatgctaagtgaataatatctcgattagaataaaaaacgaaaagatttttttcttttctttcttttttcttttgagacacagttttgctctatcgcccaggctggagcaatggtgccattgtgggtcagtgaaacctccgctttctgggctccagtgatccttccacctcagcaccccagcaccccagcccctcagcccctcagcccctcagcccctcagcacctcagcacctcagcacctcagcccctcagcccctcagcaccccagcccctcagcacctcagcccctcagcaccccagcccctcagcacctcagcccctcagcaccccagcccctcagcaccccagcccctcagcacctcagcccctcagcaccccagcccctcagcccctcagcacctcagcccctcagcacctcagcccctcagcccctcagcacctcagcctccagagtagctgggaccacgggcgcgtgtcactatgccccagctaatttttgtatttttagtagagatgggttccttctttctttctttctttctttctttcctttctttctttctttttctttctttctttctttctttctctttctttctttctttctttctttctttctttctttctttctttctttctttcttctttttctttctttctttccttccttccttccttccttctttctttttctttctctttctttctctctctctctttctctctttctttctttcttattttgaaacggagtctcgctctgtcgcccaggctggagtgcagtggcgcgatctagtctcactgcaagctccgcctcccgggttcacgccattctcctgcctcagcctcccgagtagctgggactacaggcgcccgccaccttgccgggctaatttttttgtatttttagtagagacggggtttcaccgtgttagtcaggatggtctcgatctcctgacctcgtgatccgcctgcctcggcctcccaaagtgctgggattacaggtgtgagccaccgggcctggcgacatgggttctttctatgctgcccatgctggtcttgaacccctgggctcaattgatctgcctgccttggtcttccatagtgctgggattacagaagtgagccatcgtgcccagctgaaactttttttttttctttgtgacggagtctcaccgtcacccgggtttgagtgcagtggctcgatcttggctcactgcaacctccgcctcgtcggttcaagcaattctgcctcagcctctcgagtagctgggactacaggcacgcaccaccacgcccgcctactttttgtaattttagttaagatggggtttcactatgttggccaagctagtctggatctcctgacctcaggtgatccgcctgcctcgccctcccaaagtgctgggattacaggcgtgagctgaaattttttttttctgaggtggaatcttgctctgtcacccaggctggagtgcaagtggcaggatcttggctcactgcaacctcctcccggtttcaagcaattctcctgtctcagcctcccgagtagctgggattacaggcgcctgccaccacgccccgctaattttttctatttttagtagagacgggtttttgccatgttggccaggctagtctcgatctcccgacctcgtgatctgcccgcctcggcctcccaaagtgttggggttacaggcgttagccactgtgctcggccaacagttttaaaatgatgccatggacttagagcgaggagtggggacaatggaaaaaatacaacgctattggctgacgcctgttatcccagtgctttgagatggaggtggaggcgggaggatcacttgagcccaatagttcaagactacagtgagctacgatcaagccactgcactccagcctgggtgacagagggagaccccggttcttaaataacaatatggaaatagatcggttcagagcactcatagaaaggaccgggcctgccactgagatctggattcttgccccgaagaaatggaggcctagtcaaacagccagtgggtgggggagtcagagtcagtacccggtgtgtccgtcgcaggagccctccgctagtagctgcagccctgcactgttcaatacggtgacccctagctatggtggctactgagcgctgaaacgtggctagtctgaattaaaatgcgttgtaagtataaaacacacactggattgcgaagacttcgtatgataagagaatgtaaagtgtcttattaataattcctttcaattcattatatagtgaaatcacgctgttctggagctattgtattaaataaaacatgttaaaatcaatttcaccagtgttttttgactttctcaaatgtgactactgaaaaattgaaaattagctatgtggctggcattctatttccattggactgcgctgctctaaaggactgggcgcccgggaccagccacatgggtggcattaatttattcatggaataaggtttcactgagcattcttcgctagtgctggcctacagctgatctcaaggatgggggttaagctggggagggggtgtcgtcgcctgcgcctttggtcctaaaggaagaagcaggcctgggtgggcatccctaggtgggtgcctttgtcatcagatccggagatgatgcttgcacgcctgtgtctaattaaatctgcaaaccatgacgattaaaaacaacagaaaagggtgggcatcttatgtattttaacgagctttactacttcggcagaactccaagattaaaaaaaaaaaaaaccccaaaaaaccccacaaccttcaggttattcatctaatccaaatccaaaatacactggatggttacatttcaatcggatccaaggatgggctgggggtggggtcgaaggaggatctaaaattgtcccgtaaactccagggggtagaaactttgccaagttcaattcttgtatcctcagcgcttggaacagtgagtggcgcatagtaggtgcttcccttaaatactggagtgagtctacgcacgaaattgtgcgattcagggatgagttttccggggaggggggtgaggggtggagaaggcctctaagcttttgtcagtctcaaaggagtcttggatccccaaagggttaaaaaccacttcatacagacagagacatgaaatttatttgaaatcaatgtcaagcatcggttattctaatcctggggcttggccagacctgggcgtctggaatgatctacgtgcttaaatacaccactcgccaccattttctccaggtaattttccatccctgcccccaccatcaaggggaagaaagtgctcttcggattccggttcgccctggcctcccgcagccgccgcgggaccggcccccagcacacccccggggcgccgggcgcggggcagccgcccggacgcgcgcgggcctcaggcgccgccgggaccccagccccccaaactttggcaagttgcgggcgccgagcgcacccggaggcgcggggcgcggccgcaggcggagccgccccctgacgccgggccgccccctcccggccccggccgccccgccggctccgcggaaagtttgcggccgcccctgcgccgcacccggggcctgggtgagactgcggcggcggcagggcgcggacggccatatttgccggcgcggcccgagccgccgacaacaaaaagtgcgcgggcgctcggcgggcgctcggacgggcgcggggctgcagcgctaccgcccggcctcgccgccgccgccgccgccctcgcggcctggccccgccgcgcccggcgcgcccgccgcccggggggatgtcttacaaaccgaacttggccgcgcacatgcccgccgccgccctcaacgccggtgagtgagccgcgtgcgacgcgccccaagcgccgccaagttgggggtccgcgcgcccggccccggcccggggatgcccggggcgcccgcggaggccgggggcggggggctcagggtcccggcccggggcagcgctgccgccgccatgattcccgagcccgcgccgcgaaagttctctggtgcgccccgcacgccgagggcctcggctgggggtgcggggcgggcggcccggggtgacccccgcgccggcggctgcggatcgcagggagcgcggcgggcgagggcgagggcgggggaggcttgttctcggctcctttttcctccggcttctgggcggctcggcgagggcccctgccggcgggagtcgggagcggcccgggccgcgccgggagcggggcgcggggccccgccgccctggggagcggggtcgtgaagcagcccgggcggggggcgctgcgggcagggccaggacccgcgcgggcgggcgcggatggagggctgcggggctgcggggctgcggggctgccgggctgccgggggccctgaggtcgcggggccgccgggactgggaccaggatggggtcgccggcgggcagcgtactcggaggcccgggggcctcggccgggagcgtgggagcaggggctaccccatgcggtcacgcggggacccccgtaaggtgagcgcggagtgaacgaagttggcgcagctctggggctgctggggcccgcgcgcgggcgtgggggcagtgggtcacgtggacgccccatctgggagcccccaagggctggccctggaaggccctcgatgcagaagccgggaggggctcccctcaagcttcctggggctgcggccgcagccgggcgctcccaggaaactcctccagaagttgtcaggcagcttcgggctgagcccaggggaccgagggagccatggggagtgggcacaacattgagggattcgtaggtgccgggctttgtgacctcactggggcccttcttctctgacacttggtcggaaacagacttcccaaaaggcggttgtgttgcggggcgggatggggggaaggactcgacggggagaggagtggccccgttggtcaccggtgccacgctggctctcctgctcgagttttgggccttgtttgcaaacgttgacctcgtaaccccccaaatcggaagtgggacccataaaaacgatacctaaaaaaaatcttggacactgaggtgtaggggcaggaaagggttaagcgtcagggtgcggagggagagttgaattgctcacttgtgggctcggagtcccaaagagcaaacagccactgtttttttctcaaacattctcacctcctctggggtccgcagaccttacaaagacgggctttgttgccaggtaggactgccagcagccttcttcctctggcctgtggggagggcaggggctgg

SEQ ID NO: 1764 - DNA, 6000 bp, Homo sapiens
aaataaaacagggtgataatgttctagaattaggccaggcgcggtggcttacgcctgtgatcccagcactttgggaggccgagtcgggcggatcacgaggtcaggagatcaagaccatcctggctaacatggtgaaaccctgcctctataaaaaatacaaaaacaaaaaaaattagttgagcgtggtggcgggcgcctgtagtcccagctactcaggaggctgaggcaggagaatggcgtgaacccaggaggcagagcttgcagtgagccgagatcgcaccactgcactccagcctgggcgacagagcaagactccagcctgggagacacagtaagactctgtctcaaaaaaaaaaaaaaaaaaatgttctagaattagatagtggtgatagttgcacaactgcaaatatgctaaaaatcactgaattatatacttttttggggggtgaggggacagcgtctcactatcacccaggctggagtgcaatgccgtgatcttggctcactgcagcctcaacctccccgaggttagggtgatcctcctacctcagcctcctaagtagctgggactacaggttagcctccgctctcggctaatgtctgtatttttagtagagatgtggtcttgttatgtttcctaggctggtctcaaactcctgggctgaagagatccgccttcctcaacctcacaaagtgctgggattacaggcgcgcaccaccacggcccggctttctttttttgtttgtttttgtattttagtagagacggggtttcaccatgttggccaggatggtcttgatctcctgaccttgtgatccgcccacctcggcctcccaaagtgttgggattacaggcgtgagccaccgcgcctggccgagttgtatactttttttttttttttttgagacggagtctcgctctgtcgcccaggctggagtgcagtggcgccatcttggctcattgcaagctccgcctcccgggttcatgccgttctcctgcctcagcctcccgagtagctgggactacaggcgcccgccaccacgcccggctaattttttctatttttactagagacggggtttcactgtgttagccaggatggtctcgatctcctgacctcgtgatctgcctgcctcggcctcccaaagtgctgggataacaggcgtgagccaccgcgcccggcctcttaagttgcatacttttaaaggatgaattttatgctaagtgaataatatctcgattagaataaaaaacgaaaagatttttttcttttctttcttttttcttttgagacacagttttgctctatcgcccaggctggagcaatggtgccattgtgggtcagtgaaacctccgctttctgggctccagtgatccttccacctcagcaccccagcaccccagcccctcagcccctcagcccctcagcccctcagcacctcagcacctcagcacctcagcccctcagcccctcagcaccccagcccctcagcacctcagcccctcagcaccccagcccctcagcacctcagcccctcagcaccccagcccctcagcaccccagcccctcagcacctcagcccctcagcaccccagcccctcagcccctcagcacctcagcccctcagcacctcagcccctcagcccctcagcacctcagcctccagagtagctgggaccacgggcgcgtgtcactatgccccagctaatttttgtatttttagtagagatgggttccttctttctttctttctttctttctttcctttctttctttctttttctttctttctttctttctttctctttctttctttctttctttctttctttctttctttctttctttctttctttcttctttttctttctttctttccttccttccttccttccttctttctttttctttctctttctttctctctctctctttctctctttctttctttcttattttgaaacggagtctcgctctgtcgcccaggctggagtgcagtggcgcgatctagtctcactgcaagctccgcctcccgggttcacgccattctcctgcctcagcctcccgagtagctgggactacaggcgcccgccaccttgccgggctaatttttttgtatttttagtagagacggggtttcaccgtgttagtcaggatggtctcgatctcctgacctcgtgatccgcctgcctcggcctcccaaagtgctgggattacaggtgtgagccaccgggcctggcgacatgggttctttctatgctgcccatgctggtcttgaacccctgggctcaattgatctgcctgccttggtcttccatagtgctgggattacagaagtgagccatcgtgcccagctgaaactttttttttttctttgtgacggagtctcaccgtcacccgggtttgagtgcagtggctcgatcttggctcactgcaacctccgcctcgtcggttcaagcaattctgcctcagcctctcgagtagctgggactacaggcacgcaccaccacgcccgcctactttttgtaattttagttaagatggggtttcactatgttggccaagctagtctggatctcctgacctcaggtgatccgcctgcctcgccctcccaaagtgctgggattacaggcgtgagctgaaattttttttttctgaggtggaatcttgctctgtcacccaggctggagtgcaagtggcaggatcttggctcactgcaacctcctcccggtttcaagcaattctcctgtctcagcctcccgagtagctgggattacaggcgcctgccaccacgccccgctaattttttctatttttagtagagacgggtttttgccatgttggccaggctagtctcgatctcccgacctcgtgatctgcccgcctcggcctcccaaagtgttggggttacaggcgttagccactgtgctcggccaacagttttaaaatgatgccatggacttagagcgaggagtggggacaatggaaaaaatacaacgctattggctgacgcctgttatcccagtgctttgagatggaggtggaggcgggaggatcacttgagcccaatagttcaagactacagtgagctacgatcaagccactgcactccagcctgggtgacagagggagaccccggttcttaaataacaatatggaaatagatcggttcagagcactcatagaaaggaccgggcctgccactgagatctggattcttgccccgaagaaatggaggcctagtcaaacagccagtgggtgggggagtcagagtcagtacccggtgtgtccgtcgcaggagccctccgctagtagctgcagccctgcactgttcaatacggtgacccctagctatggtggctactgagcgctgaaacgtggctagtctgaattaaaatgcgttgtaagtataaaacacacactggattgcgaagacttcgtatgataagagaatgtaaagtgtcttattaataattcctttcaattcattatatagtgaaatcacgctgttctggagctattgtattaaataaaacatgttaaaatcaatttcaccagtgttttttgactttctcaaatgtgactactgaaaaattgaaaattagctatgtggctggcattctatttccattggactgcgctgctctaaaggactgggcgcccgggaccagccacatgggtggcattaatttattcatggaataaggtttcactgagcattcttcgctagtgctggcctacagctgatctcaaggatgggggttaagctggggagggggtgtcgtcgcctgcgcctttggtcctaaaggaagaagcaggcctgggtgggcatccctaggtgggtgcctttgtcatcagatccggagatgatgcttgcacgcctgtgtctaattaaatctgcaaaccatgacgattaaaaacaacagaaaagggtgggcatcttatgtattttaacgagctttactacttcggcagaactccaagattaaaaaaaaaaaaaaccccaaaaaaccccacaaccttcaggttattcatctaatccaaatccaaaatacactggatggttacatttcaatcggatccaaggatgggctgggggtggggtcgaaggaggatctaaaattgtcccgtaaactccagggggtagaaactttgccaagttcaattcttgtatcctcagcgcttggaacagtgagtggcgcatagtaggtgcttcccttaaatactggagtgagtctacgcacgaaattgtgcgattcagggatgagttttccggggaggggggtgaggggtggagaaggcctctaagcttttgtcagtctcaaaggagtcttggatccccaaagggttaaaaaccacttcatacagacagagacatgaaatttatttgaaatcaatgtcaagcatcggttattctaatcctggggcttggccagacctgggcgtctggaatgatctacgtgcttaaatacaccactcgccaccattttctccaggtaattttccatccctgcccccaccatcaaggggaagaaagtgctcttcggattccggttcgccctggcctcccgcagccgccgcgggaccggcccccagcacacccccggggcgccgggcgcggggcagccgcccggacgcgcgcgggcctcaggcgccgccgggaccccagccccccaaactttggcaagttgcgggcgccgagcgcacccggaggcgcggggcgcggccgcaggcggagccgccccctgacgccgggccgccccctcccggccccggccgccccgccggctccgcggaaagtttgcggccgcccctgcgccgcacccggggcctgggtgagactgcggcggcggcagggcgcggacggccatatttgccggcgcggcccgagccgccgacaacaaaaagtgcgcgggcgctcggcgggcgctcggacgggcgcggggctgcagcgctaccgcccggcctcgccgccgccgccgccgccctcgcggcctggccccgccgcgcccggcgcgcccgccgcccggggggatgtcttacaaaccgaacttggccgcgcacatgcccgccgccgccctcaacgccggtgagtgagccgcgtgcgacgcgccccaagcgccgccaagttgggggtccgcgcgcccggccccggcccggggatgcccggggcgcccgcggaggccgggggcggggggctcagggtcccggcccggggcagcgctgccgccgccatgattcccgagcccgcgccgcgaaagttctctggtgcgccccgcacgccgagggcctcggctgggggtgcggggcgggcggcccggggtgacccccgcgccggcggctgcggatcgcagggagcgcggcgggcgagggcgagggcgggggaggcttgttctcggctcctttttcctccggcttctgggcggctcggcgagggcccctgccggcgggagtcgggagcggcccgggccgcgccgggagcggggcgcggggccccgccgccctggggagcggggtcgtgaagcagcccgggcggggggcgctgcgggcagggccaggacccgcgcgggcgggcgcggatggagggctgcggggctgcggggctgcggggctgccgggctgccgggggccctgaggtcgcggggccgccgggactgggaccaggatggggtcgccggcgggcagcgtactcggaggcccgggggcctcggccgggagcgtgggagcaggggctaccccatgcggtcacgcggggacccccgtaaggtgagcgcggagtgaacgaagttggcgcagctctggggctgctggggcccgcgcgcgggcgtgggggcagtgggtcacgtggacgccccatctgggagcccccaagggctggccctggaaggccctcgatgcagaagccgggaggggctcccctcaagcttcctggggctgcggccgcagccgggcgctcccaggaaactcctccagaagttgtcaggcagcttcgggctga

SEQ ID NO: 1765 - DNA, 6000 bp, Homo sapiens
actgtggattcaggggcctgtagcctctcccattgagacgaaggaaaggaagtggagaggcagactccctaacaaggcctcgaactcactcacacacacacacttgctacaagactggaaggcagagagggtgctgtgaggaaacacaccacgtcctgccccgtggttttagacaaattagctttcatgagctgctcagctcttaatccattagggcagacacgtgtcaccttggttaagagcaccgtaagatccagccctgagacgcctgctgcatttaaaatacaatcgcacatcgatctggactctacctgtggccgaattcattatccagtctgggaagattaaccatcacaaagaatctatataaatgggatgggaagattaaaagtatccttacttcgaggagccgtatcatcaagtgcaaattaatttgtgcaaggtagcacacctgcgtctaagcccagtgtctgcgtataaagcccaggaattacgggagacattttgaagccaagtgatcctaatcaccgtcagacttcaggggcagcaaggctagcgagtgacgtcggaaaagccacaggacagagaccctgagccctcaggagcatatggccacaaccactgcgttacttaggtatgtctgaaatcatcctccggcctgagaacgtggcacagagtcactgggcaaagcacccaacggctctggctgacttcacatgctgactgacttcaagggctgtggcccactgggtttccccacacaggccccttaagcagcacctgccagcggcaatgaccaaggacattctcccagttgggtccgggagccagcgcctagtctctcaaactgtgaaatactcaggaacactgtgaacccgttgttaagtcacaggtagtttgaaatcagttgtggttggagtgtttacaccacagaaataggcaaagactacaaatcagaacttttttttttttttttgagacagtctcactctgttgcccagactggagtgcagtggcgcaatcttggctcactgcagcctccgtccacctcccaggttcaagagagtctcccgcctcaggtccccgagtagctgggactacggtgtgtccaccacgcctggcaaatttttgtatttttaatagagacgggtttcaccatgctggccaggctgctctctacaaatcacagcttttaccagcacaccgctcccccaaaaccaacttctattatccagaggagaaaataaaccagaattgaattttgtatgctacagacattggagttactccctccaggcccctgaagttcactgctcttccccagcactggctggatgtgatatcgggttaaccagccagcaccttccacccctacagtcaggacacgggatgggcagagaactcaagccagttcaaagtgaactttaggattggagaaagtcatgccctctcccactggagcaagcacatagcctgggggacaaggtcaaagccattttgtggctacaagaggagtcggcgttagcccaaagagcagagagaaggatgagaagaaacaaagtcctcgctgatgacattaagtctctggatcaaaccgtgcctgatctcttccttatcgctggactttcaggttatttaaacttacacatgctttttatatttaagccacttggagatgcactttctttgaatagaaagatttcttaccaacagaaatctgaaaccaactctttacagtttagtcttccttgcctaactaaatggattcattaaagctcttttcagttactaagtcactgaatagctttgtttgcactcctatgcttttaaagaaggaaagaaaaaacccagggaacaacactttgcgtttcacccaagcattgaaatctgtggtgcggcagccagttccctctccacctccctcaccacctgcctctccacctccctcaccacttccctctccacctccctctccacctccctcaccacctgcctctccacctccctcaccacctgcctctccacctccctcaccacctgcctctccacctccctcaccacttccctctccacctccctctccacctccctcaccacctgcctctccacctccctcaccacttccctctccacctgcctcaccacctccctcaccacctgcctctccacctccctcaccacttccctctccacctgcctcaccacctccctcaccacctccctcaccacctccctcaccacctccctcaccacctccctcaccacctgcctctccacctccctcaccacttccctctccacctcccttgccacctccctcgccacctccctcgctacctccctcactactgcaaaagggattgtttcctccagctcctaatggccctctgctcccatttcctcctcgaggtcctgttttcagatgctttcttgccccaatccaaggtcgcaagcacacgcatctccacaagaagaatgacaaccaatcttagaggtatagggagcttcaaatttaccccattgtcaggaaaagagaagccctatctaaaacttaaaattgtacaaagctagagttggaaaaaaatcgttgatgtcatctcctacagggcaagagaaagccgcctccaggggcgaatgatttattgcaggtcgcacaactcacacacagagtccctgaaccagggctgagaacccagcagttcagactctgcagccacgacacacaggcgccatgggcatgacagtgggtgaggacgcccagcagcccaggagccacattggtgtttgccagctgcacctgctccccatctcctggcctagaggcccagccttagcctacgcaattctcacgggacagacatatgcatgtgaggcagagtggggacccatcttaaggggcctgtgggtcccctcccctcagcatggaaataaaggaaaatcttgggttccttcacggggaattccaggcacctaattggccctgggaagtaaataagcaacttgagaaggaaaaagctaatagtattcaagaccagcttagccaacatggtgaaaccctgcccctaataaaaatacaaaaattagcgaggcgtgatggtgcacacctgtaatcctagctactcgggacgctgaggcaggagactctcttgaacccggggggtggaggttgcagtgagctgagatcgcaccactgcactccagcctaggtgacaaagcaagactgtctcaaaaaaaccaacaacaaaaaagaaggtaatagcagcttaaaacaacagccaagggagttagagtcaggagatgtttgcttccctatagaagctaaagcatcatcacatctgtctctgggttgtttttcagaaacccagacccccaccaaaatggattcacctgcacctagacctcagctacggagagcggaggactgagctctgagcaccagtctttgttctaaatttcttcctgaggggcctggaggaggtcacacccatgagccagagctaacattcttttctgctgaccctaaatttttacacaaagtttctcctcctaaccaactacaaatcagaaaatctttgcatatacctacaatttgtaagcccctgcatccagagatcccaccctttaaatcaaaccaatgcataacctccatgtattggtgtgtgactttgctggtaacctctacctctctgcctttaaagaccctcccctttaagccatctggcagtccgggtcttccacataaggttctccccgctagacgccctgcactaaatgcctctctttctcatgctgcaaacctcggtgtggctgtttggcccgactgcagtgggtgagttggaccccagctccgttggataacacatgcacacacgtgtgcacacacatgtgaacacacgtgtgtacacacccgcctcacgtggtacagaaagccaaagggcatgtcaggagtcacgcgctgatcatcaccgagcagatacatccctagattatgagttcctaaacttttacacatctttcttttctaaattttcaacagtaaatactaaagatgaaaaaatgtttctcacagctgtcaagggaaaaggggaaatcccatttcgtgcgccactaatggaagaggaaacagacacgaactctcacttctcaaatgccctaaaaacatggttttttgacccagaaattccaccttcataaatttatttaaaggatcataatggacaggactgaatcatcttatcttttagaattacacacataaggtattcattgtaaaaaaaattgaaaagcataaaggagaaaataaaaacttcgtaatatccccttaaaatacattccatctgtatgcgtcttctaaatcccccagcaaaatcaaattcaagctatatacatctgatgttatccatgatgattttaatgaggtatgtgtttttctaaattattttctgtgctttaaaattttttctacaataaatatatgttactccattaatcataatcaagttaaaaactatctaaaattagtatctttttttttttttttgagacggagtttcgctcttgttgcccaggctggagtgcagtggcgcgatctcggctcaccgcaacctccgcctcccgggttcaagcgattctcgctcctcagcctcccgagtagctgggattacaggcctgcaccaccacgcccagctaattttgtatttttagtagggacagggtttctccatgttggtcaggctggtctcgaactcctgacctcaggtgatctgcccgcctcggcctcccaaagtgctgggattccaggcgtgagccgccgagaaacggatcgcacatggtaatttttgcagcaccacgggttaaatactgtgggccctgaacaccattttcatgtggattccatgatcctcaatgacctcctgactcagaggcacgggagcagatctcccggcttttcctgcccttcgtggcggccgataggctcagtcggaggtgggtatggaggtgggtacggaggtggcaggaggaagctatggacaagagagcaaccggagggacagaaccgtgccaagcgcgtgtgtgactgcaaagccagcctctaggccaagtaaggcgctggaatgtggggcttgctgcgacgtacgtttctctcctcctcagcggagagatgagtgctcccggccggaggccgctccgctccatgcagtgacttagagacccaggcccctccctccgtggccgcccaacccctggggcctcatggcctccgcatccagccagtggggtactgggaagggcggcgccttcccccgactcagggctccactctcccattggccagaacaagccacgtggccacccagacccaagggctgctgggaaatgtgcccctccgctgagaagtggcttcccacagccgttctgtgcaatggggaaaaatccggggtgaacggctagcagactcttccttggagagacagcgcgggccacataggagacccccaaacaatggataccccatgctaggaggaccaactcactcaccctggtaggcctggattttcccactttcagccctggagatcctctcagccctgagaaaatcagagatgtggtctccctgccccctgctcacagtttcaccaagacagcacccgaacagggaggggtgccctgctaccccagcccccgaagaggacgtgcgggtgctgggagtactctactcagtgaccccagcacttcacactctgcgggccctggagaagctgccccacctcccttcaacccataggctcaggagactccaaagtcaagccttgtctgcaggtcggagattcaacaggaacaagcggtacgagactctcagagatgagggaggtgcagagtatattgttgaagctgaaaaaaaaaaaccaaacctgaggacctgctcctccagtgtggggtgaaccctcggggagacgcagtggggactcgcaggcaaccaaggaggcagtctacacagaa

SEQ ID NO: 1766 - DNA, 6000 bp, Homo sapiens
gtgtagtggcgcaatctcggctcactgcaagcttcgcctcccgggttcacgccattctcctgcctcagcctcccgagtaactgggactacagtcacccaccaccatgcccggctaattttttgtatttttagtagagacggggtttcaccatgttagccaggatggtcttgatctcctgacctcatgatccgccaacctcggcctcccaaagtgctgggattacaggtgtgagccaccacaccctgcctctgatatggttttaaaagatcactctgggtcacatgcagtggctcatgcctgttatctcaatactttgagaagttaaggcaggaaaattgtttgtggccagaagtttgagataagcctgggcaatgtagcaagaccccatctctacaaaaaagaaaataaattgctgggtgtggtggtgcctgcctgtattcccagctactcggggggctgaggtgagtggatcatttgaccccaggagctcaaggttgcagtgagtcatgatctcgccactgcactccaaccctggtgacagagaaataccctgtcactacaaaacaaaatccaccctgtgcctcctgatctgagacactaagaaggacacaacatcacttttgtggttttcctacccaaactgcataacctgtatctaatcatgagctagtatcagagaaatccaaatgaaaggacagtctacaaaatacctggcctctaaaatactctgcaaggccaggcgtggtggctcacgcctgtaatcccagcactttagggggcccaggtgggtggatcccctgaggtcaggagtttgagaccagcctggctaacatggtgaaaacccatctctacaaaaaatacaaaaattagccaggtgtggtagcaggcacctgtaatcccagctacacaggaggctgaagcaggagaatcacttgaacccgggaggcagaggttgcagtgagctgagatcgcaccactgcactccaacctgggcgacagagcaagactctgtcttgggggaaaaaaaatactcagccgggcgcggtggctcatgcctataatcccagcgctttgggaggccgaggcaggcagatcacgaggtcaagagaccgagaccatcctgaccaacatggtacatcgtgaaaccccgcctctactaaaaattcaaaaattaggtgggtatggtggcgtgcgcctgtagtcccagctactcaggaggctgaagcaggagaatgccagaactcgggaggtggagattgcagtgagccaagatcatgccagtgcactccagcctggcaacagagagagattctgtctcaaaaaaaccaaaaaaaaactctgcaaaaagtgtcaaggtcatgaaagataaagaaaggctgaaggacttgtagatggaaatagactaaggaggctgacaagcaaacgttccatgcaatcccggactggatcctaaaccaggcaaatggtgttagtgagacatctgacagttaagggtcgagattagataatcaaattagagcaatgttaactgcctgattttgataagtgtacagtggttatgtaacagaatgtccttggttttaagaactgcacatcaaagggcatcctgtttgccacttacctcaaacatttcagagaaaaaaagtcatatatatacacacacacctaattacgtctttataaaatcacatataggtatataggtgagatcagctggggcaacatagtgagaccccattgctacaataaaataaataaaaaattagctgggcctggtggcacatgcctgtagtcccagctactaagcaggctgaggtgggaggatcacttgagcccaggagttccaggctgcagtaagccactatgctccagcctgtgtgacagagaccctgtctctaaaaaaaaaactagagactaaggaggcctgagaaacaagttaaaagcgtaacatgcaatcctcgactggattcttgtaggggaaaaaacgccaaaaggtataaacactgatgttctcatcacccagaattatacaaatggttaatatattgtcaccttgctttgattaccatttttaaaattaattttctttcttgttttttttttagagacatgggtttcaccatgttgcccaggctggtcctaaactcctgagctcaagtgatccatctgccttggcctcccaaagtgctcggattacaggcgtgagtcactgcacccagcctgattagatggagttttgctctgtcgcccacgctggagtgcagtggtgcgatctctgctcactgtaagctccacctcccgggttcacgccattctcctgcctcagcctcccgagtagctgggactacaggcacccgccaccacgcccagctaattttttgtatttttagtagagacggggtttcaccggtttagccaggatggtctcgatctcctgacctcgtgatctgcccgccttggcctcccaaagtgctgggattacaggcgtgagccaccgtgcccggccctgattaccattttttaaaaaagaaatggaacattgcaggtaaggttaaactcttctatgacctctctccgcagttcctgggtgacaagagcgagaatctgtctcaaaaaaaaaaaaaaaaaaaaaagaagaagaaaaaaaattgtcatccttgcgcaggggccatgctaatcttctccgtatcattccaattttggtatacgtgctgccaaagtgaccactcgattacctattccaatataatgaaaccctgtttctactaaaaataaaaataagataaaaataaaaaaaatagctgggtgttgtggcgcatgcctgtaatcccagctactcaggaggctgaggcaggagaatcacttgaacctgggaggcggaagttgcaatgagccgagatcgcaccactgcactccagcctgagcgagagtgaggctgtctcaaaaaaaaaaaaaaaaggaaatagaacattgcaggtaaagttaaagtcttctttgactcctcttctcagttccatcacactcctttctaccctttcttgaagcaataaccatcaggatatggtatatagatccttgcagtcaattaaaaaaaacaacaaaatacatatatccaatagccaatatgcttttgttttatgtgtatttgtaaaaaatatacataaatgacattatactatatatataatccctctagataaagttacatatagtgttaggttttatgtattaatttttgaaaacagggtcttgctctgtctcccaggctggagtgcaatggtgagatcattgcccattgcagcctgtaactcctgggtttaagggatcctcctacctcggactcccaaagtgctgggattacaggtggcctagactttataaagctgttatcacctctttcttcttttctcaacactatccttttgacatctatctaaccctgttgaaacagatgaccgtcattccttttaaatgttatacagtattaaatgttgtgcacatgcgtgaggcatgagtttaactctggggcctctccctagaaatggaaatccggggtcacaagcaatgggcattcccgttttactgttagattctgctctcccgccagcagcgtctgagaggtgcttggggttcccctgagggttctgggggagctcggacttgcgttcccagcaggccggttgtcgcctgctttgtgcctaatttgcgtcactggggttcctagcggactcgcctgcaagtgtgctcaggactgcagggaggactcttcggtcactgcggctctctccccatggtggactcttctgaggcgcttgactgcgctgatttgggcctttatctgtctgcatgtcggcaggggcgcccaggaagtcgggtccctctagctcaagcttgtttgggctcttacagcttcaggccaacagggggctgggaagctgagcacttactcattccgtccccgttggtaactagggctggtagacgcgtccagactgcaaacagtatttcatcattttgtctgtagcatgcagcggccaaagctgccaacctatgaaacgctttgagaagccggacgctttgggaggccgaggcgggtggatcccctgaggccagcctgggagacatagttagattctgtctctcaaaaaaatttttaaaaaattacccctgatgtggtgcgcgcctgtagtcccagctactcgggaggctgaggcgggaggatcgcccgagcctgagagttcgagaccagcctgggcaacgtagcgagactccgtctcttaaaaaaaataagtagccgtttttctgggtgggtgcatccctctctggttcctcgctctccaactggccctggtcctgggggcgtgaaggctacgatctggagagacagaacagcgggctgcctctggaggacgggcctagaccccattcattcattcattcgttctgtcacccacccgtcctgcgcgcacgcgagccaccctaagccccaggacctcaagaacccccaccccacggggcacagacaaggacaggctggccagcgcctggaagccgcgtgcctgaccacgtctgcccgagcgagtaccgcctcccacccgggaggcaggagagccgcgaccgtcgggccgcgcccaacgtctcccgctcaggggcgcgccgcctcgctttcagcgcatgcgcgcccgggagcccgcccggggcgtcggcgcacgcggtccccaccggccggcttgcgtacgcgctcccggctcgccctcccacgcggtccaccgcgcctcccgccccaccctaagcgcagcgaccgcccgagcggccgaccgaaccgcgttgcgtgcgtgcgcgcacgcgcgggccacgtgggcgggcgccgcgccgttgccccgccccttgcaaccccgccccgcgccggccccgcccctgctctcgcgccggcgtcggctgcgtctccggcgtttgaattgcgcttccgccatctttccagcctcagtcggacgggcgcggagacgcttctggaaggtatcgcgacccggcgggcccggcacggccgggcggggacaggggtggcggcggcgggataggggtcggagccggggccagggccggggcgggtggcggacccaggggcagcgggcggctgagtaggtgggtggtgcgggcccggccgggccggggcaggagacgggcgtggggtcggcgctagcccccgcgaacccccgtttcatcctccgctctcatccccgtcccggtcccagtcccgttcccatccctacacctccggccgccgttccccgggccccgccgccccggatgccggccccgcccgccgccttcccgctcccaggcctggccgccatggcgccgcgggcgggaggcctttgtggggcgggcacgtggggcgctgggggcgcgggagcggggccgccatgggctgcggggccgcgcgagcgctcgcctccgtcctctgcctccgcaggaacgccgcgatggctgcgcagggagagccccaggtccagttcaaagtaggtaaccctgcggggcgggaggcggccgagcccgaccgcgtgcgactcgcgggtccctcctcctggggccacgatggctgtaatggggccccgcatccacattctttgttttaagtgagcctgtggtggttaaagttccgtgactctgggatcttgagaggtgaagtgtttagggtttacttccaaaatgtgtttttcaacagcttgtattggttggtgatggtggtactggaaaaacgaccttcgtgaaacgtcatttgactggtgaatttgagaagaagtatgtaggtatgtgctggaaaaccttgcttgtggaaatatgtgagaaatgggtaagttcatccactcaatcgcatcgtttccgtttcagccaccttgggtgttgaggttcatcccctagtgttccacaccaacagaggacctattaagttcaatgtatgggacacagccggccaggagaaattcggtggactgaga

SEQ ID NO: 1767 - DNA, 6000 bp, Homo sapiens
gcggaccgcgccctgtgcctcagacttcggatctgtgtgatccactgtgtgcaactgtacccgaaagggtccccacgtgcactacctcgtgacaactaagatggaccgtcttctactcctaggagtcatccccagattagcggggctctcagaatccttggggcttccaatccggaagttccccgtcccttctgccccaacataacatggcgccgaccgcagccacttccgtgatccgcaggcgacgaagtcgcctggtcaggatcaaagatggccgagcgccctccacgcgcctactctcgcgggccactcccggctccgctttagctgccgctcttggtgagcgccgccgccagccaatcgcggggcgcagaggcctctggccccgccccgcggatcagctgagggagccgcaatgtctcttgacagcggcggcggcgcagccggttccgggttcggcgcggggcgggggtaagcgcggctggcgagggggctgcggcgggcggcgaagggggacctggttgcggccgtgggagggggcgcccgccggcgtccaggccgggctgcggggctgcgtgggcgcgggcggccgggccggggcccgcggggtggggcgggcgccgagtctcggcctctggggtcgggagtctccatgggcgtttccggggtctccgcagatgtgaatcccgatggagcggcccgaggaaggcaagcagtcgccgccgccgcagccctggggacggctcctgcgtctgggcgcggaggagggcgagccgcacgtcctcctgaggaagcgggagtggaccatcgggcggagacgaggtgcggggctgaggccggggccgggggccggggccgggcagagccaccgggttgcgggcaggccacacgggcggcggtgcagtgtgcgctccagatttttccgtggagtgaaatgtcatgtaagaactggtatttattcggtgttctgcccaccgattcttgcgcatgattcacgcacatcatttagccttcgttacaactgtataagttagttgtgttcatatactctccagaatgcaatattgtcacgttcgttgccgtacagagtatcttttctgactgtaatggaacgaaattaaaaataatagaaggaaaagtggaaaattcacagatatgtggacatgaaacaccacactcttaaagcaaccggtgggtcaaataagtctttacaacggggaccttgttttgagacaaatgaaacaaaaatagaatacaccaaaaggtatttaggatgcagccaaggcagtactcagagggaaatttatagctgtagtgcttatattaaaaaagatctcaagtcccagcccctagaatatttatttatttaataaacctggaaagctaaaaacttgaacaaagtcatacaacgggtgagagaaagttccctcagcctccacattcactgcctccagtctcccaagtgaccatctggttgtttgatttcctctgaagcctttgtatggggagagaaatgcgctggtcctgtcaacaaaaatgtttagtttgtctgaaaattaatgaattagctccgacattatactctaaaaaggagcgaggatgggaaatatttgctgtttggaagcaattttttttttttttttggttaatttcaccccttataatgtgcttgcacctggttttttttgtttttttgtttgtttttttgagataagagtcttgctctgtggcccagactggggtgcagtggtgtgatctcagctcactgcaccctctgcctcccggttcaagtgattctcccgcctcagcctcggagtagctgggactacaggcgtgcgccaccatgcctggctaatttttgtatttttagtagagatgagctttcgccatattgcccaggctggtcttgaacaactgaactaaagtgattcacctgcttcggcctccgaaagtgctgggattacaggtgtgaaccactgtgtctgacctggttttgttttttggggtgttttggtagtcttacattccagtatcaagtcaaagtttattttacaactttgaaagtatttagatatcatcataacatatcaaaattatccctttaagacaagaggaagtatttgaagatttttccctttgtctttacttgatagactaggaggtttggtgaagagcagaggccctagagacaaattatgtgggtttccaatctgtcaacacattactctgggctaacgacatctttctgcgcctatgtacctacttcatagatttgctctgaggagttaatgagatcatacacggactgcttagaaggaactttagcgttagcacttagcattagccattgttattgtaacatgttatacatgttattacatggtaggacattacatgttaagacaaggagagaaaatatgtcgttgagtttatcttttaataggaacgattttagtgaatttataaataatgttgccagcaaaaactttaagattattgtattagtttgttcatactaccatagcaaaatactacattctgggtggcttaagcaacagaaatttatttatttatttatttatttatttatttatttatatattttttgagacagagtctcactctatcacccaggctggagtgcagtggcgcgatctcggcccactgcaagctccacctcccgggttcttgccattcttctgcctcagcctcccgagtagctgggactacaggcgcccaccaccacgcctggcagtggtattttgtatttttagtagagacggggtttcaccatgttagccaggatggtctcaatctcctgacctcgtgatctgcctgcctcagcctcccaaagtgctgggattacaggcgtgagctatcgcgcccggccagaaatttattttttattttattttatttttttaatttttgagatagagtcctgctctgtcacccaggctggagtgcagtggcatgatctcggctcactgcaacttccctcttccaggttcaagcgattctcctgcctcagcctcccgagtagctgggactacaggcacgtaccaccacacctggcttatttttttctattttagtagagatggggtttcactgtgttgcccaggctggtctcgaactcctgagctccagcaatctgtctgcctcggcctctcaaagtgctaggattacaggtgtgagccactgtgcctggccagaaatttattttcatggttcaggaggctgggaagtccaagatcaaggtgttggcagattgggttcctggtgagggctctcttggcttgcaggtggccactttcttgctgtgtcctcacatggcagagagggggactctgcttgctctctctgcctcctcttaagagggcaccagccctgtgacatctgattcccacctagtgacctcatttaacatttatcagctcacaggccccatttccaaatacagtcacattggggattaggacttaaatatatgaattttaggggggtacagacactcagttacaaacattcagttcctaacagttgtagaacttgattattttatttatttattttatatatatatatgtatttttttttttgagacggagttttgctcttattgcccaggctgtagtgcagtggtgccttcttggctcaacctccaacctcccgggttcaagcaattctcctgcctcagcctcccgagtagctgggattacaagtatgtgctaccacgctcagctactttttgtatttttagtagagacggggtttctccatgttcgtcaggctggtcttgaactcctgacctcaggtgatccacccgcctcggcttcccaaagtgctgggattacaggcgtgagccactgtgcccggcctgatatatttattttttgagacggagtcttactctgtcacccaggctggagtgcagtggtgcgatcttcactcactacaacctgcatcttccaggttaaagtgattctcctgcctgagcctccagactagctgagatttcaggcgtgtgccaccacacctggctagttttttggtatttttagtagagatgaggttttaccatgttggtcaggctggtcttgaactcctggcctcaaatcaaatgatccacctgccttggcctcccaaagcgttgggattacagccatgagccacctcgcccagacagaacttgattattttaaagcaatgatgtgcctgccatttataaggcattatttgggggaaaagggaaagcctaggtaacgtgtaggaaggggtgcaacaaccttgttttcccaaagagctctttatccagtctggagtgcagtggcacgatctcggctcactgcaagctctgcctcttgggttcacaccattctcctgcctcaacctcccaagtagctgggactacaggcacccgccaccatgcccggctaattttttttgtatttttagtagagacagggtttcaccatgttagccaggatggtcttgatctcctgacctcatgatccacccgcctcggcctcccaaagtgctgggattagaggcgtgagccactgcgcccagtctttttttttttttttttgagacggagtttcactcctatttctcaggctggagtgcaatgatgtgatctcggctcactgcaacctccgcctcccaggttcaagtgattctccttcctcagcatccagagtagctgggattacaggcactcaccaccatgcttggctaatttttgtattttgtagagacagggtttcatcatgttggctaggctagtctctaagtcctgacctcaggtgatcctcccgcctcggcctcccaatgtgctgggattacaggtgtgatccaccgcgcccagccaagagctctttattctaagagagtggcagaaatgtacatcaactgcttgaaagatttaacccaccaagcgtcaagcgcagcaaatgctgtgaatagaactttagcacaaagcatctcggttccagattagaatgctgatattcaggccaggcacggtggctcatgcctgtaatcccagcagtttgggaggccaaaacaggaggatctcttgaccctatgagtttgagaccagctagggcaacatagaccctgtatctacaaaaacttaaaaaattagctgagcgtggtggtgcatattggtagtctcagctactcaggaggctgaagtgggaggatcacatgagcctgggagttcaaggctgcagtgagctgtgattgctccactgcaccacagctggggtaacagcgcaaggccttgtctcaaagaaaaaaaaaaaaacctgatgttctggcatggagacgcctctgttacaaactggctctggcgacaccgtgacttgcactggttttggggcttgaaggagactgtcctggcagttaacgctcaatggaatgggaagagcttgaccacaggtgatacttgccttggatacagtacttccaatagtacagaatgtttgcacaaataagatttttaatatccggtttcatggcagtatcatttacttgtagtaaaattcaccttttttggggttcagttccatgagttttgggaaatgtactcaccagtgcagtcaagatgtagaacatgttcgtcaccctgaaaggtccccctgagtcccggctcctggcagccactgatctggtttctttgccttctgctgcttccagcgtgtcgtgacacagggtcacagggtgtctgccatcatcttctgcgcctggcttctttccctggcacgcaccttgttgcatggatgagcagtttgctcctttctgttaccgggtagtgttctgtggtttggatgcaccatggcttgttagtttacaaccagtggatggacatttatactgcttcctgtttttgtaagaaataaagctaatataaacataagtgtgcagtctttgtagggacatacatttttctcttagctaagtaactatgaatggaattgctgggccacgtggcca

SEQ ID NO: 1768 - DNA, 6000 bp, Homo sapiens
tataggggcaagggaaacaggcccttgaaaagaaggtaacgtggagtgggtagcccccgtatcgattaaacaggggatggacttacccgccactgtgagagttacccgaagctcagcatccatgatggtccagggggcttccagggtgatcaggcagcgtcagtcttcagccgctaagccaagcagatcttggaaggagtcagtcagagagtcttgggctagagctttaggggctctaggggtggctgccaggcgagctgggcagtctgatttccagtgggtccctgcacagatgggacacggcttgggaggaatcccaggctatgggcattccttggctcagtggccagatttctggcacttgaagcaagatcctgatggaggaagtcttgtaagaatgcttgactgctgtggcttaggtgtgtgcggcttaggcattttgaatttcttgtgtgctggaggtgtggctgggttttgtcttacagcagaggcaagtaattgtaactcagaaatgcgttgccgtctggctgcctcctctctattattgtacaccttgaaggcaaggttgattcattcctattgtggggtttgagggccagattctaatttttgaagttttttcctaatgtcaggagtggattggatgataaaatgcatattaagaataaggcggccttctggcccttctgggtctagggcggtaaagtgtctgagtgttgctgctaagcaggccatgaactgggcttggttttcgtctttaccttgggtagtttctttaagcttgtcataattaacaggtttgtaagctgcctttttaagcccttcaactaggcaggaaatcatgtaatcttgcctagctgtacctggggaatctgcctgatagttccattggggatcctctcggggaactgctctgatgccttcctggaggtatggctcgtgaagccggtggttatcagcgtgagattgggctagagaaaaaactctttcccgttcatctggggagagggtagaagtcaggatgacatttaggtcactccaggttaacttgtaggacaaagttagatatcggaattcctgtatatgtttagtggggtctgatgagaaagagcctaaatgttgactgatctgagagaggtctgatagagaaaaaggcacatgtaccctgactatgccttcagctccagccacctctctaagaggaaattgttgggcaggtggggaagagctagtcaaggaactaaactgtaagccggaccgggtgtgaggaggggaggtgacagaaagattatagggtggaggagcggaggctgaggaagaattgggacttagcttggcctggcgacgagcagcctggggaggaggggagaggtcagatgggtctgtagaaaaggaagactggaaagactcagcgacgcttggggttgggactgagggaacaggcaggagggagagaaggaggatttgggaggaatcgcattgggaacagagactagggagggaacgaagtgtgaaaaatgcctggatgtaaagcacctcagatcatttgcctattttttgacaaaaattatttaggtcttgtagaatggagaagttgaaagtgccgttttctggctatttagagccattgtcaagtttgtattggggccaagcggtgttgcagaagaaaacaaggcgtttaggttttaggtcaggtgtgagttgaagaggttttaagtttttgagaacacaggctaatggagaagagggaggaatggagggtggaagtttgcccatagtgaaggaggcaagcccagagaaaagagagggtagagacatggagagaagggggtggggggtgcttgccacccaggaaagtgaagaaggggtagagacacggagagaaggggttggggggttcttgccccccaaaaaagcattacttgccactaagggtgaaggaccaaggcaggcgtccctgcatggtcagacacctctgaaacgtgggtgaataatcaggcaggcgtccctgcgcgattaaacaccaagggaagactgtcttcccgagtccatgaccggcgccggaattttgggttcatggataaaacgcgtctcctttgtctctaccagaaaaggaaaggaactgaaattaagagtagggagagattaaagtgtggcaccaagattgaaaggagaaagaggttgaaggatagtgagagaggtgggagaagagagtgaaaagaggccattacccgatttaaaattggtgagatgttccttgggctggttggtctgaggacctgaggtcgtaggtggatctttctcacggagcaaagagtaggacaggggattgatctcccaagggaggtctcccgatccgagtcacggcaccaaatttcactcgcgtccatgtgaagagacgatcaaacaggctttgtgtgagcaataaagttttttactcacctgggtgtaggcgggctgagtccgaaaagagagtcagcaaagggcagataggggtagtggggccgttttataagatttaagtaggtaaacgaaaattacagtcaaaggggggttgttctctggtgggcaggggtgggggtcacaaggtgctcaatgagggagctttttgagccaggatgagccaggagaaggaatttcacaaggtaatgtcatcagttaaggcaaggaccggccattttcacttcttttgtagtggaatgtcatcagctaaggcaggaacaggccattttcacttcttttgtgattcttcagttacttcaggccatctaggcatatatatacatgcaggtcacaggggatgcgatggcttagcttaggttcagaggcctgacatgatccacctgcctcagcctcccaaactgctgggattacagacgtgagccactgcgcccagccggttttacaccttttagggagaaagttcatagatggattcaaagattttctgattggcacttggttgaaagagttgttattatctaaagacctggaatcaatagaaaggattgtctgggttaagctaagggagacaaagtttctattttgttattttttttttgacagggtctctgttgcccaggctggattgcagtggcacagactgtggtttaccgcagccttgtcctcccgggctcaaggaatctgcccacctcagcctcctgaatagctgggactataggcatgtgctgtcatcatgtccagctaagacggggtctccccatgttgcccaggatggtctgaattcctgggctcaagcgatccacccacctcggcctcccaaagtgctaggattacaggcttgagcaccaccactctggccattctaatgcagatgccgctccaggcagcaggcttcagagagaatagatggtaaacttttcttatcagagttaaaaaggtgccagagtcttacattctctcctggatcaggaaaagatgtggaaaaggaaggagattctctacaaagtagatttcccccaggagacagttttgcagggctacgtaaaactatgttaaataaatacatgtcagggtaaaatacttcgttttcttccagggcctgctatttgtcatgtgatgtatcttaatgctacagaccgtttggtcagccttaagttgtctgttttaacgtcgacgctggtcagttatacctgaattccaaagggaggacagtataatgggacatatccaaaccctgcttcccatcagggactgaactggtttttcagattaactttggcgttgagagactcagttcattcagttggttggggaggcttacaattttatttttggtttacaaggtatagataactatgcctatacctatatatacaaatgtttatatatgtatatatgtgtgtatatatggtttgttttacacaaatggatgcctactttatttattttggtagcgatgaggtctcaggctaatctcgaactcctgggctcgagatcctcctgcctaggccttccaaagcacttagattacaggcgtaagtcactgcgcccggtcctgcttcaccctcttaaaaccgcccttgggggctcctcatgagtgcagacattggcgcgttcctccaaaccgcacagactccccctgcgtggacgcgtctcgccgtctttactcctctttcgccgacctttcactttcagggaataccctctggcgcccttctctggagcacacacgtgaacgccgccggattccaagaagtgagatactgaggcaaaagttacgcgcgttcagaacaggaagaccccgcaaaacgccggccaagacgtggccccgcgtccaccctgcccacaagcagccgctcccactcgcggaccgcgccctgtgcctcagacttcggatctgtgtgatccactgtgtgcaactgtacccgaaagggtccccacgtgcactacctcgtgacaactaagatggaccgtcttctactcctaggagtcatccccagattagcggggctctcagaatccttggggcttccaatccggaagttccccgtcccttctgccccaacataacatggcgccgaccgcagccacttccgtgatccgcaggcgacgaagtcgcctggtcaggatcaaagatggccgagcgccctccacgcgcctactctcgcgggccactcccggctccgctttagctgccgctcttggtgagcgccgccgccagccaatcgcggggcgcagaggcctctggccccgccccgcggatcagctgagggagccgcaatgtctcttgacagcggcggcggcgcagccggttccgggttcggcgcggggcgggggtaagcgcggctggcgagggggctgcggcgggcggcgaagggggacctggttgcggccgtgggagggggcgcccgccggcgtccaggccgggctgcggggctgcgtgggcgcgggcggccgggccggggcccgcggggtggggcgggcgccgagtctcggcctctggggtcgggagtctccatgggcgtttccggggtctccgcagatgtgaatcccgatggagcggcccgaggaaggcaagcagtcgccgccgccgcagccctggggacggctcctgcgtctgggcgcggaggagggcgagccgcacgtcctcctgaggaagcgggagtggaccatcgggcggagacgaggtgcggggctgaggccggggccgggggccggggccgggcagagccaccgggttgcgggcaggccacacgggcggcggtgcagtgtgcgctccagatttttccgtggagtgaaatgtcatgtaagaactggtatttattcggtgttctgcccaccgattcttgcgcatgattcacgcacatcatttagccttcgttacaactgtataagttagttgtgttcatatactctccagaatgcaatattgtcacgttcgttgccgtacagagtatcttttctgactgtaatggaacgaaattaaaaataatagaaggaaaagtggaaaattcacagatatgtggacatgaaacaccacactcttaaagcaaccggtgggtcaaataagtctttacaacggggaccttgttttgagacaaatgaaacaaaaatagaatacaccaaaaggtatttaggatgcagccaaggcagtactcagagggaaatttatagctgtagtgcttatattaaaaaagatctcaagtcccagcccctagaatatttatttatttaataaacctggaaagctaaaaacttgaacaaagtcatacaacgggtgagagaaagttccctcagcctccacattcactgcctccagtctcccaagtgaccatctggttgtttgatttcctctgaagcctttgtatggggagagaaatgcgctggtcctgtcaacaaaaatgtttagtttgtctgaaaattaatgaattagctccgacattatactctaaaaaggagcgaggatgggaaatatttgctgtttggaagcaattttttttttttttttggttaatttcaccccttataatgtgcttg

SEQ ID NO: 1769 - DNA, 6000 bp, Homo sapiens
aaagagaaactggaggctttagagaaattagttactgaacaattagaaaatgagcacgtaactccaacattttccccttggaattctccagttttcgtaattaagaaaaaatgaggtaaatggagactgttaactgacttaagagccatcaattcagttatataacctatgggagcattacagccaggattgccttctcctgctataattccaaaaaattggcctttaatagtcatagatttaaaagactgtttctttactatccctttagctaagcaagactgtcaatggtttgcatttacaatttctgcagtaaacaaactgcagcctgctaagtattttcattgttttacagatgggtctagtaatggtaaagcttcttattctggcttgaaaagtaaagtttttcagacgcccaatactttagctcaaaaagagcttgtagctgtaattgaggtattgactgcttttgatatgcctattaatgggatttctgattcttcatatgtggttcattccacacagttaattaaaaatgctcagttactatttcatacagataaacaactgatgacaaaaacaaaaaagggggagaaataggcattacgggacagcccatacacaactgaatctagcattattaactttaaattttttgagcctgcccaaaggccagatgttatcagcagctgaacagcatctacagaaaccagctgcaaagacagaagcagaacaactggtttggtggagagatccaataacaaaaagttgggaaataggtaaaataataacttggggtagaggttatgcttgtgtttctccaggccaaaatcaacagctgatttggataccatcaagacacctgaaaccttatcatgagccagattccgggaggatcccgaggacccctcagttgcagccatgttgagactgatggctgaggaggaccccaactgtcacaagcaacacccgtctaacacagccacccacctggggacagatcaagaagctgtcacagatggcggaagaaaacctgaggaaagcgggacagccagtcacaatgggtaatttaatggtagctatgatagcggtgatcaccattgccgtaagtattccttcaacaagagctgacacagagaacaattattcttattgggcatatttatcaatcttggctggcaataatgcctggatgtaatcactctatcacacagttacacatgctttctgatctcagtatttaccataataaatctgctcctataattgaggcataccgccctcaaaaacctatttgtacacaggattggacccagttagacaaaatgaacatacttgtttaggaagattgcattgcagaacaggcagaggtgctgcacaacgattcctatggaatcattattaattggtcccctaaggggatgtttagcttgaattgcacctctcagtctgtgtgccactgctacactatgtttagatgatctgaacaaaatggtcagatggtagaaatgataaaaagtacggcaagagttcctcttatctgaaaccatggcggtatagtggcacctcaacctcagatgatatggcccgttgtaggagctaaacataagataaggatttgtggcttaataagatcaaaaatttgggaaagaataaaaaagcatctagaaagacactctacaaatttgtctttagatattgcaaaattaaaagaacaaatatttaaagcatcccaggcacacctgaccttaatgccaggaactggagtgcttgaaggagctgcagacagattagcagctagtaacccattaaaatggataaaaacacttggaagctctgtgatttcaatgatgattgtgcttttaatttgtgttgtttgtatagtctgcagatgcggatcctgactcccgcgagaagtagctcaccatgacaaagctgccttggcttttattgctttgcaaatcaaagaaggggaacatgttgggaacagcacccccccccccaaaatctggccataaactggccccaaaactggccataaacaaaatctctgcagcattgtgacatgttcatgatggccatgacacccacgctggaaggttgtgggtttactggaatgagggcaaggaacacctggcccacccagagcggaaaaccgcttaaaggcattcttaaaccacaaacaatagcatgagcgatctgtgccttaaggacatgctcctgctgcagataactagccaaacccatccctttatttcggcccatcccttcatttcccataagggatacttttagttaatctaatatctatagaaacaatgctaatgtctggcttgctgttaataaatacgtgggtaaatctctgttcggggctctcagctctgaaggctgtgagacccctgatttcccacttcacacctctatatttctgtgtgtgtgtctttaattcctctagcgccactgggttagggtttcgccagccaagctggtcttgccatttcctgaggcctccccagccaagctgaactgtgagtcagttaaacctctttcttttataaattacccagtctctggcagttcttcatagcagtatgaaaacggactaatacaggatctcactctgtgtcacccaggctggagtgcagtggtgctcaggcaagccacagtccttttgcctcagcctcccaaatagctgggactacaggtgcgtgccaccatgcccagctagttttttttttttttttttatctttgtagagatggtttctcactatattgcccaggctggtcttgaacccttggcctcaacatctcaggtgatcctccacctcagcctcccaaagcactcactggaattacaggtatgagtcaccatgcctgacagacagacagacatatatatatatgtgtgtgtgttttttttgagacgaggtcacactctgtcacccaggttggagtgcagaggcacaatctcaggtcactgcaacctttgcctcccaggctcaagggatcctcccacctcagcctccctagtagctggggccactggcatgagccaccacgcccagccaattttttgtatttttggaagagacagagttttgccatgttgcccagcctggtcacgtactcctgagcgcagacgatcctcccacctcagcctcccaaagttctgggattactggtgtgagccaccgtgcccggccttatgtattttttaattgaaaactttcatcatgaatatgtgtccttaaattttatttaaaaacacataaaagcagagaatagtataataaacctgttaagatttaaaatattttaaatgttgccatgtttttcatctcaaatcgttacaaatctacaacaatcttctcctccctctttttcctttaactggaagaaacagtcagttgtccaataggatatcccacattgtggatttgtctgattgtttccttttcctctttcccctttattctttcctataactggaaattccacttaaaggcctgagtatattaaggatcaacatttttgttaacagaaagcatacagtctggttgttccacttgtagtaatgctaacattgatcagtgggctttcaaatgtgaagccagatttcccctacaaccaacaaatgatctgtggatctatagtgccttgtgaatatccagttcctcatcatcaccgtttcatataatgctttgttccttagatcttttgcacacattattgtgatttttctaacttttcttctatatttatcatctggaattctgtaaaaatgagctttctcccatcaactaattatatgggtaatatttttacagtttttaaaatacataattgttagtattggtgtgtgtcttcctgggactccttcctgtgggtcctaggaaggcatactacactctactgatctttgtattcctgttactaatgcctactatagtgatggtacataggatgtatttaataagctcaacggtatatcatttactatctgattacagttgagtgaaaaaaaaaaaatcattgagccaactcaaagatctggtgatcctttccaaaaggatttgccggaccatagattgttcttcagttaaagctcagagatttgacgatgaggctcatcttacaaattaagtccactgttcaaagaaacaaaaatagaaagcttgatgccataaagacttcagttgcacatccgaaattcaaagtgagaaaaatatattatccttaaatgtattttcctagcagtatttcgctaactttgggtggtgtaatttttgtcaactcttcacaacctgaacaaatacttttaatcacgtccttctccgatattttcaatgaaaaggcaaagggcgctagaacttggaaaacggatgctttttaggccgctaaatttccttgtctttaaacaacactcattaaaatataagagcactgtgagttatgtttgattggatcatccacacgtgctaaacctatcaaaatcatatatgacttctgggaagccgttctgcttggctggggtttcggcagcagcagggttccctttcctagaaagtccccagctctggccctaccgacgtccgcacctgaggcttccctgctgggggatcaggcactgtcagctcctcggggccgccctcagccctgggacgccctccgccccaacgaccctcctcctccccagcgtcgcgccactcggcggcctcgccggctcccctcccacccttgaccttttccgccacagctacagaacgcccaagcgctcttccgcctagggtgccctccctgccccgcccacctgcgtcccgcgggctcagcggtgttacgccgcgcccgccttaatatgattggtttttgttcctgtcactctaggatccaagcccgccattggtcggcttccgttacgccgctgatgtggagtagggccgagcgcggaacgcgaggggctgctggggtgtttgtcgcagcgggttttcctcggcggtttgcggagctgctaggatggagcaggttgcggagggagcaagggtgaccgcagtccctgtgtcagctgccgacagcactgaggagttggccgaagtcgaagaaggagttggagtagtgggcgaagataatgacgcagccgcgagaggagcggaggcctttggcgacagtgaggaggacggagaggatgtgttcgaggtggagaagatcctggacatgaagaccgagggggtatgtggaggggccccggcgcggggctgggcggggagctccgggcctggcggggaggacgcgagctggaaacagcacgggcagacccaaaacaggagcgggggaggaatgtgagagttcaatgcaagcacgcgaaatcgtgggaaaagcgaagtgacatttccaactgcactcttagggctgagtgtgtgagggaagcttcagcaaattttggaggattgttttggccgaagagacgaagcagtttgggatgtggtgtgtggtgatcacaaggctgcaggcagctggtgaagggagctgctgcgctttggcgtgatatgatagtgaagtaatgcttctcgtcgtagtccactgtccacgccatcgttacagtgttttccaaaaccgtaaccaactccctggtttaaaatcttccggaattttcatttgcccttggagtaaaatctcaatcttacccagagggtggcatttaaaggccttcataacctgatcagcatcatccctctctcccctatgcgttgtatagctcgcagccacacagaaatacttggaattcatcacaccatgccttggtgtttcctgttctcctggcctggacagttctctgccctcttcttctggtgaaatcttactcaaatgcttccaaggcctcggggtgtagctctctgggaaagctttttttgaccctaacctctgcagagtgaggagcttctcatctctgctctttttactttttgtattgacctctatgaaggcatttaagccattatcg

SEQ ID NO: 1770 - DNA, 6000 bp, Homo sapiens
aatctggagctataattaagatatgttccttaatacttgaaaattgttcttaataccctcctcatcaattaggtcatatttcactgataactagcattagatttataactatgttaatgtaaaaggtaattttctagtctccactgctttttaaaaattatcagaaatgtaagaattagatagactctcatataccttcacccagattctctagttgttaatcatttatttatcttttttctgtttatgtacatttttttctggcccatttgaaagtggtgtttttaagggctatgttgaataacgcatttaccactatttttatgcacacacacaaacaaggatcatttttgttcccatgacccattactgataaaattagctgataaaatccacccgcctcggcctcccaaagtgctgggattacaggcatgagccaccgctcctggctctgatgtttattctaaaaccaaatatattgctttcttttaggcagttctgcatactattgactaagatttcttttcttttcccccattcatgcaagctaagaagctgtcttcttagctgtgctgtctcatctttaatttcttcagttttaattatgcctttacagaagacagaagctcttacaaagttatatacaggccgggcgcggtgggtcacgcctgtaatcccagcactttgagaggccaaggcaggcggatcacgaagtcaagagattgagaccatcctggctaacatggtgaaaccccgtctctactaaaaatacaaaaaattaggtgggcatggtggcaggcgcctgtagtcccagctactcgggaggctgaggcaggagaatggcatgaacccgggaggtggagcttgcagtgagcagagatcgtgccactgcagtccagcctgggcgaaagagtgagactccatctcaaaaaaaaaaaaaagttgtatacaatagttttccttttgtatattattttgcctaaaagaatatgcatatattctcaatggataaaatcaccatcttcccacccatttaatgtagctgaacagtaaaaataaaactgtattgctgaacaataaaactgtattgatgtactcttaactattattttaaaattttaaggcttttcaggcttatctttaaaagttaagattttgaggctgggcacggtggctcacacctgtaatcccagcactttgggaagccgaggcagacggatcacgaggtcaggagatcgagactatcctggccaacatggtgaaaccccgtctctactaaaatacaaaaaattagccaggcgtggtggtgtgcgcctgtagtctcagctactcgggaggctgaggcaggggaatcacttgaacccaggaggcgaaggttgtggtgagccgagatcgtgacactgcactccagcctgacagagcaagactctgtctcaaaaaaaaaaaaagttaagattttgaatttgttctttttctgatatttcttgagttcagattctactcagtgcttgtacttgatctttctacacagataactgaatgattgaagggcagtgtgggtacaattgaagggtaaaatgggtggggagcagttcttggcacttcgcttggaaagtttattgccttggtggtggtgtgaagaaaatcaggcaagtgttaagtgtgtagctagaatggtgctagcggatctcttgaggtcaggagttcaagaccagcctggccaacatggtgaaaccccatctctactaaaaatacaaaaattagccaggcgtggtgctgggcacctgtaatcccagctacttgggagggagaggcaggagaattgcttgaacccaggaggcagaggttgcagtgagctgagattgtgccactgcactccagcctgggcaacagagcgagactccgtctcaaaaaaaaaaaaaaaaatttaccatagggtttttaaaaggcagcttggtatgggagacatgtgggagtggtgctacagggtctgtgtgtctttgtttggatggctattttggctagtcacccatctggaggtctggttggcgctggtggtagcctagttgcttgcgactcctcctgagcaggaggattctacagtgcctggtttgtttgagattagcctctggaatgtcttttttttttttcttttgagatggaatcttgctctgtcacccaggctggagtacaatggtgtgatctcagctcactgcaacctccgcctcctgggttcaagcgattctcctgcctcaggctcctgagtagccagaattacaggcacacgccaccacacccggctaatttttgtatttttagtagagacacggtttcaccatgttggtcagggtggtctcaaacgcctgacctcgtgatccacctgcctcggcctcccaaagtgctgggattacaggtgtgagccaccacacctggcctaccctctggaatttcttaagcaagagcataattagataagcatgcattgctggaagagagtgtctagagaggaaaggaatgcaggggtaagagaggagggaaggaagaaaaagaaggtgattaaaatatattttaaaaactgaggtccccagttacagatgcattgccaaatccaaagtcgtgaaaacttattcctgtgttaagaattttatgggccaggcacagaggctcatgcctgtaatctcagcattttgggaggccgaggcggacagatctcttgagcccaggagtttgaaaccagcctggccaacatgccgaaaccccatctctactaaacaatacaaaactcagctgagcatggtggtgcccacctgtaatctcagctacttgggaggctgagcgatgagaatcacttgaacccgggaggcggaggttgcagtgagccaagatcgcgccactactctgcagcctgggcgaccctgtcttaaaaaaaaaacaaccaaaaagaaaaaaaaagctgtggggtaagacactgggtttgaatttcagctgaactacccattagctgtgtgatctttgactagttactttatctagaagctttagtctcctcatctataaaatgggtaatactacctagttcatggggatgttgtaaatattaatgatgaactaataaatgcaaagatttagacagcgcatggcacattgtaaagcagttgatgaatgtaattcttttgatttccctttaaccatttaaaaatatagaacaattcttagatcacaaggtgagcaaaaacaggaggcaggccctgctgtagtttgctgacccctgatacagagagatggactcttgtatctggtggagtgtaaattggagcattttttctggaaggcatttggcagtgtgttttaatctttaaatggcttgccttttttttttttgagatgggatttcactatgttgcccaggctggcttcgaactcctgagcttaagcgatcctcccacttcagcctgtcaagtatctgggactctaggtgcctactaccacgcctggctgccatcaaccctggaaatggctaggttttttttaccccattgacctcctttctgggaatttattctaacaacttaataagagatacacagggatattacagctttatttataagtacaaaaaaaatggaaaagggagcgtttttgtactattttttgttgtatttgtatgatggaataatcttaagtcactaaagagcgtttgaaaagttataacaaaaagtgcttgatacgtaagtgaaaaagcaatattaaaaattatagtattatcctaatgttttaaaaacattctaaatatgtattaatgtaataggtgaaggaaatagatcaaattgttttcagtatccatttattatttggttcttcctatcttttctatttttcattgcttttcaagaattacgtactgctttatggaatcagaataggacttcagtctttggtttatgaaaaacagatcaataatatactgttttttcttttcatttctctcttttgttttccacaccagggtctggctctgttacccaggctggagtgcaatggcactatcttggctcactgcaacctctgcctcctgggcttaagtaatcctcccacctcagcctcctaagtaacttggaccacagttacatgccactgtgcccagctaatttttttttttttttttttgagatggagtctcgctcttttgcccaggcaggagtgcagtggcacaatctctgctcactgcaacctctgcctcctggatacaagcgattctcctgcctcagcctcccaagtagctgggactacaggcacgtgccaccatctttttttttttttttttttttttttttgagacagagtttcactcttgttgctcaagctggagtgcaatggcgtgtgatcttggctcactgcaacctctgccttctgggttcaagcgattctcctgcctcagcttccgaagtagctgggattacaggcgcccaccaccacacccagctaatttttttgtgttttttagtagagaaaaggtttcaccatgttggccaggctggtcttcaactcctgacctcaggtgatgcgcttgcctcggcctcccaaaatgctgggattacgggcatgagccactgcgcctggcccataatttttgtatttttagtagagacaaggtttcaccatgttggtcaggctgttctcaaactcctgggctcaagcagtctgcccaccttgacctcccaaagtgctgggattataggcatgatcccactgcacctggtcaatactttttttcttaagccacttttctcaggagatgtgtgtactttagaatgtgaaaatttccacttagaagcaattttcaagttctttcatgtcttctcatcagttttttttttttttttggaaatttaatcaagttagcaatctgctttatttgcctccttttattttctataacagggtaaagttctttacaaagttcgctggaaaggctatacatcggatgatgatacctgggagcccgagattcacctggaggactgtaaagaagtgcttcttgaatttaggaagaaaattgcagagaacaaagccaaagcagtcaggaaggatattcaggtactatgttttgtctcatatttgtttttacatacataaatttattgtaaattttaactctcaaagtatgtgtagtaaatgatttacaaataacaaagtgtaccgtattctttagtgtaaattccatgtagccaattctcacagactgctttcagtgatttttgctgggttcttctttctgtacccaacctacagttgcagttgacaaacaagaatagtttggagatgaatattgatattttcctttaagttaagagtaaggtcaaggtggagaaaaaagagacatgccaaactatcatttgttcgtccgtgacatgagcaacttgtttttgtatatttattctgcattattaactatgtcttatgcctgctttttctgctagttaaaacaaattatctggtgaggacctggtttaaaaaaaaaaaaaacaacttagaactatatagtgaagatatctcacattaagagaatgattctcatgattttataggctgaacattgatctttctccctacaatttaagtttcaactatgttttttaaaatacctagtcttttcttaaatgaccaaaacaatattagttttgactgtgtgtagtagttgttaataataatagcaataacagaagtgcctggcatttattgagcatgtgtgtatactacataactaccatacactgggtcagcactggtttagtaagtgaagcaatcacttagtaaaacaggtgtatttataagatgaccactggtctgtcatgagctttgagtgatgttacgtgacactaatggacttctactgaactgttttgtcaacatcgtagtatttttagcttttttttcttttttgagtaaacatggagtgtctcataggggccagacccctaaacagttacagttacggaa

SEQ ID NO: 1771 - DNA, 6000 bp, Homo sapiens
gtttattctgttgtttcaaaaccgtttactcatagttcactttttcccattagttgattatcatatataaaattctaatatgtatttggatctatgtaatttctattctgttattgctttatctgtttattcataggctaatacaaataattcatatgacactgttctaattattatagctttaaaaaatattttaaaatattgtatggctagttaccccttaatttttcttgttaaaaaaatttcttgtcaattttaatttatttttccatattacctgtagcatcagtgtatctaattttaaacatcttggcatttttattgttattgtggttagattaatttaggaaggattatatatttatgaaattgaatttttctatctaaggacatgatatgcctttcaatttgttcagggcatcttttgtattccaagaaatatcttaaaatatttcttggtcaggccgggcatggtggctcatgactgtaatcccagaactttaggaggccgaggcgggcggatcacctgaggttaggagttcaagaccagcctggccaacacggcaaaccccatctctactaaaaatacaaaaattagccaggcttggtggcacatgcctgtaatcctagctactcgagaggctgagacaggagaatcacttgaacccgggaggcggaggttgcagtgagccaaaatcaggctactgcactccagcctgggtgacaaagtgagactctgtctcaaacaaacaaacaaacaaacaaaaaaacccaaaaaaaccacatatatatatgtatttcttggttgggagcagtggctcatgcctgtaatccaagcactttgggaggccaaggtgggaggatctcttgagcccaggagttcgagaccagcctaagcaacatagtgagacattgtctcaaaaaaaaaaaaaaaattttttttttcttcatgtagatcttgtacatttttttgttgttaattctgctcctggggatcttatgtctcctttccttccttccttcactttcctttcctttttaaaaaacctattgtaactggggtcttttccttccttcattttgtcttctaattggttgttgttcatatacactcagtgtaactggttgttgatatatacaagtatatatgcccatcatttatttctgtgtattttgagaagacatcctattaaacaatttaaaagtatatgcctgttataatcgagggcagtgttacacaatgagggtctgatgtctatgaacttggctccaccatttattagcactgtggcaataggcaggctacttaatttctataagccacagtttcctcatctataatatgggataaaataatacctcataggacagttttcaatattaagaagataaagcacaaaagcacttagcagggtgttggaaacacagtaagcagtcaataaatggtggctacaaaggttctatcctcttaccatgaaactcaaacctagttcctggggtcacactgggaatagacttcaaccttcccaaaccattcccctccatcccatgctccttacagctcctaaacaaaagcccataagtagattgaagggttgtggggtggggaggaggagaacgaaggaaacagatggaagggcagaggcccagtgacacctttactgcagagaaggaatgaaatgactctgtactgatttgcatctgggggtccagggaaactgaaggaagacaagctaatgaagaaagaggggaaggtggactttttccaaagggccacttcaaatttgcagaggactttatagctgacaggccactttaacctacatgaaccagtcttcacagcaaagagctgggacccgtgaggagagggcccgtagccacacatggagtaggcagagggtcagatgatgtgtttcagatctgcagactcccattccagtgctcattcctcttcatagccctcttttacttctcttgtcatttattcccatttgggcctaagtactaaactgaccacagaaaagacagatgacaaagatgatagaaaacacaggaaaggggaagaaaggaaagtacgaggagttaaaacgttttgagaagacagagcctcagggagctttgggattaaaatcaataacagtatttgctgaatacccccatgggagaaatccatgggggaactatataaggaatagtgtaatgatagcgactatgtcttgagggtctattgtgtgctgcttgtttcgtgtgcatttttttttccttttactcctaacaacagtctttcgaggcaggagttattaacccaattacaccacgtgtctctagaaggcaaggcctcagtcttctttgtgtactaacatctatgtactcactgaagaagacttgtaaaacatactcatagtcctggacataggagttcatggttttgccagagctgtgaaggaaccttgaggatgtcagccctaacgagtggggtgagtacaggaaaaatgtgatgtggccaatgcaaggaaggacactgtttctcttactacaataagaaaaacaacccgaccaaatcaaccaacaaaaccaagcaagagaaatctgatggtgaagtggcgaggaagcagcaaaagcttcttgcagctggagttagggatgcggatgaaaggtggatcaagccaactgcaagtgggggaggctgctcaacctgggaaagtgctccatcagctacttcgccctctcttccactgctgcaacgctttttaaagcgacagtcacacgctgcaggattcggaagcggaaatggtctttgctcattggatgacaatctaaattcagatcgaaagaatgtggttggagacagctggtggaaatggtcccagtcttgtcttcactggaaatgtccaatgtccacgtgctgctcgtttctcttcttatgaagcgtctccctgtctctctgggcctgtctctgtttcttccatcgcttttttccccactaagtaaccatcccggcgcactgtacccaactggtcgaggaacgcccctgctgtacccatcactgctggctgcctcggagattaatgcgagcgactcgggtggtttatgagaagtgacacttaatacccagcttcttgtatctgccgccgagcagttaacgttaaagcccgctctgtaccaccgcggatgtgactgctgtaaataccacggggcagggctctcatgcttcagaaacacgtaagcaagacgcaccgagccagccccggacacccaatgaccctggactgcggcaaagggggggtgggaaaggaagaggggaggaccactcgctcttctctccttcctcctcgcccgggccggagcacgccttcctccccggagggcaggggaaggtcgctccaggtcgctggcacctccagcgcccccgaaatctgcaaattcatcgctccctttcgtcttcaggcgaagccctcccgtccggagtagggccagccccagttatgcatctccagcctttagctgactactaaggcggatccgacttctcccccataaccaggttttgattcgcttccccaccgcaggggttcagtctctgctttcgactttgcttctcagttgcacgccccgcagtgtggagctgcgctcaagtctcggcaactttcaccatcttgacccgagagtcgggccgtttctaagacaatgtgaacaaagaggagcagggggagggaaggggggccccgcgggagggctgtgggcgagtgtgtgtgtgtgtgtgtgtgtgtgtgtgtgtgtgtgtgtgttggggggcgccgcgctccgcgcccgccgccactggggatccgggcgcaggcaggctgtcccgggcgcagagcgcgccgcctccagtctctctggcgggcccggcccggcagggcccctggcggcccccggaggcgggtttctttgtccctgactcccgctgggcgcgaaggccgccggcggctaacagaaacccgagcccgcgcaacggagctcaggcttccacgtgcggccccgcagggcagagcaggaaggagcggctgcagccccggggcgccccgcaagcatccagtgcccggccctcccagctccgcggcgggcttcggacggtggagtgagacaccagaactcgcctttcgcttccccgagccgatgcacggcttgggatggcgccgctcgtcctaagcagcgtggtttgagggcgagaagacgcctactggagcgctcccctccacccagactcccgaagacgcgcgcccgagtcgaagtcggggacagagaaggttctctggcgcccccctgccgactgctttgcggccgccgggacccgagcagcggggcgggacctaaacatagccccaacccaaagatgcccagcagaacgctccaaacaaaacagaaacggtggccgcatctgcgtgtgtgtgtgtgtgtgtgtgtgtgacgggggagaggagttgatcttacctgaaacatagtttgcgcttctgtgtgtgtggccgaagaatggaagagaaactgccatggccatccgagtccattaaatcaactccccttccctccgactctctcaactcagtcatattctataatacaacgcaaggttacagagccccagtgaaaactagtttcccagtttcactctgaccctccatcaatgtagccagccagctagattgtaggttaccggcttctattctgcaggagaactttgagtctcgggagactcagggtttcttcctcccgcctctcgcagtgcatctttcatttgcttttctttgtaaagccagggctcctcgactgcctcccaggaagtcctgcgctctggcgcgccgcacctcgcctgccgcagagcggcgcgggcagtaagccgggcgctaggaccgcggggagcccgggctgcggcggcgctaccttaaacccagcccaatgccgctgcctgcgccactctgcgcgccggcgggggctgcgcaggaggagcgctccgcccggctacaacgctccgcgagccggcgcggcaacacctgttcgcggcagcctgggcggcacgcgagctcccggacgcggctctcctcgctcgccgctcgccacccgttctaagccaatggacatctgccgagcctctggagaatcctggatactagctttggacgcctaaagtttcttcttctttttgttttattattattatcattttttggaggggggaccgggaggggagatttgtcgccgccaccaacgtgagatttttttttccccttgaaggattcatgctgatgtctgcagagtcggttagagagtaaaaacagcgcatgccttcctggagtcaggatccgtaaattctgacgtagcccgtgcatcttaaaaatccctataataacgcctaggcatttaagttgctatggtcattctgatctcaaaccaaatggagaaactacggattttttttccttattacggtcggatgggatgaagaccttcctgcctgctaagagctggggatctatctatagagatacatagatatgtttatcaatatgtcagtgtgtgagtataaagtggtggtttcttagactatcagtggtttgaccttgaacctgtgccagtgaaacagcagattacttttatttatgcatttaatggattgaagaaaagaaccttttttttctctctctctctgcaactgcagtaagggaggggagttggatatacctcgcctaatatctcctgggttgacaccatcattattgtttattcttgtgctccaaaagccgagtcctctgatggctcccttaggtgaagttgggaactatttcggtgtgcaggatgcggtaccgtttgggaatgtgcccgtgttgccggtggacagcccggttttgttaagtgaccacctgggtcagtccgaagcaggggggctccccaggggacccgcagtcacggacttggatcatttaaaggggattctcaggcggaggcagctatactgcaggactg

SEQ ID NO: 1772 - DNA, 6000 bp, Homo sapiens
aaaacccaaaaaaaccacatatatatatgtatttcttggttgggagcagtggctcatgcctgtaatccaagcactttgggaggccaaggtgggaggatctcttgagcccaggagttcgagaccagcctaagcaacatagtgagacattgtctcaaaaaaaaaaaaaaaattttttttttcttcatgtagatcttgtacatttttttgttgttaattctgctcctggggatcttatgtctcctttccttccttccttcactttcctttcctttttaaaaaacctattgtaactggggtcttttccttccttcattttgtcttctaattggttgttgttcatatacactcagtgtaactggttgttgatatatacaagtatatatgcccatcatttatttctgtgtattttgagaagacatcctattaaacaatttaaaagtatatgcctgttataatcgagggcagtgttacacaatgagggtctgatgtctatgaacttggctccaccatttattagcactgtggcaataggcaggctacttaatttctataagccacagtttcctcatctataatatgggataaaataatacctcataggacagttttcaatattaagaagataaagcacaaaagcacttagcagggtgttggaaacacagtaagcagtcaataaatggtggctacaaaggttctatcctcttaccatgaaactcaaacctagttcctggggtcacactgggaatagacttcaaccttcccaaaccattcccctccatcccatgctccttacagctcctaaacaaaagcccataagtagattgaagggttgtggggtggggaggaggagaacgaaggaaacagatggaagggcagaggcccagtgacacctttactgcagagaaggaatgaaatgactctgtactgatttgcatctgggggtccagggaaactgaaggaagacaagctaatgaagaaagaggggaaggtggactttttccaaagggccacttcaaatttgcagaggactttatagctgacaggccactttaacctacatgaaccagtcttcacagcaaagagctgggacccgtgaggagagggcccgtagccacacatggagtaggcagagggtcagatgatgtgtttcagatctgcagactcccattccagtgctcattcctcttcatagccctcttttacttctcttgtcatttattcccatttgggcctaagtactaaactgaccacagaaaagacagatgacaaagatgatagaaaacacaggaaaggggaagaaaggaaagtacgaggagttaaaacgttttgagaagacagagcctcagggagctttgggattaaaatcaataacagtatttgctgaatacccccatgggagaaatccatgggggaactatataaggaatagtgtaatgatagcgactatgtcttgagggtctattgtgtgctgcttgtttcgtgtgcatttttttttccttttactcctaacaacagtctttcgaggcaggagttattaacccaattacaccacgtgtctctagaaggcaaggcctcagtcttctttgtgtactaacatctatgtactcactgaagaagacttgtaaaacatactcatagtcctggacataggagttcatggttttgccagagctgtgaaggaaccttgaggatgtcagccctaacgagtggggtgagtacaggaaaaatgtgatgtggccaatgcaaggaaggacactgtttctcttactacaataagaaaaacaacccgaccaaatcaaccaacaaaaccaagcaagagaaatctgatggtgaagtggcgaggaagcagcaaaagcttcttgcagctggagttagggatgcggatgaaaggtggatcaagccaactgcaagtgggggaggctgctcaacctgggaaagtgctccatcagctacttcgccctctcttccactgctgcaacgctttttaaagcgacagtcacacgctgcaggattcggaagcggaaatggtctttgctcattggatgacaatctaaattcagatcgaaagaatgtggttggagacagctggtggaaatggtcccagtcttgtcttcactggaaatgtccaatgtccacgtgctgctcgtttctcttcttatgaagcgtctccctgtctctctgggcctgtctctgtttcttccatcgcttttttccccactaagtaaccatcccggcgcactgtacccaactggtcgaggaacgcccctgctgtacccatcactgctggctgcctcggagattaatgcgagcgactcgggtggtttatgagaagtgacacttaatacccagcttcttgtatctgccgccgagcagttaacgttaaagcccgctctgtaccaccgcggatgtgactgctgtaaataccacggggcagggctctcatgcttcagaaacacgtaagcaagacgcaccgagccagccccggacacccaatgaccctggactgcggcaaagggggggtgggaaaggaagaggggaggaccactcgctcttctctccttcctcctcgcccgggccggagcacgccttcctccccggagggcaggggaaggtcgctccaggtcgctggcacctccagcgcccccgaaatctgcaaattcatcgctccctttcgtcttcaggcgaagccctcccgtccggagtagggccagccccagttatgcatctccagcctttagctgactactaaggcggatccgacttctcccccataaccaggttttgattcgcttccccaccgcaggggttcagtctctgctttcgactttgcttctcagttgcacgccccgcagtgtggagctgcgctcaagtctcggcaactttcaccatcttgacccgagagtcgggccgtttctaagacaatgtgaacaaagaggagcagggggagggaaggggggccccgcgggagggctgtgggcgagtgtgtgtgtgtgtgtgtgtgtgtgtgtgtgtgtgtgtgtgttggggggcgccgcgctccgcgcccgccgccactggggatccgggcgcaggcaggctgtcccgggcgcagagcgcgccgcctccagtctctctggcgggcccggcccggcagggcccctggcggcccccggaggcgggtttctttgtccctgactcccgctgggcgcgaaggccgccggcggctaacagaaacccgagcccgcgcaacggagctcaggcttccacgtgcggccccgcagggcagagcaggaaggagcggctgcagccccggggcgccccgcaagcatccagtgcccggccctcccagctccgcggcgggcttcggacggtggagtgagacaccagaactcgcctttcgcttccccgagccgatgcacggcttgggatggcgccgctcgtcctaagcagcgtggtttgagggcgagaagacgcctactggagcgctcccctccacccagactcccgaagacgcgcgcccgagtcgaagtcggggacagagaaggttctctggcgcccccctgccgactgctttgcggccgccgggacccgagcagcggggcgggacctaaacatagccccaacccaaagatgcccagcagaacgctccaaacaaaacagaaacggtggccgcatctgcgtgtgtgtgtgtgtgtgtgtgtgtgacgggggagaggagttgatcttacctgaaacatagtttgcgcttctgtgtgtgtggccgaagaatggaagagaaactgccatggccatccgagtccattaaatcaactccccttccctccgactctctcaactcagtcatattctataatacaacgcaaggttacagagccccagtgaaaactagtttcccagtttcactctgaccctccatcaatgtagccagccagctagattgtaggttaccggcttctattctgcaggagaactttgagtctcgggagactcagggtttcttcctcccgcctctcgcagtgcatctttcatttgcttttctttgtaaagccagggctcctcgactgcctcccaggaagtcctgcgctctggcgcgccgcacctcgcctgccgcagagcggcgcgggcagtaagccgggcgctaggaccgcggggagcccgggctgcggcggcgctaccttaaacccagcccaatgccgctgcctgcgccactctgcgcgccggcgggggctgcgcaggaggagcgctccgcccggctacaacgctccgcgagccggcgcggcaacacctgttcgcggcagcctgggcggcacgcgagctcccggacgcggctctcctcgctcgccgctcgccacccgttctaagccaatggacatctgccgagcctctggagaatcctggatactagctttggacgcctaaagtttcttcttctttttgttttattattattatcattttttggaggggggaccgggaggggagatttgtcgccgccaccaacgtgagatttttttttccccttgaaggattcatgctgatgtctgcagagtcggttagagagtaaaaacagcgcatgccttcctggagtcaggatccgtaaattctgacgtagcccgtgcatcttaaaaatccctataataacgcctaggcatttaagttgctatggtcattctgatctcaaaccaaatggagaaactacggattttttttccttattacggtcggatgggatgaagaccttcctgcctgctaagagctggggatctatctatagagatacatagatatgtttatcaatatgtcagtgtgtgagtataaagtggtggtttcttagactatcagtggtttgaccttgaacctgtgccagtgaaacagcagattacttttatttatgcatttaatggattgaagaaaagaaccttttttttctctctctctctgcaactgcagtaagggaggggagttggatatacctcgcctaatatctcctgggttgacaccatcattattgtttattcttgtgctccaaaagccgagtcctctgatggctcccttaggtgaagttgggaactatttcggtgtgcaggatgcggtaccgtttgggaatgtgcccgtgttgccggtggacagcccggttttgttaagtgaccacctgggtcagtccgaagcaggggggctccccaggggacccgcagtcacggacttggatcatttaaaggggattctcaggcggaggcagctatactgcaggactggatttcacttagaaatcttccccaatggtactatccagggaaccaggaaagaccacagccgatttggtaggtataccattaaccctttagtgtccatgagatgacatgttgaaattataactaccaagaaggtggtggccgggtgggggacgtgggaagggttctcccctcctcccctctttctctgtatctctgtctctctctctctctgtcttgccagctccgaaaaaaaaatgcctccggaattgcagatctgctgctggcactgatgcaagtatacactgaaaggccccctacttttaatttaaaggggggcataatttataaatataatacaagtttccagttcttttgcatcagatacacgggtttaggaagtttcttttgaatggactgattgcacgagtttaaagctttaatcattaactactaagaacttaatgcagtttcttgaaggcagtgggtatcttgtgcccaaattaaggtttttttcctttccccctttcctctagtaagtatactacttgaattgtatattaagtgcattgtttattctcccctgtgagggtctgaaagccccataggcgaaggttgctgacggattgtcctgttgggaggactaaagtcatattttaggctccgtgaaaagcaggggcagaggcttgggggaaaatgacttgggaagaggcagggcgctcaggggtttttgtccttccagctatcaagtgataacctctgcttttaaatttccatagtgtgcagccct

SEQ ID NO: 1773 - DNA, 6000 bp, Homo sapiens
ctaaccaactgttatggttggtgatttccaaattcttatctccagccctgctctttgctttgagcttcagactcccacatccacctgcccaccagatatgttcacttagatttctgaggcattgcatgtttgacatgtccaaaatggaacttacttttttcacctaaacttgttactctcagtcttccccatctcagtaagtggcaacatcctcaggagtcatcttaattacttctttttctttactttccatccaactgatcagcaagttccataaatctctgtctccatactatctatctattatctatatatctatcatctatctatctgtctccctccctccctatccattcatccatccatccatttacccatctatcattcatccatccatccatccacccatctatctatccatccattcattcatccatctatcatctattcacccatctatatatccattatccatctgttcattcatctattcacccatctatctatccattcattcatctaactattcatctatctatctatctatctatctatctatctatctatctatctatctgtctaatctgtctacctatttgtccatccatccattcattcctctatcttctatctatccatcaattcactcatctatctatccattcatttatctatctatctatctagctatctatctatctatctatgtcaccatccatccatccatccatcttgcctcctacaattaattcttcacatagcaccaggatattctttttaaagcataaatcacatctggtcactcccctccttataaccttctgaaaggttgcctgcaaataaaacccaaacgccttgctatggtcaaaaaggccatatataatctggtccctgtctacctctctgtcttcacctcacacaatttcacctcttactcattatattcttgtcatctttctgttccttcattcccagctttgccttttgcacttgctgtctgtttaatctgcctggactactctgctccctcatccacagcagattttgtttctcaaccttcaggtctctgcttaagcattgtctccttagagaaaccttgaccgtctaccaatctaaaggaatttcctcctggtctcactttctatcacattgtcctgttttatttcctttataatacttagggcattcttcctcctgtgagctccctacccccatctccctcatgccccctaataaaggagctctcatattcttgcatggtcctgtccctgtggctacacttagttggcctaggacgggcctgactcagccataccagagcccttcttgggatttttagaaccagaattgagaaacagtcaattcttcgctaatgaaagccattgtctgacgtaaaattcagcaactattggtggtcatgtttcccgttgtgtggaggaaatgagtccacaaaggcaaatgatacccacatggtgaaggggagaagagtaagatatttttgaaagtattttttatattctggttatttctaaggtctaaattatattctggatgcttgcagagttagtaaggatactttttgcatctatagtttctttgaaaattttttaaaaatcaggccagaaagacagagtgaaaaaaatgaaatattaaaaaaaagctcttggattgattaatctaacttgttcttccttgtgtcgaacactgtgctcacatgtagatggttaatatgtgcgggatgaacgtgccacctgtagaatgagaggttacatgctttccactgaaagcatgccttaatactgagtgagaaagtggaagtcaaagttgtagagactgcagtgattaactatgagaagagccacttgggcttttacattaatatatcatgaagcactcagtccttttgcagctataaaaagccctttttagaggcaagactgaggcaagatactaaatgttttacaatgactgtcctctgacaggtggagacctttattattattaatgtccatttcaacatttattgaaatcaatccaatgaaacacattctaatgaaatataattacgcaaacaatatgtgcttggaactgtaggggatatatagatgattaaggcaggaactcagtcactaaatttattaaggggcagatttttttaatcgcataaaataaatgattaaaatacaaggtagctataatgagttacaaataaagtgcaatggtgccagggctggggtagaggttcatgataaagaaaggtcatatctagttgcaagaactgggaaagacttcatgaccaaattaagcacttgggggatgggtaggactgtaaaggtcagagatggtatgaggaagcatcttagcccttaagaaccttaagaacacacaaaaggagacacttaaaactaaatattagatgctgctgttcctagcattagccatgctctcctataaggggcccttagtggctatctctttctcagctccccatcctgataccattttacagggtcagcttacctcctaccaccatattcctccaacctagtgtctaggcctctaactctcaccctggcttcaaagagaaaagcagatcttgctcttccctagtccaaggttagcttcttttcctgcccccaggaaaagactgacagtcaggactgacattcaggatactcagttgacagtgaggacactcaattccttcagggagagttcaccttcacccagagtgaagccagccaaaacagtgtataaaagtacatttttaaaagtctgaggccaggtatgtggctcatgcctgtaatcccagcactttgggaggttgagacaggaggatcacttgaacccaggagttaaagaccagcctgggcaacagagcgagactccgtctctcaaaaaaaaaaaaaaaaaaaaaacttagctgggtgtagtggcacatgcctgtagtcccagctactcaggaggctggggaggagaattgtttgagcccaggagttcaaggttgtagtaagctgtgatcgcatcactgcactccagcctgggtgacatagccagaccctgtctcaaaataaaaacacaaaaagacaaacaaaaaaggtctgagaccttcagtgttccagaatagtgtgtataattggtacaggaggtggggaagggggacccgatacagtgtaggggcaagctgagtcccatgcctcttcacaacttttcctccagtgtggtagtttgatttctcaagatccatgagtaaatatgtgcacaaaagacacatccctcaaaaaatacaaaatacattgtctaaggaagaatcttttaaatccatattcagaaaatgatgtaattctttaaggatgcaaatgagcagttctgctagagagttacccaattttcatcactgaatggaaacaaataatatgccattaatgaaagcctacatttgttttgtgctttgcactttgcaaagaaaaaattctaggctccaagaacacattagtaaatgacaatgcaggattcaaacccagtatagtaaaatactcaatacttatatagtatgctaggtaaaaacaatttaattttacacagtggtgaagtcactaattttctccaaggaaaattatataagagaaagccctttggaggctttttcacaagatgatatcatcatcatcatcattggtatatggatctttttgagataaacatgtttattcattcattaatttaacaagtgtttactgtgcatcattatcaaggcatgacactaggttttacagaagatgcaaatatgacttcctataacaacttaggatctagcaaggtagaggaaataaaagatgaaaggaatttgataaatatcacaggaaaggtgggaaaaaaagtgttaaaaagttcacattaaaactgcaaagttcatattccctttgggaagtggggagctttagtggaaatggtaacaattggaaaaccaaaaattaaaaatagacaaggggggtaagataaaatgatagattagtatcaagataccaggactcctgaagcaggacatattgctaccttaagattattaacaaactagttcccatggatttagatcctttctgtaatcatagctagaaactggtgttcttataggtagtatcgcagaaggctgtactgtactcaatacttcctgtatatggataggaaaggtttggatggtcatctgtcacaagagtaacaatgtttaggagtagcttggacactggtcattgattcacttttattggtgcttgtaatgtcagtatgttgacatcattgtgcagcccttatcagattgtgaacaccaagagtaccccaactgctggcccgcgagctgtttacaaatatcataccggcttttatcgatgatagtggcctttaaaatctggagttcagagtggcacaaaatgtgtttctaatgcaaacgactctccttcccacgtgcacctctttgatcaagtttgtggctgaaatcagactctagttagatcgctgtaaaaataaaaataaattttccccaaatgattgaaacgaatttcaccctagactacgagtcccatcatgcaacgctcccatattcccaccgtgtggggcggagtcgtagaaggggcggcagcggcggcggcctgtgcattctgggtattgtagtctggggcccggccaccgctggggctggttccacgtggtgcatttggcggcagctttgggcagtggctcccctgctccctccacacggtcctcagggtgccagcgccagcaggggcggccagccaccgcgggagcgggctagagtgtggcccggaggcagcccgaggcttcgcgacgtttttgcgacagccgcggccgtgttccgcgagtgccctccctcctcctctctttgaggaggtaccggctgttgtgcggctctgcccttctgtttgagtgtatgggagagtgagtgagtgagtgagtgtgagcgtgtgtgtgagagcgtgaggcgtgagtgcgcgtgtgagaggacgagagcccgcctggccgccccgccgctcccgccgcagcaggagcagaacgcgcggccggagagagcggcggagccggcgcccagggagcccgcggggacaagggcagagacaccgctccccacccccagccctcgtccctcggctctccttcgccgggggatcctccccgttcctccacccccggccggcctctgccccgccgtccccctggatgtccctggcgctttcgcggggcctcctcctgctcttgccgcatcagtcgggctggtgctgcggccggcgggcgtagagcgggcgggttcccgggggctgcggctgcccgtgcttccccggtccccacccctgccccccggccccccgacccagctctccggcctcagaggctgtgacaatggactatgactttaaagtgaagctgagcagcgagcgggagcgggtcgaggacctgtttgaatacgagggctgcaaagttggccgaggcacttatggtcacgtctacaaagccaagaggaaagatgggtgagtgtgtgtgtctgggccggtgtccgcgctgggcggcgctcccgcaggccgaggcaggtagcccggagggagagcgggccgccggggtgccgggctctgacttcctcgacgccggcctctggctccgccagccaggtttggggaggaagtggtgtacgagggatccaaacccacgagaaatcctgcgtgccgcgtctgtgttctgctctggtggtaagaggcaagatgagcctctgcaccgtgggctgtatacttttcaaggatttcaaagctgattcatgaaaaaattcgttctaaaacgccgggttaaatgttttttgtttttttttttccttggtcgatttattatggtaaccttctggggatttcctcacccgcctctggagtgtcatccatcggtctagaaggaaggctgtgatcctttcccccaccagtttgtgatcgattttttatcaaa

SEQ ID NO: 1774 - DNA, 6000 bp, Homo sapiens
catctatctatccatccattcattcatccatctatcatctattcacccatctatatatccattatccatctgttcattcatctattcacccatctatctatccattcattcatctaactattcatctatctatctatctatctatctatctatctatctatctatctatctgtctaatctgtctacctatttgtccatccatccattcattcctctatcttctatctatccatcaattcactcatctatctatccattcatttatctatctatctatctagctatctatctatctatctatgtcaccatccatccatccatccatcttgcctcctacaattaattcttcacatagcaccaggatattctttttaaagcataaatcacatctggtcactcccctccttataaccttctgaaaggttgcctgcaaataaaacccaaacgccttgctatggtcaaaaaggccatatataatctggtccctgtctacctctctgtcttcacctcacacaatttcacctcttactcattatattcttgtcatctttctgttccttcattcccagctttgccttttgcacttgctgtctgtttaatctgcctggactactctgctccctcatccacagcagattttgtttctcaaccttcaggtctctgcttaagcattgtctccttagagaaaccttgaccgtctaccaatctaaaggaatttcctcctggtctcactttctatcacattgtcctgttttatttcctttataatacttagggcattcttcctcctgtgagctccctacccccatctccctcatgccccctaataaaggagctctcatattcttgcatggtcctgtccctgtggctacacttagttggcctaggacgggcctgactcagccataccagagcccttcttgggatttttagaaccagaattgagaaacagtcaattcttcgctaatgaaagccattgtctgacgtaaaattcagcaactattggtggtcatgtttcccgttgtgtggaggaaatgagtccacaaaggcaaatgatacccacatggtgaaggggagaagagtaagatatttttgaaagtattttttatattctggttatttctaaggtctaaattatattctggatgcttgcagagttagtaaggatactttttgcatctatagtttctttgaaaattttttaaaaatcaggccagaaagacagagtgaaaaaaatgaaatattaaaaaaaagctcttggattgattaatctaacttgttcttccttgtgtcgaacactgtgctcacatgtagatggttaatatgtgcgggatgaacgtgccacctgtagaatgagaggttacatgctttccactgaaagcatgccttaatactgagtgagaaagtggaagtcaaagttgtagagactgcagtgattaactatgagaagagccacttgggcttttacattaatatatcatgaagcactcagtccttttgcagctataaaaagccctttttagaggcaagactgaggcaagatactaaatgttttacaatgactgtcctctgacaggtggagacctttattattattaatgtccatttcaacatttattgaaatcaatccaatgaaacacattctaatgaaatataattacgcaaacaatatgtgcttggaactgtaggggatatatagatgattaaggcaggaactcagtcactaaatttattaaggggcagatttttttaatcgcataaaataaatgattaaaatacaaggtagctataatgagttacaaataaagtgcaatggtgccagggctggggtagaggttcatgataaagaaaggtcatatctagttgcaagaactgggaaagacttcatgaccaaattaagcacttgggggatgggtaggactgtaaaggtcagagatggtatgaggaagcatcttagcccttaagaaccttaagaacacacaaaaggagacacttaaaactaaatattagatgctgctgttcctagcattagccatgctctcctataaggggcccttagtggctatctctttctcagctccccatcctgataccattttacagggtcagcttacctcctaccaccatattcctccaacctagtgtctaggcctctaactctcaccctggcttcaaagagaaaagcagatcttgctcttccctagtccaaggttagcttcttttcctgcccccaggaaaagactgacagtcaggactgacattcaggatactcagttgacagtgaggacactcaattccttcagggagagttcaccttcacccagagtgaagccagccaaaacagtgtataaaagtacatttttaaaagtctgaggccaggtatgtggctcatgcctgtaatcccagcactttgggaggttgagacaggaggatcacttgaacccaggagttaaagaccagcctgggcaacagagcgagactccgtctctcaaaaaaaaaaaaaaaaaaaaaacttagctgggtgtagtggcacatgcctgtagtcccagctactcaggaggctggggaggagaattgtttgagcccaggagttcaaggttgtagtaagctgtgatcgcatcactgcactccagcctgggtgacatagccagaccctgtctcaaaataaaaacacaaaaagacaaacaaaaaaggtctgagaccttcagtgttccagaatagtgtgtataattggtacaggaggtggggaagggggacccgatacagtgtaggggcaagctgagtcccatgcctcttcacaacttttcctccagtgtggtagtttgatttctcaagatccatgagtaaatatgtgcacaaaagacacatccctcaaaaaatacaaaatacattgtctaaggaagaatcttttaaatccatattcagaaaatgatgtaattctttaaggatgcaaatgagcagttctgctagagagttacccaattttcatcactgaatggaaacaaataatatgccattaatgaaagcctacatttgttttgtgctttgcactttgcaaagaaaaaattctaggctccaagaacacattagtaaatgacaatgcaggattcaaacccagtatagtaaaatactcaatacttatatagtatgctaggtaaaaacaatttaattttacacagtggtgaagtcactaattttctccaaggaaaattatataagagaaagccctttggaggctttttcacaagatgatatcatcatcatcatcattggtatatggatctttttgagataaacatgtttattcattcattaatttaacaagtgtttactgtgcatcattatcaaggcatgacactaggttttacagaagatgcaaatatgacttcctataacaacttaggatctagcaaggtagaggaaataaaagatgaaaggaatttgataaatatcacaggaaaggtgggaaaaaaagtgttaaaaagttcacattaaaactgcaaagttcatattccctttgggaagtggggagctttagtggaaatggtaacaattggaaaaccaaaaattaaaaatagacaaggggggtaagataaaatgatagattagtatcaagataccaggactcctgaagcaggacatattgctaccttaagattattaacaaactagttcccatggatttagatcctttctgtaatcatagctagaaactggtgttcttataggtagtatcgcagaaggctgtactgtactcaatacttcctgtatatggataggaaaggtttggatggtcatctgtcacaagagtaacaatgtttaggagtagcttggacactggtcattgattcacttttattggtgcttgtaatgtcagtatgttgacatcattgtgcagcccttatcagattgtgaacaccaagagtaccccaactgctggcccgcgagctgtttacaaatatcataccggcttttatcgatgatagtggcctttaaaatctggagttcagagtggcacaaaatgtgtttctaatgcaaacgactctccttcccacgtgcacctctttgatcaagtttgtggctgaaatcagactctagttagatcgctgtaaaaataaaaataaattttccccaaatgattgaaacgaatttcaccctagactacgagtcccatcatgcaacgctcccatattcccaccgtgtggggcggagtcgtagaaggggcggcagcggcggcggcctgtgcattctgggtattgtagtctggggcccggccaccgctggggctggttccacgtggtgcatttggcggcagctttgggcagtggctcccctgctccctccacacggtcctcagggtgccagcgccagcaggggcggccagccaccgcgggagcgggctagagtgtggcccggaggcagcccgaggcttcgcgacgtttttgcgacagccgcggccgtgttccgcgagtgccctccctcctcctctctttgaggaggtaccggctgttgtgcggctctgcccttctgtttgagtgtatgggagagtgagtgagtgagtgagtgtgagcgtgtgtgtgagagcgtgaggcgtgagtgcgcgtgtgagaggacgagagcccgcctggccgccccgccgctcccgccgcagcaggagcagaacgcgcggccggagagagcggcggagccggcgcccagggagcccgcggggacaagggcagagacaccgctccccacccccagccctcgtccctcggctctccttcgccgggggatcctccccgttcctccacccccggccggcctctgccccgccgtccccctggatgtccctggcgctttcgcggggcctcctcctgctcttgccgcatcagtcgggctggtgctgcggccggcgggcgtagagcgggcgggttcccgggggctgcggctgcccgtgcttccccggtccccacccctgccccccggccccccgacccagctctccggcctcagaggctgtgacaatggactatgactttaaagtgaagctgagcagcgagcgggagcgggtcgaggacctgtttgaatacgagggctgcaaagttggccgaggcacttatggtcacgtctacaaagccaagaggaaagatgggtgagtgtgtgtgtctgggccggtgtccgcgctgggcggcgctcccgcaggccgaggcaggtagcccggagggagagcgggccgccggggtgccgggctctgacttcctcgacgccggcctctggctccgccagccaggtttggggaggaagtggtgtacgagggatccaaacccacgagaaatcctgcgtgccgcgtctgtgttctgctctggtggtaagaggcaagatgagcctctgcaccgtgggctgtatacttttcaaggatttcaaagctgattcatgaaaaaattcgttctaaaacgccgggttaaatgttttttgtttttttttttccttggtcgatttattatggtaaccttctggggatttcctcacccgcctctggagtgtcatccatcggtctagaaggaaggctgtgatcctttcccccaccagtttgtgatcgattttttatcaaatttgtattttatttgaggaaaggaaggcagcgagtgaatgtggttctggagagagttccccatagtgatcatctgcaacataaatgttgcaattgctatttagatattattagctgtgaatttttacatagaacaatgggggtttggtgcagggtgggtggtggggaagaaggcaagtgacatagggactatctcgttcaggcggtttcccccaaatttagcggctggcagtgaactttaaataatccctttgctttaaatattcttccctagtaacaacttaattaaacctatgactggtaatgcttccaatttagtttcttaacaggcaagtgaattgttcattttttctctttgtcagtagatgaatgtcttgtaatattgacaaaagagaaggcaattctta

SEQ ID NO: 1775 - DNA, 6000 bp, Homo sapiens
ttgctctgtcacccaggctggcgtgcagtggcacgatctcggctcactgcaaccgctgcctcctgggttcaagcaattctcctgtctcaggatcccatgtagctgggattacaggtgctcaccaccacacatggctaatttttgtatttttagtagggacagggtttcaccatgttggccaggctggtctcgaactcctgacctcaattgatctgcctgcctcagcttcccaaagtgttgggattacaggcgtgagccaccgtgccaggccctcactctgtctttaagaccttaatcatctggatactgcctccaagtcttcccagcaacataccttgtttcttttctcttaagctccaactgctccccctttatacatctgtattccttatggtaaaataaacactaattatgctgcaccatgactatctgttatttttccttgcctggaggaacagctccttgagggcagggatcattttttattatcgtactcatacccagctactgcctggcatacaatggatgctcaaaaaactttgccaaatgaatgaatgaacagtagactttgtctaatctcatgtatgtattcataccattttcacttggagaaggtgacttcttacaagtcttaatgaaaacttacttcacccattatgtactaagggatccacgtttcactacctgatgaaatatgcttcttaaggtgtgtacagttttggctgcttttcaagctggacttgctcaatccgttagtcatcttccctggagctaagtgctaaaatgtcacaaattgcagctggttccttgtttctttccaacatatatctctcattttactgttcaaactatgttcttagttaaatgtatacctgagaatgacagaggcatgttatgaagaggcaacatatgtccctaaatggacctctgtccctaaataaacttggcgggtttttttttaaatctttctttcagcctcatcctgaaaaacaacctgatttcatactaattaataaaaactgaaatgtttcaacaggaggttaattactagctaggatgaacaaatgcaatagaaaaactgcctctgaaataccgggtaattgctgacaaactgaaaggactgtctgaattgtaatttggacaagggaattgattttaataggacttttgggttttaaaaattcctagtaaagggccgggcacggtggctgacgcctgtaatcccagcactttgagaggccgaggcaggcagatcacgaggtcaggagatcgagaccatcctgtgtaacatggtgaaaccccgtttctactaaaaatacaaaaaaaaaattagtcgggcctggtggcggacgcctgtagtcccagctacttgggaggctgaggcaggagaacggcgtgaacctggaaggcggagcttgcagtgagccgagatcacaccactgcactccagcctgggtgagagcgagactccgtctcaacaacaacaacaacaaaattcctagtaaagaattcagctgtcatccttattttgaaaattaatcctagagttaaagctagttgagcattcactgccaggttggaagtgccgaccaatgaactttttaagttaaaaaaaaaggggttatattagtatttaagttatgccaaatattttagatattaaagaaagttgtatttacaattatattgtttaattctcaatatattaccaaatatatagtttatttaaagatgggaaaaattaaaatctacttatgtttgagttctaatcctattttgctatgcaaatctaatcctgatttgcatagcaaaatcaagattagattataatgttgctaaatgcaacattataattatgcattccactaaaactgtgcaatttgtgagaaagtcctttctactctctctgctccttttgttcttaattctaaggccaagtttttagtttagatttttaaagtaaaaatggaacacctattcagttaaatttgtttttatgtcataaatcattactcgttggaacacaatattcagtgaagactttttttttttttttgatatggagtcttgctctgtcaccaggctggagtgcagtggcatgatctgggctcactgcaacctctgcctcccgggttcaagctactcccctgcctcagcctcctgagtagctggaactacaggcgcgcgccaccacgcccagctacattttgtatttttagcagagacagggtttcaccatgttggccagaatggtctcgatctcttgatctcgtgattcgcctgcctcggattcccaaagtgctgggactacaggcgtacgccaccgtgcccggcctcagtgtagatattttttaaagccaagaaagccataagtattgcacaagttatacacgtacctgaatttacatgcacacatagatatcagttcatgggactcactctcctgtttaagatatgaccagaggcttgtaacgacaatgtagaattctaagacagcacaataaaacaatcataaactaaccacttccctttgccaagtttagcaaagtggatggaacaggaaaaaagatgttcatgataatcctatttcatatagattaaggctggattaaggtgcagccattcagataaggggaggggtattaaattatccgaaggtctcatttggttactattatttcttaaggcttttttaaggctaaagacggctgaaagtcactggacacctttgtagccttgtcatctggtcctggccagatctgagttgagaaaaaccagcctcagatccgcctctgcaggagttgggcgctccccactccctgcacgccccgactccaacactggcttcagcttcaatcccagaaaagtggatcaaaacgacaggttccacgaacaaacactgcgccggcgcctctactttggagaaaaggaaaagggcgtgaggtttcggtcatttttgtcaaaggaaatcagatgaaaaggggtgtacaaaggaccaggtctcgtgagcgcagccaatcttgtccgctcccaagcgactcaggctcttggcaggacttgctgtagagtcccagacggagttagccactgagtccttcagcgacccaggaaataacaacactgttggcaggtgggggagggcgcccgggaagatatccaatagtggcgtcaggcaagaggacagaaatgctcctttcattcacctttcgaagcagagcatttggtccccgttggcctctgactctctgttgcggcaatctagatgttaccagaattcccgtgtttccttcatattcaaaggcacaggaaatctggggtgcaagcggactgctgtctctcaaggaatagaagtctgtgacaaacgtatagaaatgagtttcatgttgaacaagatccgtttctgcgttcctccctcatccagccttgattctccagatgcttaccaacttcttaatatttacctcaactgcaaggctttcaaccggcgcttttgttagaatactactatcttcccattaaagcaatgtccacactcagtttgcttggtgaaaatgttaataacgcacacttagaaaaacggtgataaccgttgcttgcataaagtggccatttgaatagactttggatctgatttagagatttagggatggatgttttaaaaaaagcaaaagtagtaacagactatagcattggtaatgtgtgtgtgcatatatacatattatttttaaaaaaataaagttcgattatttcacctggcttgtcagtcacctatgcaggcgtctgagcccccgggtttccaggagccccccgtataaggaccccagggactcctctccccacgcggccgggccgcccgcccggcccccagcccggagagctgccaccgaccccctcaacgtcccaagccccagctctgtcgcccgcgttccttcctcttcctgggccacaatcttggctttcccgggccggcttcacgcagttgcgcaggagcccgcgggggaagacctctcgtggggacctcgagcacgacgtgcgaccctaaatccccacatctcctctgccgcctcgcaggccacatgcaccgggagccgggcggggcaggcgcggcccgcaaggacccccgcgatggagacgcaacactgccgcgactgcacttggggcagccccgccgcgtcccagccgcctcccggcaggaagcgtaggtgtgtgagccgacccggagcgagccgcgccctcgggccagcgtgggcagggcgccgcagcctgcgcagccccgaggaccccgcgtcgctctcccgagccagggttctcaggagcgggccgcgcaggagacgttagagggggttgttagcggctgttgggagaacgggtcacggaaacagtcccttccaaagccggggccatcgtggggtgggcgagtccgccctcccaggccgggggcgcggaccagaggggacgtgtgcagacggccgcggtcagccccacctcgcccgggcggagacgcacagctggagctggagggccgtcgcccgttgggccctcaggggcctgaacgcccaggggtcgcggcgagtccacccggagcgagtcaggtgagcaggtcgccatggcgatgcggccccggagagcgcacgcctgccgcggtcggcatggaaacgctcccgctaggtccgggggcgccgctgattggccgattcaacagacgcgggtgggcagctcagccgcatcgctaagcccggccgcctcccaggctggaatccctcgacacttggtccttcccgccccgcccttccgtgccctgcccttccctgcccttccccgccctgccccgcccggcccggcccggccctgcccaaccctgccccgccctgccccgcccagccggccacctcttaaccgcgatcctccagtgcacttgccagttgttccggacacatagaaagataacgacgggaagagcggggcccgctttggggtccaggcaggttttggggcctcctgtctggtgggaggaggccgcagcgcagcaccctgctcgtcacttgggatggagaccggctttcccgcaatcatgtaccctggatcttttattgggggctggggagaagagtatctcagctgggaaggaccggggctcccagatttcgtcttccaggtaacgtgggtttagtatcccgacttggaggcttgtcagaatgtttctctccttccagcccaacacgaagtcttgggataaaaagcctccctcagggattcaaataactgttttgattcagagcaactttgatcgcctgtgcggtcgcacctgccctttcagccccaataattactgggaagatcagcaattggtgttagtcccattgcttggtgctctccctcctagaggttcgctgtgtccttggagcccggggtggacggaatcgactaaacagcttgtctgtttctctttccctggtagcagcagcccgtggagtctgaagcaatgcactgcagcaaccccaagagtggagttgtgctggctacagtggcccgaggtcccgatgcttgtcagatactcaccagagccccgctgggccaggatcccccgcagaggacagtgctagggctgctaactgcaaatgggcagtacaggaggacctgtggccaggtaatgactcagacgcattgagaatgatgcttgtggagaacagctctcctgctttggtgccaggtgcttttctcttgcccttgtacctacaactccccctgagtattacaaccctggaatctggactacaggaaagttgattgatttattttctttctttctttctttctttctttctttctttctttctttctttctttctttctttctttctttctttcgttctttctttctttcttttctttctctttctttccttctttctttttctttgtttctcttccttcttcctttcctttttttttctttcctttcctttccttctttttttttttttgagacggagtttcgct

SEQ ID NO: 1776 - DNA, 6000 bp, Homo sapiens
tttgagatggagtcttctctgttgcctagtctggagtgcagtggcatgatcacggctcactgcaaactctgcctcccaggttcaagcaattctcctgcctcaccctcccaagtagctgagattacaggcatctgctaccatgcctggctaatttttgtatttttagtagagatggggtttcaccatgttggccaggctggtctagaactcctgacctcaagtgatcacctgcctgggcctcccaaagtgctgggattacaggtttgagccaccacgcccagccttatttttatttatttttttttgcaacagggtcttcctgtgttgcccaggctggagtgcagtggtgcgatcttggcttactgtaacctccacctcccaggttcaagtgatcgtcccacctcagcctcccaagtagctgggactataggcacacaccaccatgcccggctatgtaaaattcttatactattgccccagtacatataaaactctagtaattatttgctccttttattaaacatatacatctatacttacgcaaagaaaaaatgaaaggaatatatcaatatattttcaagatcctgaattctaacaaaactaattctgagtcagtcaggaaatctgaacactgattgcatattagaaggtataaaaattattttataaggtatggcggtgtttttttaaaagtccttgtatcatagtgaataaaatataactaagacctgctttaaaatagtttggtgggaggcatttatggaggaatttttttcaaactttttttttttttgagacagactctcgctctgttgccaggctggagtgcagtggcacgatctcggctcactgtaacctccacctcctgggttcaagcaattctcctgcctcagcttcccaaatagctgggactacaggcgcacgccacaccctgctaatttttttttttttttttgtattttagtagagacagggtttcaccatgttgcccaggctggtctcgaactcctgagctcaggcaatccacctgcctcagcctcccaaagtggtaggattacaggcatgaaccaccgtgcccggcctcaaacatttttaatgttagcagaggtaaatttcctctgggtaatggaattattattagcttttattgtctttatatttttctatctttcaatttttgtatagtgatttgaagttgtttttaaaatgagaaaaaaaaatttcaaaacgttttaagaaaatccttaccaatactccatccacagatgaaactttctcccaagttaaccaagctctctctctgacatgatctggtatctttaatttctgacataatgcagtaaaatcaggttcttctgtttcttcaaactcaagcctaccaaatgaaaataatcatataattggcatatacttataaatcaaattgattcagtacatacttgtttcaatagtttgcacataacactactgtgaaaaagaacattattaaatactttaagatcttattttatcttagaaaaacattacacttcaaatttaaacatatgattatctttttcatggtcattccaaaataaggataccacacagtgaaaaatatttgcttgcatggtaagtcaaatatacttcaaagcagcaaaacacttctgtgaaggaaagtaaatgtaatagctaaagctgtttgggaaaataggataaagataacaacaaaaagataaaaacccatagataatattatacaattcaacgccagtgactttgttaaactgtagtcttctcttatcaatgtttcatatatctctctacctactagcacatcttacatgatgcgactgcttatttttgtcctttccccttaacaaagacaagcatttaataaattcttgttggctaattcattttcattcatctaatttctatgtgttatctactaataagaatagtatgaagaataattaataatttttgagtatttactatgatcctgtagaaagtaccttaaacatatggtttcactgaatcccgacatcagcccttttagataagtattctcatctgtaaaagtagacatttacagatgtctgtcaaattggagaagttaaagaacttacctgaggtctcagccggtaagaggtaaaccactatgtgagcccaacagtctaactctataatccatgcccttgaccactattctagactgccaattcctccttcaaaacataattagtttttgtttttttttcttgttttgaaatagggtttcactctgtcatccaggctggggtgcagtggtgaaatcatggctcactgcagtctcaaactcctgggctcaagggatcctcccacctcagcctcctgagtagatgagcctacaggtgtgccacagccactggctaattttttaaaatttgttttagagacagggtcttgttttgttgcccaggctcctctcaaactcctggcctcaagcaatcttcccatcttggcctcccaaagtgctggcattacaggcgtgagccaacatgcctggtcagcttttttgtttttttaaagactggggtcttgctttgttgcccaggctggcctccaactcccaagctcatgtgatcctcctgcctcagcctcctgagtagcatggactacaggtacgcgccatcacacccagctcgaaacatgattaacctttgattatttcaacaatgaatgtggtatgctgttcctagtgacagtttcccttccagctacattacttaggccagagataaggcaacagaaataagatctaaactctcaaatcaggaatggaatctgtcactggaggtgcagttggactgagccttgattccatctccaggcaagatgctcagtatcagactgcacggcagcggttctacccttgctggttaatttatagagttcaactgtctatgttaatgaaaccctttgtgggtatggataatcaagaacagactgtatcttgtatggttttgacttataagagaattttttatagttccattacttaaaatatataaaatgagttaaaaaatgaaagaaacagtcctcttttttccaagcagtggccacaacgtcaatattcctggttaccctacattagagtatgcttccaaagctgtgtgcataacatggaattctttagagtagccattactgcattttcccaagggaaatttgcaagaattggatacatcagaatttaatcagaaactaaagccatgtcttttcccagaacatgccccagacgtggtttttaattttttgttgttgttattttggttttttaacgaatatggtttttaactgacctataagacagtccatttaaatatataaatttttaatagccttccaggggccatttcctaaatcccacttcaatcttttctgccgtgaattgttagtgtataccgagtggaaagaaatgggtgagggtgaaaggatttggtgatagacaagaatgggagagaaaatagtgaaaaacagaaacaagtcccattccctctgcaatgaacttgtctcaaagtagaaccagtgctgacaataatgacaattacactctttcaatcatagctatttaaccataaagtagaaaaatcaagaaaagtaagatgttgtaatacaataaatacttcccttcaagatctagtgcattcgtatggacttgcttaaatttagattccacttaataagggaaaacgaaaatttccatttgcgcacagaaccactaattttgtgccaaaaacaaaggcaaaaagaggggacaccaagatccttgctggttcaaagtcaaaaggcaaaatggaagaaataatgagacaagccgaagccgactaacacgcaagaagagttcatcaaacaggaaaaaaaaaagtttagaaactttcaagcacttctggtaaatgtctcatgaaagttttgcccatgtttcagttcctctaaagagttacgctccatcaatcactacagatggctttgagtccccaaggcctcgatgcattattgttctaaggaaacgccgcaaagctcctgagccgagtatcctgtgggcaatggacactcaggaccctgcgcttcttgtccaaggctttctggtcggcctctcccacaaatggacttcagatgcagtgcacgcccggaagaaaatacttcccaactgttgcatcgcgtgaaccaaaacagaaagtcagacgaccaccggagtactccaattctccggtgaaaaactctcccacagacaccatttttgtatttttatttttcattttttgcgtctgatggacgctcgcaacgaccctctgcctccgagcctcacaagagggaactgcacctgtcacttcgctcaggaccctagccccacccgcccgacacctgtcaagttgaagccgagacccctcgcccaagaacccagaatcctgtcaccattctgcagacgctccgccgtggcggggggcagggagggcgcctcctcccgccgggacccggcccctggcgaggacggatccccgccgagccgccttggcgcccgccctacgcacacccggggcgcccttcccgcgtgaggcgacggcggctctgctcgctcacctgacgagaggcaggtcctccgggccgctgtcctgctctgggtcctcctcaggagggggcggcggcggcggtgccgggggttccgcggcggcagcggcggcggtggcggccgtttttcggggggttttgggcggcatgacgcctttccgcggcgggagccagcgagctgtggaggagcgccggggaggacgacgcgcgcgcacgtcggggcacgccccgtcctctcccgactcccgttacaaaaataatttcaacgtcccctgagaaaaaccggacgcgccctcccccgcccggcaactgagcgccgcgtccaaccgcgggaaaacgtcacttccgcccgcggcgtcacgtccgcgaggctcccgggcccgccggcgtctgtggggaactggggcgctggtcggtgcgcgggctgggacgctaagtcatgaggaattaaactgggaaacctggcgtgggtccaggcgccttccaggaggcatccggcgcggcccggacgtgcttctacccagaaccaccccctccaggccggggtgcacttaacggggctatacaaagagtctggtgggtgactgtgggcctcatccctatcccggggtctgatagggaagactctcgggccccgcagggaatatctggctagtgcaccctcggcgggagcgccactctccctccttgggcggcgccccccacctctcatcccgcccaatccgttttgcaaagtcggccaaaacaaaaacaaacttggagcgctgataggtgcggaactttaccagtcacttagaagatagaaaatgttagacacttgctggccttttgggatcactggttagggaaaggaagggagggagctgtggggaatgaacggatagtagtgtaataaaggattgtagtggtgtaagaacgggaagcaccgtggaaacgtctgaggaagattttcaggggagcagtagctgctgaatagaagtctgtcaggcaggcctgacatttactatgtaccaggaactgtgctggccaccttacataattgtcttatttaatccccagaaacagccttttttttctttttctttctttcttttctttttttttttttttttttactttaagttccgggatacaagtgcagaacgtgtaggtttgttacataggcatacgtatgccatggaggtttgctgcacctatcaacccgtcatctaggttttaagccttgcatgcattagctaagaaacaacgctttccaatgggtagtattagctagtctacgttgcagatgaggaaacaggctcagaggagttaatttgtccaataccagggccgatgggtagcagagaatttgaactcaattctatttgattccacttgtccattatattatgtttgatgaagaaaaca

SEQ ID NO: 1777 - DNA, 6000 bp, Homo sapiens
tttggatccatgaatttcttgcatgtggagcttgttttgatagaaaatactcagatattttatcaaatttataattagttttttaatattttgtatataaatgtcctttaagtttgatggctttattgtttcattagtctgtaatgattttagcacttcactatgagttatggctacaaactcaataacaagggattatacttctgagtaaaattagtacaaactcctatttgtttaattctttggaattacttctctgatcattatttagtttactactgtgattactaacacattactgatgtgtgtcttgtattggcaaaattggacagtaaggattgttttgccatctataatttagggttaaaaacaaatgacacaaattttactcccctaatttagctaagaatttacaaaaaataggcttgattaaaaatgaaaatgattgtaaaaataacaagttatataagtaaataaatatttacattttcatagatttttactcttgggttgcaggtgacaaaccttgaaattttactcattgtaatatcgtactattgcatatgacagggacacaaccatgccacctgcaactcaagaaccaggttgaagaatacctgaactgtttaacaagcaatgtccaatgatcatgcactcggatattcctgaaatgtcaaattgatataaacactgctaagcacttatccttttaatttctgtacttatttccttgtggactaaacacaaacagttcgcagactgtcactggtccaagaactacactttgagtagcattactctagggagcacttgcattgaagggaccggcagaaagagaactaatgaaggaatttgtgaagtaacaagggaggagaacaaggagaccatagatttgtggaagactagggaatttttaagaggaagtggttaactatattgactgcaagaaaggtcaagtaggttgaggaccaaaagaagccatgggattgacaactatcatcagtgacatttgaaagagtgatttcagaagggggctcttggtggtagtgaaagaaagccaggggccagcaggctgagaaattggggaagcagagagaaccaatggggactacccttctaagaagctagatggttaagaaatggaaatagtgtggtagcttgggggtataaaaactttgaaggaaggctttttagaacgatgaagactttttagacccttccccaaattttaatatcactgaaggagtctcaaactgaagagagttccctctctagatagaaaatctaagaaatacatatattttttgtaggagtcttacagcaatcttcttaaaattaccaagcaggttggaagagatccatgaatttcaagaagttcagggggaatttttttaagactctgctgaaatatatatatatatatatatatatatatatatatatattttttgagatggggtcttgctcttgtcgcctaggctggagtgcagtggcatgatctcagctcactgcaacctctgcctcctgggttcaagtgattctcctgcctcagcctccagagtagctgggattacaggcacctgccaccacactcagctaatttcgtatttttggtagagatgtggtttcaccatgtttgccagcctggtctcaaactcctgacctcaggtgatccacccgccttggcctcccaaactgctgggattacaggcgtgagccaccgtacctggtctagactctgccgaaattctaatacttctttggtaatgcaacagaaaactaaagattttgatggtgaactcaattgcttctgagttgtgtggatgaaaatatattttattattttttccttcaacttttaagctcccaggtatatgtgtaggatgtgcaggtttgttacacaggtaaatgtgtgctatggtggtgtgctgcacagatcaacccatcaccatggtattaagcccagcatccattagctctcctgatgctctccctctccccacccttccccgctacaggccccagtgtgtgttgttccccttcctgggtctattttatggtatgtatgtgtgtatgtgtgtgtgtgtgtgtgtgtgtgtgtgtgtgtgtgtatctatttatgtgtatatattatgatatatacaccacacttttttcaaactattattttaggtttagggatacatgtgcaagtttgttatataggtaaactgtgtgtctctggggtttggtgtgtacagattttttcaccacccaggtaacaagtgtagtacctgataggtagttttttgatcttctgtcctctcaccctacaccctcaagtaatcccccagtgtgtgttgttcccctcttcatgtccatgtgttctcattgtttagctcccacttataagtgagaacatgcagtgtttggttttctgttcctgcgttagtttgctgaggataaaggcttctggctccatccatgttcctgcaaaggacatgatctcattcctttttatggctgcaggaaaatatattttacatactagtgaacatagttaaattaatccatggtcaagacatatattcttttgtaaattgagaaatctctttatcataattgtaatatggtaataaataaatctagattacataaatgtaatctagatgttgataaactggttttaaataaagcaagtgatatctacgtatgaagagagtttacttcagttcctagaactttccttcactttcctgccatccctacttttagtaagcaagcatttactgtgtgtgtaacactgtgctaggtactaaggcaatgatgatacccaagatttggtctctatcctgaagataagcacaggagaaacattatcagtcatgatgctttctgttgcaaacaagtgaaaacctcagctcagcttaggtcagctccagggctggccaaatcagaggctcatttataacactgaggatccagattcttttgaaattcctcctgcaccaatatcagcatttctaccttctctgtaggttggcttgcctcacgttacaatggctgcagcaatcagaagtgtcacatcctcagtaatacttaatattattactattatttaataatatttagaactgtgccatccctgtttcaatttatcaggctcccagcagactactccttatctttcaaatgtcaaaactgcatcctgagctcttgcctaaactaatctggggtgaggtgaatggaagtagcactttaattgtattcattctttgtagctggacctgggcctgggccctatctcctgacatttgcccacaagaaagatttctgaagttaggtaggactggctgttgagtaggccagtgcttgccaaacctttacacatcctcacatatgtcataatatgcagataaaaagataatcccttatacaacttgctgggataaactcaggaggcttacagccatgacctgcttgaaggttcttcctgccttagaccttgctcagctgctccaggatgaggggatttacatcacagcacaactgtattttattcacagcataaaccatctctttccttctcagttgacgagttcagatgggcaataacagtgtctgccaaagagaaaaaaaaatgtattcaaactagataatctattggtacaaataccgagacacagaagtgataacagctttaagccaatgtttgatggtggtagtcccagcaagctcttttctgatgtctttgtgcctttgcacatgctccttctctgtcactgttttcttcatcaaacataatataatggacaagtggaatcaaatagaattgagttcaaattctctgctacccatcggccctggtattggacaaattaactcctctgagcctgtttcctcatctgcaacgtagactagctaatactacccattggaaagcgttgtttcttagctaatgcatgcaaggcttaaaacctagatgacgggttgataggtgcagcaaacctccatggcatacgtatgcctatgtaacaaacctacacgttctgcacttgtatcccggaacttaaagtaaaaaaaaaaaaaaaaaaagaaaagaaagaaagaaaaagaaaaaaaaggctgtttctggggattaaataagacaattatgtaaggtggccagcacagttcctggtacatagtaaatgtcaggcctgcctgacagacttctattcagcagctactgctcccctgaaaatcttcctcagacgtttccacggtgcttcccgttcttacaccactacaatcctttattacactactatccgttcattccccacagctccctcccttcctttccctaaccagtgatcccaaaaggccagcaagtgtctaacattttctatcttctaagtgactggtaaagttccgcacctatcagcgctccaagtttgtttttgttttggccgactttgcaaaacggattgggcgggatgagaggtggggggcgccgcccaaggagggagagtggcgctcccgccgagggtgcactagccagatattccctgcggggcccgagagtcttccctatcagaccccgggatagggatgaggcccacagtcacccaccagactctttgtatagccccgttaagtgcaccccggcctggagggggtggttctgggtagaagcacgtccgggccgcgccggatgcctcctggaaggcgcctggacccacgccaggtttcccagtttaattcctcatgacttagcgtcccagcccgcgcaccgaccagcgccccagttccccacagacgccggcgggcccgggagcctcgcggacgtgacgccgcgggcggaagtgacgttttcccgcggttggacgcggcgctcagttgccgggcgggggagggcgcgtccggtttttctcaggggacgttgaaattatttttgtaacgggagtcgggagaggacggggcgtgccccgacgtgcgcgcgcgtcgtcctccccggcgctcctccacagctcgctggctcccgccgcggaaaggcgtcatgccgcccaaaaccccccgaaaaacggccgccaccgccgccgctgccgccgcggaacccccggcaccgccgccgccgccccctcctgaggaggacccagagcaggacagcggcccggaggacctgcctctcgtcaggtgagcgagcagagccgccgtcgcctcacgcgggaagggcgccccgggtgtgcgtagggcgggcgccaaggcggctcggcggggatccgtcctcgccaggggccgggtcccggcgggaggaggcgccctccctgccccccgccacggcggagcgtctgcagaatggtgacaggattctgggttcttgggcgaggggtctcggcttcaacttgacaggtgtcgggcgggtggggctagggtcctgagcgaagtgacaggtgcagttccctcttgtgaggctcggaggcagagggtcgttgcgagcgtccatcagacgcaaaaaatgaaaaataaaaatacaaaaatggtgtctgtgggagagtttttcaccggagaattggagtactccggtggtcgtctgactttctgttttggttcacgcgatgcaacagttgggaagtattttcttccgggcgtgcactgcatctgaagtccatttgtgggagaggccgaccagaaagccttggacaagaagcgcagggtcctgagtgtccattgcccacaggatactcggctcaggagctttgcggcgtttccttagaacaataatgcatcgaggccttggggactcaaagccatctgtagtgattgatggagcgtaactctttagaggaactgaaacatgggcaaaactttcatgagacatttaccagaagtgcttgaaagtttctaaacttttttttttcctgtttgatgaactcttcttgcgtgttagtcggcttcggcttgtctcattatttcttccattttgccttttgactttgaaccagcaaggatcttggtgtcccctctttttgcctttgt

SEQ ID NO: 1778 - DNA, 6000 bp, Homo sapiens
actccaggctgggtgacagagtgagacccccatctcttaaaaaataaaattggaaccaggattctacctaaggttcatgcactgcatttgaatttcatgtttctttagtctcttttaatctagaacagtccccctcttttttttaaccccctaatttttcaattttaatttttttttgatatggagttttgctcatgttgcccagggttgagtgcaatggcgtgatctcagctcactgcaacctttgcctctgggttcaagtgattctcctgactgagcctcccaagtaaattctcctgactgagccgcccaagtagctgggattacaggtgcctgccaccacgctgggctaacgttttaaaatatttttagtagagatggagtttcaccatgttggccagcctagtttcgaactcctgacctcaagtgatctgcctaccttggcctcccaaagtgttatgattacaggtgtgagccaccgtgcctggccttccccctaaatttaactttttgaggaaaccaaggctagaaaggttcttgtccgctattatgtatttctctgattgtttcctcataaagtcactgagtttgtcccaggtaacttcacctttaatattccaaatgagtgagtcaagccccatctgagaatattcttactacctccatcatcatcccagggtcactctaagaagtcttcaagatgcatgttaacattcagaggaccagtcctgcttcatagtcaattgcagtcagaacttctatgtctcagaagactagagactgcgtatctcccaccagaagttggtgacctcctaataagccatggtgctaccacagctaaatgcaggtggaacaaggaccactgctaatgaataaaaaataaacatttcaccatcaactgacatggacagtgaagaaattccataattaagaagctctcttgggctgggtacagtggctcacacctgtaatcccagcactttgggatgctgaggtgggaggatccgttgggttcaggagttcaagaccagcctggacaaaatagtgagatcctgtgtctacaaacaataaacagaagtagccaggtgtggtggtatgcatctgtagtcctagctactcgggcggctgaggtgggaaggtcgcttaagtccaggacgtggagactgcagtgagctgagatcatgacactgcactccagcctgggtgacagggcgagaccctgtgtcaaaaaataaaaataaaaaaataaaaaagctattttgcctgccaaaggacaaagaagcaattttattcattttttatttttattttatttttgagatggactcttactctgttgcccaggctggagtgcagtggcatgatctcgactcactgcaatctctgcttccagggttcaagtgattctcccacctcagcctcctgagtagctgggattacaggtgcccaccaccacacccagctaacttttgtatttttagtagagacagggtttcaccaggttggccaggctggtttcaaactcctgacctcaagtgatctacctgccttggcctcccaaagtgctgggattacaggcgtgagccaccatgtccggacaaaccttatgatattttattaggttcttgacaggtacttttcccaacgtaatcatgtgttagcattaagtggagtggttctcccttttcacatgctggaggttaagcccagtttctgtcttaaagtactacctgttaattgaattattttgctctaaaggaaaggtttggagtgctctaaaataatcttctttggggccaggcatggtggctcacacctgtaatcttggcactttgagagactgaggtaggcaaactgcttgagctcaggagttcgagaccaggctggccaacatggcaaaccccgtctccacagaaaatataaattagcccagcctgatggccctcacctgtggtcctagctactcaggaggctgaggtgctgaggtgggaagatcacttgagcccatggaggttgaagctgcagtgagttatgatcatgccactgcagtacagcttgagcaacagagcaagacgctgtctcaaaaaataaaaaaaatcatcttctttggaacaagtaattttggtatttttacataataatcatagaaagcttttgaggctggaaaaaaaggtaaaaaatcacctcgcgttagtccaagccagttttattcttatttatttatagggacagcgtcttgctatgttgtccaggctggtcttgaactcctgggctcaagcaatccacctaccttggcctcccaaagcattgggattataggcgtgacccactgtgcctggcctaggccaattttagatgcagagcctatgatgtgcctgatagaaagttattcaatacaataaataacaccaataccagtaaatatgtcattctttcaagtatattaaaattaacctaatttggtttcctttatcctagatgtgaatgaagtcatcaaggcatcaatatagggttacttgtttttgtttttttgagacagagtctcactctgtcacccaggctggaatgcagtgatgcgatcttggctcactacaacctctgcctcctgggttcaagtgatttttgtgcctcagcctctcaagtagctgggattacaggcacgtgccaccacagctggctaatttttgtatttctagtagagacagggttttccaaagttggccaggctggtcttgaactcttgacctcaagtgatttgcctgccttggcctgggattacaggcatgagccactgcacctacctgtttgttttttcctaaacaaatagtactgtttcatgtgtcactacttttgaacacattgctctctcctggaatgtctttttctttcttcttatctacttcctgtccaactgaccttctcatgaagtttctccctgactccctgatttgtggtccctggtttgtgttcacttagcaccttgtatcataatacttttcaccctgtactggaataatgaaccagactacacattccttatcagcaaccatgtctcattcagcttttaatcctccaagatgctccaagtatggcatctgacacataagcagtgagggctcaggacatatttgattgctcacaccccatgccctcgtttttctctcagacatgtttacacaagttcttttgatcgggttgcaaccaaaagaaactgattttagtttctttgagcaaaacaggcctcttctagtaaattcactcaactgccactactttgggcaagccacttcattcagtgagtattaagggtctatcacatgccaggcgctgttctaaacccagaagaatcctgtttcaaagagtttataatctaagggagaagacagcaatagacaattcaccttttacaggaaatgcgcagtctatttctgggcagtgtgaggtgtatcagaatatatatagtattctggaaatcagggaagaagttgcagctgacactgtctggatgaacttcaattgctaaaaaatcagggaagaggatgctgggaagacaagagtaggcggcatttgacctggattttgaaagatgagtaggaaactgatgtgtactttggaggctgttgaagaaaaccagagccaaacagtagttgaagtggtaaaaacattttattcaggaactagtgcaacaggagcgagacctcagaatagatacagaactaagctcaattctcttattgcattagtttcttaatacctttttttttttttttaatcattggccctggttttctttaagtgggggaggtggtgattcaggacatttcagatacagacaaaagaatgaacaaagcaaaaaggagtaaagaaacttagagaaaaagtaaataatccaaagaaagttgagtagtcaaggaaaacaaattatttgtagccagagcctccagtaatgttggggaagtggcaagagatgagggacggtaggacttttttaataattcaagttaccaaaagtgaagttatctggtgatatttagaaaatgaaatgtttttctgtttattcctaggagctcaaatgggaaaggtaagtgaacaagtggctggaatgctatgccaacaagtttggattttatcctgcagcgccaactgggagttctccgagagctgtatggtattttacaaagggactgtagtctttataggtgataggctggagcagctcgtagcagtccctctcctggcctcagtttactcgctggtaacacgaatccggttggaccagatgccctcttaggtcccgtctaacctctatggcatgcttccgaggtacctctgcctctttccaataccaggacctgtgcctcatctcgtccttccttcatacctttgtccagctgccaccttccctagtccctggcctgcctcaggtactttcaatcaggaagtgaggggcggggagggagggaggcgcgtctccagtaaaaacaaactagtcccagctccgccgcctttcctcccaggcagcaccacctgggtggtgccccggggccagacgcgctctagagtgggcagggagccaagtttctcggtcgcttttccgtcctaggtctctggggtggtaggccgaccctccccacagccaagccatctcggggagcagagcaggagcccgtgcctcgcgcgttcctggttcctcagacacaaaagcctctaagtcccggcagcagccaccggatttcatggggacactccagtggcagggcctcggggcgggcctgagacggccaatcggcttctaaagaagtcgggttgtagggcccgaagagcagggtttcggccggggccggggccggggcggtgcgggatgctcggctgggtagcgtcccgggcgcgcgctgcaccgggtcacgtgaggcggccggggccacgtgacccggcgggcccggcgccctggcgctcctcctcttcgctgccggtgggcaccgccgctcgctcgcacttctgcgcccattggagcttcggagatccctgcggtcccgcgggacggcgcggcagcagctgacctcgcaggtagcgtgtgggcgcggggtcgagctcgcggaggcctcttccccctcggccctgcccctgcttcccttccccgcaggccgggccgggagtgccccgttactcctgtacctcccgcctccctcgctcgggctcccgggcagtccctgcgggcgctgcgtccggggcgagggatggggtccccggcccggccccgccagcacctcagctaatgtgctctcctgcgaggaggagggaaggatggggagaggcgagggaaagttttccctgcctccctctcttttttgaggtgcacggactcgattttgctcgtagctgaagtctgactgctgtgggtgccgttttactgagaggagatctcccctccgactcttcctattctctctcctttccaagatcttagcatctctccttcgtctcctgagagtagtgctgtcacaaaccgtattctttatcgtttccctttccgacacagaatccacaaaggcagggattttgttagtgaggacttttatccaggcgtgcggtgaactctaaataagtgacgtttcccttgtctgcctctgataaagtacctacctgctcggtttaagatgactatcgagcacgctgtgttctgctcgcataagtggccttttgtttttatttatttgcatgtaagacactttcaagccatctgcggaactctgcagctggggattacaattttataaagcagtcttgtaataatgcttttagaaaaccagattcatgatcttccttgcttttgccctattctttttttgggaggactaaaagcccttagaggacaaaaactgagtttctgaaactggtgtgtattgtgggctaataacattaaaacatcaaagtatataatgccggaaggaatggaaaaatgattgaatcctgagggcagtttataggtgctttaaactt

SEQ ID NO: 1779 - DNA, 6000 bp, Homo sapiens
catgcccagctactttttgtatttttagtagagacggggttttgctatgttggccaggctggtctcgaactactgacctcaggtgatccacctgccttggcctcccaaagtgctgggattacacatgtgaaccactgtgcccgaccttgtgtctcttagccgaatgggaattacctttgatgcctagcacaatcctgagaattataaaatttgagtgagtataaaattataagcatatactagtattaccttaattacctctgacctattttactttattcttacagcttttctatctacagaaatagtataactaaacgtcaagtttactattgcttaagtgtctctcattctctttcaaagaaactgatcttgctgttgtctccatttaatgcatactcttcactgtgcaactgaaatatagagagtctggaattttcctcaaactagggactaattccctttaatttcatcaagtcttaggtaagttcctgtgttttgtgataaatacatttttaccttccttttaatggaatatttgaatgttcaatttctccaaaaatacagaactttaaaaaacccaaaaaacagtaaggtctttctttcattgagtttgatgtttattgtttttctctcctttctccaagcacaggggaagaggtataaaagcagagggatatatgcttttgaaaagccaccctgggctagatgcagaaaagcagaaattatggtgctagcttcttttactgcataggcagtttagctctgcttaagactattgtacttgagtcctaagtttacaaatctagggaaatcatgcttacaaatgagcatggttttctttttgcatataacagcaccaattacttattaaacacctactatacatcagacgcaatgttggttgctttatatgttacctaattttcatgatcaaatgtatcatgatttccattttacaaatgaggaaaccgaggcttagagatgctaagtaactttaacaactagtaaatggcagagctagagtttggatgcagaactgattccaaagcctatgctcttttctctacatcttgcactgtcagtgtcttttagtggcaggaattctcactggggaatgttggggcttgcatctatgactctggcagctaaatggaaggatagaataataataaaaaagttccattgtatctagggaggcttaccagaccccttcccctatgcacagttgctccaggctttgttattagatgttcctcactctgacaatttacatttcagtgtacactaaatttggcactgtcccttttgttatggaacatctgatcatttctgtctgggtaggtggggaggaaggctgagaagtttttatctttgtcaaggcccaggaatgaaaacaacaccaggaagtaaatcaatgcaataatatacattttatattaaaaatataatatgcagtatattttatatttaatattagtatataacatattaatatataaacattatttaacattatgcattttatatatattagaaattctaccctgtaaaaatatatttctcaaggggccggcattcgggggcggggggggcaatacatttatcacacaatatgaaacttacataagactagatatatctatagtcttcgtgctgtgctgatatataaattccaagtttcagctgttagttacttacttggagatcagtagaaggaaatttcagtgtgacaagaatgttgacaatccctgtgctatctgtactaggatctagttccactgtgctcttccagggaaggatgtagctgtgtatgcaggttttagttggacagtcatctttttctagtggcagtttcccagtcgctgttctgtgtattaggaccacgggaggagagaaaaggttattcttccttctccatttttccacacttaagagaatttaatatactgtgttttctagttagtagttaattttgtgtaatagtctagagattgctatacagatttaatgtgttttacacttagttgggcaaaagtgtattagtatctaccaccaaccagatctaactacataaatatatattatataattatattaaggataatttgtgggttttgcgtgtgaaccctaaaaatctgagccatgtcccagttaatttagaaagtttattttgccacggttgaggatgcgtgcccatgatacagcttcaggaggtcagaacccgaggtggtcagagcagtttggttttgtacattttaggaagacacgagacatcaatcagcgtgtgtaagatgaacactggttcagtccagaaaaggtgggacgacttgaagcaaaggtgggacaactcaaaacagggggcgggcttccaggttttagggagataagaggcaaatcactgcattcttttgagtttctggttaccctttccaaaggaggcaatcagatattcatttatctcagtgagcagagggatgactttgaatagaatgggaggcaggtttgccctaagcagttctccgaagcttgactttttcctttagcttagtgattttggggccccaagattttcctttcacatgagttaataactgtccagtcttgtgaaatatcattttaatattaggatatctgaaatgtttccatatggctgggtgtggtggctcacgcctgtaatcccagcactttgggaggctgaggcctgaggaacacttgagcccaggagtttgacaccagcctgggcaacatagtgagactctatctttacaaaaaataaaattagccaggcgtggtggcgcatgtctgtggtcccagctacttgggaggctaagggaggaggataacttgggcccaggggcttgaggctgtagtgagccatgatcatgctactgcactccagcctgggggacagagatagaccctgtctcaaaatcaatcaacacacaatgacaacaaataaatgagatgtttctacagatcactttgtttttttagaaacactaaattaattaattaatttagttattgagacggagtcttgctctgttgcccaggctggagtgcagtggtaggatctcggctcactgcaacctccatctcccgggttcaagctattctcctgcctcagcctctcaagtagctgggactacaggcatacggcaccatgaccggctaatttttgtatttttagtagagaccaggtttcaccatgttggtcagtccggtctggaactcctgacctcaggtgatctgcccgcctcgacctcccaaagtgctgggattacaggcgtgagccaccgtgcctggcctaaaaacactaaatttagtaaggtactggggtgcagttttgtcactgacagttatggtgctgtagaaagagcccatatctggaagctgcctttagcctcagctctgcctcttgcttttgtaccttggaaaagtcacttcacctgttttctcatctatataggatgaagatcataatttcttttacacagtgttatgagactgaatgacagaaattaaaagaagtgttctacgaaggcaaagttaggtttcttatagcaggaagggagatgcacacagagaagtgggaatctcaggagacggatgtggccaggggctttttacgggggttgggctaagcattattagtcaacgggctgtactgctatttatggtaggttttgaataccgtttctccaaaataacctatttcctccccaaacccaaacttcctcaactgggatcgaactcaatcctacagcgtgttctgagattctatactcgcctcacttctcccaagatcgtaaattctggaggagccattccttcatcatccatgtttgcatccttcacaccgttcactggttaagtgcttagtacgtttgctattgggcaaggtcctcaaacgggaggtggacgtcagaatagtcaggttatcgactgagtaactgttagtggtggataatttaaagccaatttgaaagttcatcctttcccccaaaggcaaaaacaggcgttccttttcttaaaagagaattttaaatagaattgggtctctggtgtcctgcctaaagcccgcaaagaaagagggtacggttgggggtgggggtgatgggggatactgaacccttttctggttgcgccttgcccggagcccccggctagagccctggcgctcctggcgcgctcccaacgcgaatcggtgactccgcaggccgcgcagtgcggaggtgcccgtcccaccctcccccttgtggggtgcggggctccatttccccaagccgctggggtcggcttctggtcttgagatgcggatgaagtggtgtgaagggttgggcttttttttttgttcctaaaaatgcaacgaacaaaaaaaaaagtacaacaatccaaacccaaccatcttaattgcacggcagcttaactgggagactttcttcccgggcggccccacccgggaccgcgccgcttcagtcgagcccaccgtctgggcaaacggcgtccacttcccggagccgctgcccagcctctgcgggggggctttgggcgggcgcaggactctggaagggagaaaagcccgcagcccggccctccccgtcccaggcggcccgcgcgggtggacggcgggagcaggcggcggttggagacgccggaaggaacgcggtctcaccacccggctccctccgccaaggcgaggcgcggccggggaggcgggacacaggcgaagcgggacggggaggcggggccggaggtgcaggcggaggcgggcgacggggaagggagggggagggggaggggaaagggagggggagggggaggggaaagggagggggaggggggaagggacgggaggggagggggaagggacgggaggggagggggaagggacgggaggggaaggggaagcgggagagggaagggggcggagctagccggagccgcgagtccattttggggctgtgcttggcgcgtaccgtgcggtccctgtagttggaggacgggcggtcgcgcggcctttcccactagccggaggtcggagataagtacccgccgcccggctcctctcgggaaagcggggtggtcctcgaaccttcagcgagggtggggagttgcccaggtcagcagggatctgcgtgggttgggggggctggcgaaggccgtctgagctccagtccggcagcgcggcagaaaccagcggggcactgtcatgggcctggggaggagcggcctgcggagggcgccggggcagtgtgtctgtggtccagaaaacctgctccgtccggagccttcctggccccgctaccagcgtctccacatcccctagaaaagaaaagacgggtgtgggccttaggttacagcgcgccgccagcgtttggttgcatggcgccgggggagggcgccctaaccgagaagctgcttaatacaaagagctccaggctcctggcggttcaccaggtctaaacagccgggctttatttgtgggggcgattgaaaaaattgagggtcaagattggggtgctgtgcaaataaatgcgttaatactgttctttttcttctttctttgcagtagcctctagttcgttagtcaaaacgtgaaaaaaaagacctgctttgccctgggaaatagtaaccctgccaaatacatcagcttgtaggagacagaggtaaactacaataattttcctgtgttatcttttttttttaaacacccaatttcaataggccctagaaccttccaaaatggaactgtgtgtagaatacgtatgttcccatccactttcattggtggtctttgttctttgcatattttgttaaaacttagaaaaacagaattcacgtttagcaattatttatgtggtatttatcttaaatatagccaaacattcatattacaaaggaagaaaggggcttccacacttttttcctacttttttttcccttctcctatgcttagtgaattgtcaggctgctagggcttgtagaacagggctt

SEQ ID NO: 1780 - DNA, 6000 bp, Homo sapiens
ttaatctgctgtagtatggtttgtttttgtttttgtttttttgagacagtcttgctctgtcacccaggctggagtgcaatggtgcgatctcgtctcactgcagcctcctcttcctgggttcaagcaattctcctgcctcatcctcccaagtagctgagattacaggtgcctgccaccacgtcaggctcatttttatgtttttaatagagacggggtttcgccatgttggccaggctggactcaaactcctggccacaagtatcttcctgccttggcctcccaaagtgctgggattacaagcataagccatcatgcccagcctatggtttcatctttcataaatttttttttttaatgtattactggaagtctctgaatccagacctgtgaggagactgacatacttgtctggctctcagtctgtaacctctgacaaaccacttatacatactagtttctctcctcatttgtatagctattttaaaaggtatatgaaaagtatttacaaagtttttattttaaatactctgtatcaatgtgttattactcttcattcttttagagactgtcccggtgacttatatgatcaaaacaggacaaagtaagatacagagatcagatttcagatataatctctaaaaatgaaaattaatgtattacacatagcacctctggcatatatatgatcaaaacaggacaaagtaagaaatatcagatttcaatacctctaaaaatgaaaattaatatattacatatagtatctaaaataattgttatgtggctcttgcaaacaatataaaagttacctatgtgtccatataagacagtaagtaaccaaccttttctggcattatcctagaataaacagtagttaaaatttccaagatatttctagcagagatcctgacaaggcaaaatagagctagtacagaatgttcactagcttggtaagttcacttactcagaaagttcacaaagggttgtcagactaaggtgaaattctcagaaatataaaccaggtcactcattacctcgctagttcagagcactaagaaaaactttttccttttccttcattctcttctccataccatagtttagcctggactctttcctgccttttttttttttttttttgggacagagttttgctcttgtcacccaggctggagtgcaatggtgtgatcttggctcactggaacctccgcctcctgggttcaagtgattctcctgccttagcctcccaagtagctggtattacaggcacttgccaccatgcccagctaattttttgtatttttagtagagacagggttttaccattttggccaggctggtctcgagctcctgacctcaggtgatccgcccacctcagcctcccaaagtgctgcgattacaggcctgagccactgcacccggccaggtgctgttattctagaaggtatgataaatagtttataaaagacacataaaagtaagtttcagagatctgctcatgtctatagttaacaccactgtactgtacacttagaaatctgtgtagaggataggtctcatgttaaatgttcttaccacaattaaaaccataaaatattgacaccatactgaaaccgaagttatccatgcaactagcttttgtgtcttcttaaattataaaattagtttttattatagaaaattcagaaaatagagagaaaaagccacccataatcacatcagcaagaaatcaccactactattattttggtgtctttattccaatcccatgtgtccgtgcatgtgcacacattttaacagaactggtagcataatacaattttgtatcctatccccttattttattacatgcctttcccccatcatgatatgttctagaaaaacatgacagtccatgttgtggatatgctttcttattgctcatttatgggtttgttcttgttgctgtgttgttttgtttgtgggttgttgtgtttttttggtattgtaacatttaggtaaacaccttatagagaaaagtcttgctccacagctctaattacttccttagacaattcctttaaatgtacttctgggtcaaacagtaaggacatttttaaggctgttgaaaagatgactaggtttctctctagaaagggtttatatcactttatgaactctaaccaatgatgtattagagtggtccacctctctatgcagttcctaaccttaaataaaaccatagttttataggacttagtaaaaaacaataagacacacttgttaccatacctacccgagtttaaaatataaaagtttaaggcagttaacattagtctgcatctgtgtcttaccaatatatatgtataggcaataaatggtaataaaagttatggggtaggaatagaaatactgggcttaaaagcatcttagaaatcatctaaacacctaattttaggagtcaaaaaaactaagacacccccagcactcaagaagtggagactcatcagttgtacacagcaaactaggcatcacagcctgagttttctaattcttagaccttagcaatatctagaaagggactcaagaactcagtattcttattcataaaatgaaggggtttaatcataagctctctaaaatcccttctaaaattttgcagtttttacaaactaggtttaacaggctctctagtgaaggggaaagcacagaacctgcttttgagtacctgtgttcaagcaccagttttatccttcataaaattaggatttttatatctgggaatggtgccacacacttgtagtcccagctactctgaaggctgaagcaggaggatcacttgagcccagttcaagaccagcctggggaacacagttgagaatcccatctcttggaaaaaaatttaaaaatgatttttatagtatttacctcataatgaaatggctccattgcctgggggatacacccgtggttgtctcgagccaagaaagaattcaggacatggacacacacaaggagtgggtttaggagcggaaaatttaatagggaaaggttcctcacgctgagaaatatcacccaagagagggtctccgggtttggggtgaaacgcaatcgattttgtacagaggcttgaggaggtggtgatttacatagggcccaggggactggtttgaccaggtgaatcatttacatagcccgtctaaagactggccctcccaccctaattttttgttatgcaaatgtagcttctacctggggccgccatgacacctgcacccgtggttttacctagtgatcgccaagacgcccacatagggtgacaaggaaaagggagcggcccagacgcccacatagggtgacaaggaaaagggagtgagaaaccccatattgaatgtacctggcttccagatacagcaggctacatttacatataaaagcttctagcctgcatatttttgcttgcagcttgacttttcaggctttctgttagaaaataaatggtttgggggctttttttttttttttggtagagtctcgctctgttgcccagtctggagtgcagtggcgcgatcttggctcactgcaacctctgcgtcccggttcaagtggttcttctgcctcagcctcccgagtagctgggattacaggtgcacgcacccccacgcccagctaatttttgtattgttagtaaagatgggatttcaccatattggtcaggctggtcttgaactcctgacctcaagtgatccacccacctcagcctcccaaagtcaccggccaggagctgctttttattaaaggaaaattccaccgagaactcttttaccctttctagctgcctaaaagtaatttctcaactcctgtgtgatgtgtgagaattccataaactacgaaactatacaaacataaataaggtttaattacatatggcaaactctacacatttaaggtgttattttggagcatcagtgtatcaagcaagaaaaggttctaaacttgaactgtgatttcaaggcaaggcaaaacaaatattacataaggtatcaggtacaaagcagtgtcatgaaaatgagcatatctgaacaaaagctgtgacagaattaaggccagataacctatcataaatgtatagaatgaacagaacagcccggttttaggaaaggacttcccagggaggtttagtaagccagctgggagaaaggaaaaaaaacgtatttttagggagggatagggacgctcccattgtgcaagaaggaagtatagccggttaacagctccatcaagttctactagaaggagtgcctatgtaaatgaaattctgcttttaaagtgcctattatataaaggtctctagaaaactcaagccctgttctacaagccctagcagcctgacaattcactaagcataggagaagggaaaaaaaagtaggaaaaaagtgtggaagcccctttcttcctttgtaatatgaatgtttggctatatttaagataaataccacataaataattgctaaacgtgaattctgtttttctaagttttaacaaaatatgcaaagaacaaagaccaccaatgaaagtggatgggaacatacgtattctacacacagttccattttggaaggttctagggcctattgaaattgggtgtttaaaaaaaaaagataacacaggaaaattattgtagtttacctctgtctcctacaagctgatgtatttggcagggttactatttcccagggcaaagcaggtcttttttttcacgttttgactaacgaactagaggctactgcaaagaaagaagaaaaagaacagtattaacgcatttatttgcacagcaccccaatcttgaccctcaattttttcaatcgcccccacaaataaagcccggctgtttagacctggtgaaccgccaggagcctggagctctttgtattaagcagcttctcggttagggcgccctcccccggcgccatgcaaccaaacgctggcggcgcgctgtaacctaaggcccacacccgtcttttcttttctaggggatgtggagacgctggtagcggggccaggaaggctccggacggagcaggttttctggaccacagacacactgccccggcgccctccgcaggccgctcctccccaggcccatgacagtgccccgctggtttctgccgcgctgccggactggagctcagacggccttcgccagcccccccaacccacgcagatccctgctgacctgggcaactccccaccctcgctgaaggttcgaggaccaccccgctttcccgagaggagccgggcggcgggtacttatctccgacctccggctagtgggaaaggccgcgcgaccgcccgtcctccaactacagggaccgcacggtacgcgccaagcacagccccaaaatggactcgcggctccggctagctccgcccccttccctctcccgcttccccttcccctcccgtcccttccccctcccctcccgtcccttccccctcccctcccgtcccttcccccctccccctccctttcccctccccctccccctccctttcccctccccctccccctcccttccccgtcgcccgcctccgcctgcacctccggccccgcctccccgtcccgcttcgcctgtgtcccgcctccccggccgcgcctcgccttggcggagggagccgggtggtgagaccgcgttccttccggcgtctccaaccgccgcctgctcccgccgtccacccgcgcgggccgcctgggacggggagggccgggctgcgggcttttctcccttccagagtcctgcgcccgcccaaagcccccccgcagaggctgggcagcggctccgggaagtggacgccgtttgcccagacggtgggctcgactgaagcggcgcggtcccgggtggggccgcccgggaagaaagtctcccagttaagctgccgtgcaattaagatggttgggtttggattgttgtacttttttttttgttcgttgcatttttaggaacaaaaaaaaaagcccaaccc

SEQ ID NO: 1781 - DNA, 6000 bp, Homo sapiens
gtaacatgcattagtgacttgaaatagtattcactgtgttttgcagatctccaaatattgacacatttcattatacagtactcctttcccctcagaaaatcctcacattcattaatatcactgcccatctcatcataaaagtctttaattaatgggaagctgtcaggctcataaatatcaaatgttttccaaaattctaatttttacataaaacccagccttttcattagcaagagatactgtcaattgttttctttgaagtagcaagctcattttttttccccagaaaatgtcaggtagctaagtctgaatagccatagtttatcatttgttctttcagaaggtaaaaatggtgttccatgaaaaaaagcagctggtttaacttgccgctcttcacttaagtgctttttctccagacaacatctgccggtatgcagaagtgctttgtgcgtactgcctattttgtcacgcaatatattaaaaaactgtacacaggctcaagacttaataaaatgaataatttttactgctgcatcaagaacattcttaagtgaaaccggtactccaaccccaatttgggtggtgatgaagaatacaattcagcgcttcttacagctttgctcgatccctcctaaggcttcagcagtgtctacacaccattgcttttacaccattggtacaaatgttgacatggtgcaaaaagcaagtaacatcttagtgtcattacgaaaatagttttgatctcacagatgccctgaaagagggacatccaggtttctgcccaccacattgtgaaaattgatgattctagataatacaaaatggcttctgttactgttctggtggtttaaaaacaacaaaaaacctcatttagttctctacctagaagagtgaattgcaactctcatcttgtgcttttacctgtgattttaaaaattgtaatcttgcctttgaaacaaaaatatgccaattcataataaagtctacatgagagtacatgtttggatttatatttctgtgcttctttcttttatataacataccatttcatatttgtgggcccagagtaaagagctcattctgttacagacactgaatagccttgtttttgtcagtagtcagctctgttttaaaacaattgcttgggtcctgctggctcaacttgcagttgtcctagtcctgagtcttgtcttagccaaagactgttgttggaaagcccacacaaaggccttgtgtataggatgccctactattaaaggagcatgttctagtctcagtggattaaatttgctttggtgtgcattcccttaccaaatttctcactactttgtttggctggttatttcagtgaaaaatcattttaacgtgaaggcagatttcttctaattattacatagtcctagtggtgacggttattggagtaaaataattttttttttttctggtaggatgtgatggagctgcttgaagaagatctcacatgccctatttgttgtagtctgtttgatgatccacgggttttgccttgctcccacaacttctgcaaaaaatgcttagaaggtatcttagaagggagtgtgcggaattccttgtggagaccagctccattcaagtgtcctacatgccgtaaggaaacttcagctactggaattaatagcctgcaggttaattactccctgaagggtattgtggaaaagtataacaagatcaagatctctcccaaaatgccagtatgcaaaggacacttggggcagcctctcaacattttctgcctgactgatatgcagctgatttgtgggatctgtgctactcgtggggagcacaccaaacatgtcttctgttctattgaagatgcctatgctcaggaaagggatgcctttgagtccctcttccagagctttgagacctggcgtcggggagatgctctttctcgcttggataccttggaaactagtaagaggaaatccctacagttactgactaaagattcagataaagtgaaggaattttttgagaagttacaacacacactggatcaaaagaagaatgaaattctgtctgactttgagaccatgaaacttgctgttatgcaagcatatgacccagagatcaacaaactcaacaccatcttgcaggagcaacggatggcctttaacattgctgaggctttcaaagatgtgtcagaacccattgtatttctgcaacagatgcaggagtttagagagaaaatcaaagtaatcaaggaaactcctttacctccctctaatttgcctgcaagccctttaatgaagaactttgataccagtcagtgggaagacataaaactagtcgatgtggataaactttctttgcctcaagacactggcacattcattagcaagattccctggagcttttataagttatttttgctaatccttctgcttggccttgtcattgtctttggtcctaccatgttcctagaatggtcattatttgatgacctggcaacttggaaaggctgtctttcaaacttcagttcctatctgactaaaacagccgatttcatagaacaatcagttttttactgggaacaggtgacagatgggtttttcattttcaatgaaagattcaagaattttactttggtggtactgaacaatgtggcagaatttgtgtgcaaatataaactattataaaatctgtttcaagtatgcagttttcttttgttagaaattgttagagaatagagagtggtaattcagatttggtcaacgattctagtcacatattttcctccaaaagtattccttccaaaaataatctatacatgttcaaattaggtagcataaagataaaagtgaaatttagtagtataggcctgaacctttttttgtttaaaagagtgcttttgaaataagcatccaccccaaatgttggttgtatttatgctgtgataaaaataggtgagagatcatatgatctaatattgtattgatggaagtataggtagtatagtagtgattgttcttcaagcatgcagtaaagatcacttttttttttttttttttttttgagatggagtcttgctctgtcgcccaggctggagtgcagtgatgcaatcttggctcactgcagcctctacctcccaggttcaagtgattatcctgccttagcctcctgagtagctgggattacaggcgcgtgccaccacgcccagctaattttttgtatttttagttgagacagggtttcactgtcccttaagaccatcctgttagccaagatggtcttgatctcctgacctcgtgatccgcctgcctcggcctcccaaagtgctgggattacaggtgtgagccaccgtgcccagccaaagactgctcttaaagcacctttttgacagtgaacatggtctaaaaaagggaagatattgtagaagatttcacacacacacgcgtgtgtgggagacaactaaaggtattgaaggtactaattaattagatttccaaaattttctacagagagttaattatcaccaaaatgtgaatggtacatacaaaacctggcattttcttgtgataagtttacatttttaggagagtggagctttcaatctgcccttttctcctttgtttttgtagttttcaccaaagatgatcaactagaaatgttaagtggctatgcaagcaaaagcatagataggttaaaaaaaaggatcagctggctgggcagggtggctcatgtctataatctcagcattctaggacagtgatgtgggaggattatttgaggctaggagttccagttcgaaaccagcttcgtaaacatagcaagacccagtctctaccaaaaaaaaaaaaaaaaaaaaaaaaaaaaaaaatatatatatatatatacacacacacacacacatatgtacacatacatatatatacatatatatgtatatatagaacacatggcaagagcaggaaatgggaagactaccttttttctggcagctatgtgttgttttgttcgaaagatggcaagtgtacaaccaaaccaatccacttgcttacagaaagaatgtttagtgtagttaagactaatttgacaacagataaaacagtctgtcagctattacaaagtaatcagctgaacactaatgctgttctgtctgctcacaagagataaagataccctctcatggaataaacaccttgcttagaattcatataacaaagaagtaaccttataactgctctctagtctgccttatttgtgtcatagagtaagatattccttgaaagcccattaagtggaatagactttctgaaaataagagttctttacctcagtcctcctctaatttggttgagaggaggtaatgaaaatggggacaggataaaaggtggcaactaaatttaaagcacagaagaaatgatttccttctagctatgagaatagtcaaattgagcttgccaggctgtctcattcctaacatgtaattcatgatttagccactaaatttctaaggagatcataagaaattaagaaaaacgtttaagtctagcctctgcgtggtagacaggtatggggagggagaatgcttttcccctcccagtaataaaaaaaaaaaaaaaaaaaatatatatatatatatatatatatatatatatatatatatatatatatatatatatagttttactaggttttcatggataagtttttaaatgtaagacaggaaagggatctatttgatgtctatcttcagatatattggcagttttccttaagctatttagttcctcatctgttgctttttcattttgtatactgcaagttcccaggcaactcgaatttgcaaacacagccatggatacactatttaccttacagtagtttcctgggaatctaagtctggtttttgttattcttccctcccctccactgcataatcatgtataactagcaacatttatggttataggttgatttcctaagtgtggctgatggtagcctctagtttgaagtgagggaagaatgagtagtcaggaactggtcactttgaatgtgggagggaagatattcacgacaaggttttctacgataaagcagtttcctgcttctcgtttggcacgcatgttagatggcagagaccaagaattcaagatggttggtggccagatttttgtagacagagatggtgatttgtttagtttcatcttagattttttgagaactcaccagcttttattacccactgaattttcagactatcttaggcttcagagagaggctcttttctatgaacttcgttctctagttgatctcttaaacccatacctgctacagccaagacctgctcttgtggaggtacatttcctaagccggaacactcaagcttttttcagggtgtttggctcttgcagcaaaacaattgagatgctaacagggaggattacagtgtttacagaacaaccttcagcgccgacctggaatggtaactttttccctcctcagatgaccttacttccactgcctccacaaagaccttcttaccatgacctggttttccagtgtggttctgacagcactactgataaccaaactggagtcaggtattttgtactttgcagtatttctcttgtataccagtttgtgatgttttctctaaaaacttgaagttcctcaggcctgtaacttctggaaaagatgattattcaaaataatgttttggggtaaccagtggagttgggtagaatgaccaaataattattttccaaactgggatactttttagagtgaaaggggctattattaggtgggacaaaaggaataaatgaagactgcccagaaaaaactgagactatggacattcaaatcatgggagaaaataattttgtagattatgttccattgctaatgaatttgacttagaaaagaattgccttatttttaagagattgtttcagtggttcacataaaggctcgctcactggtttctcttgagttccttacacactatataagttg

SEQ ID NO: 1782 - DNA, 6000 bp, Homo sapiens
ctacaagaaacaaaaggcatgctggcattagattgatcatcagctgcactaaaaatggtggaataatagcttgaaagttcagggggaaaatgattttcaacttgagacgcctctacccagtcaaattacttgcgagggcaatataaagacattgttacacatgcaaagactcagaaagcttacctgccagacaccttttcttaaggaggagttattagagcaggtactccatcagtaaaagagcagagtatcctgaggaagccatgggattcaggcagctgcagatgtgactcagaatgtcagttttgtgggtgactaagccaccagttcatatctgagcaagaacgggggatccaggaaacaaaggtatttcatggaatatacagttggaagaacttgaagatatacttcaggcaaagaaaaggaaaataagaaaagtacctagaaattatatttcctaaaagactctacaagaaaatcacaatacaaatatgagttaaactgagtcatcagtgggctttcaaaaaaatattccaagaaaatagaatgggtaagatggcacagatttctttcaacaacaaaaaagtactaggcaaagcaacaacaacaaagtaaccatgattttgagaaactgaacagcacagggttgagacattgtgattacacaggaaaatcaggcccagcaaactgcttagctctgctgtggaccaacattttcataatgttaatgctgcttattggttattgtctattagaaccaacttatagaagacttaggccgggcgtggtggcttatgcctctaatcacagcactttgggaggctgaggcaggcagaggtcaagaccatcctggccaacatgttgaaactccgtctctattaaaaatacaaaaattatctgggcgtggtggtgcacgcctgcagtcccagctacgtgggaggctgaggcaggagaatcacttgcaccccgaaggcagaggttgcagtgagctgagatggcgccactgcactccagcctggcgacagagcgagactccatctcaaaaaaaaaaaaaagaagacttagttacagaagggaatataaatgttatcagttgtggaaatctaagagagtacagctttgaaaagtttggaggtacagaggtttgaggctgcaatgagctatgattgcaccagaggtactccagcctgggcaacagagggaggcctcatttctaaaaaataagaaatttggaggtagaagcagaggtggggagttcaagggaagtaagagttcttcctatcatgaaatggagaaccaagaggcgctgtctgtatttaatagaactaaaaacaacagtttaaggatattaaagttactaaagtgaacaataggactaaatcatagtgttaactaccatgtgcaccttaggggggtgaattaagctgactttttatcagtccttgcaagagtcaatagtgtcacaaaatagcagcttaatcctattcatacagttgaagatcatcaggagaatttaaaaccacaaaggtcaaagtggttgccctttggaagtgggactgaagctggggagataaaaagcaaggaacaattgctttttgttctaggtcttcctctactcaactttttttttcccctttgacaaaacaaaaaccaaacataacaatcctggtgagggtcagagatcatctattttaatgcctggaaatatattcggtgagtcatcttgtggctcttaaaccaaaccgaagttaaaaagtataagaaagtctatataactgtagactacaaagcagttaatacagagtgaaaactcccagtcatctcaggagaagtggcgttttattatttctggatatatccagaagctctcctggctgggtatccacagcttggcaacagctgcataaaaagggggccagaccttctctcaccatcccctctccctaccctcaccagtctattcttactgacttacaggttgaattgcatcccccacaaaatatacgctggagtcctaatgtgcagtacctcagaatgtgatcttatttggaaatagggttgttaaggatataattagttaagatgaggccacactggggtaggatggtccctcaatctgatatgactggtgtccttatacaaggggaaatttagactcagagacagtacacataaaggaaaggcaatgtgggggagaagaaggccatctacaagtcaagtacagaagcctggaacagatcttttcgttccagccctcagaagaaaccaacactgtcaacacctttattttggacctctagcctccagaagtatgagataataaatttgattaaaccattcatttagcttgtgggactctgttacagcagccctggcaaactaatacaccgatggaacaagggaaagaatccctttcatgactgccatcattgggtgggaaagaaaagcattaagcacctttgtcatcttctcccctgatgctgtcacaaatttaatctgatagaaatctgtcttttgctcagttctcaagagcagcattctgagtacaggcatgggcagtatttttttttttttttttttagacagagtttcgctctatcacccaggctggagtgcagtggcacgatcttggttcactgcaacctccgcctcccaggttcaaatgattcttatgcctcagcctcccgagtagttggggttacaggcgccacccaccatgcccagctaatttttgtatttttagtagagacagggtttcaccatgtaggccaggctggtcacgaactcctgacctcaggtgatctgcctacctcggcctcccaaagtgctgggattacaggcctgagccatcgtgcctggccttctttgtttttaattgaaactagtctttgtatagagtacaaagaaagcagtgcagatgttgtaaatgttgatttgtagcatttcccttctcttatcaccacactacagaatagttgtacattaactttgacattgtggaaggaaggcaattggagctggccagagcaaagccattttgttcctgaatgccattttacaactgcctgactgcagaatgtacttgctgatgttgcagacaaaattgctgccattatgaaaaggacttcatgctgaggactgaacttttctcaaacccctgaatcaaggacttttgcctagaaaccaatgaactgtcatgataacgctttatcttcaatcaaaatagtgggttacgaaggttatggatgaactagtgagaactgacttcttacttcctttaaaaaccctacccaaaaatagctggtcaggacacaattcaaatgcttctggaatctgtgttccttgaactgcaattctcagactgccaataaacttctttacttggatttcggtctctctgactctggttgacacgttataatgaacacgttcagcgcttacaagtaaagggtaaccagatgttgttcacagtaatcctatgaggtaggttctatacttttatacagagggatttagttactctgctgtattagtttcctaaggcttctgtaacaaactgtgacaacctaagtggctaaaacgacacgaatttattaccttacagttctgaagttcagaaatacagctcactgggttaaaatcaaggcgtcagtgtgcatggtggttttcctgtagtcccagccactcaggaggctgaggtgggcggatcgcttgagcccgggagctcaaaaccagtcttggcaacatagcaagaccctgtttcaaaaaacaaaaaaatcaaggggtcagctggactgttacttctggaagctctggggaacaatttggtttttgttttttgtttttccctccttttctagcttctcctccttttccacctcccacctcctcctttatatatatatatatatatatatatatatttttttttttttttggagacaggttcttgctctgtcaccaaagctggactgcagtggtgggatcatgagccctctccagctctagtgatcctcctgccccaatcccccgagcagctgggaccacagtgcccgtcgctatgtctagttaatttttcgtagagacgagtgtctcactatgttgcccaggctgatctcgaactcctgggctaaagtgttcctctcctgcctctgccttccaaagcactgggattgcaaacatgagacactgtgcctgctcctcttccagcttcttgaggccagctgcattccttggctgttgccccttcctccaccttcaaatagctttctcatactgaccttctttttgggccccttccactttagagaacccttgtaattactttgtaattacccaagcacacactccaagatcgtcaccttattttaaagtccgctgataagcaaccttaattccatctgcaatcttaaccccctctgccaagcaagagaacaaacgcacaggttccagggagtaggatgtggacatcctgaggcggaagcattatcccgccttccacaattgcccaaggtcacatagctagtaagttctagctagcactgagtgctgtgcccgtgaaatttatctacataggctttcacttaacctgcagacagaactcagttagtcggggacaatttccctcaatgttaacagcactgttccaccgcaacgtggaacaacagctttaaaacgtgctcttcgtaggcccggctactccaagaacagtgcctcccgccagacccaggcggcttccttcacccgcaacccgagagacgacccgccgggcccgccccgcggaagccgccggttgccaggccaaggagtggactagggtcgccggggaagcgggtgagtggtccccgccctggcgggctgcctctagaacgaggagggcggcgcgtggtcgcggcgcggagccgagtgggagcgaggggtagacgcgccccggacgcgcggccgcgcccctcacttccgccccgcggtctggaccactcgccgcaaacccgcaagtccctcgccgccttggggtctgggcgcgcggtgccgtgggggtcagcagggcggagcggcttttccaggagaaagggccctcacgggtgagcggggcgactgggctcccccgcggtgcagttgccccgcgggcgccggccccggctcaacggattcttctcgctcgctgcccggaaagaaccagtgagaaccgctgttgcagcaaaaaaagaagttaataagcgcagggctggccaaaccagaacagggtctcagacctgtctccccgagaattcgggggcgagggttttaaagggcattttggcttcggggggctggggaactgaaacagttgaccggctggggatgaaatcacaagagcttctgaaactcggggcggcttcgttggttcccaggaaggggtggggtcagtttcccttgtcttgaagtttacacgaaatccctctcccagttatcctagcctctgtgctagaataagaaaacgacaacacggtgaaaacttagcccgtgaggttagaagcaagatggagtcagtcatgttagatttctcgcattacttatacatctgtaaaggtggtttcagggacctttctgaacttagcccgtatctcactggtgatcccacttctgggtatttgcaaatcactttattaggtttttaaaagtattgttgcaggcatgcgaaggggccgatatacttttgccatgtccagagtgtattcaggtcttgtaatgatcatatgggtgtaatattgagtaacaggcaaatgtgggcagaaaatatcaaatgtggttttcagctaagaagtctggttgctcttaattttcagttactctccattgcatagaataaagccccgaagaaacgaagaataagatcatggggaaacttggcttccatgttaaaccgtgtaataccaggtgttagaatagtagtaaaggacttgtttctttcacatctatatacactcaaaagacctcatcgatcttggaaaaacattgttt

SEQ ID NO: 1783 - DNA, 6000 bp, Homo sapiens
caacaatattgagtcttcttgactcatgaatttggagtagctctccatttgttagttttctttaatttctctcggcaatattgttgggtttttttttttttttgagacagagtcttgctctattacccaggctggagtgcaatggcgcaatctcggctaactgcaacctccgcctcccgggttcaagcaattctcctgcctcagcctcccaagtagctgggattacaagcacccgccaccacgtccagctaatttgttttgtgtttttaatagagatggggtttcgccatattggccagcctggacctcaggtgatccacccgcctgggcctcccaaagtgccaggattacagacgtgagccaccacgcctggctgcaatattttttagttttcggtgcacatcttgcatatcttttgtcagatttatttttcagtatttaatattttgatgttactatacatgtcatgactctttgcatttaaaattttgattgttactgattttgttttaaatcttttttctgttgaagtataaacttggtaaagtgtacaaatcttttaaaaattttctctcttttttttaaacttctctttgggaaagctttattgtgaaaaagacacaaataagagattttgttagattcagtttgaaattatcaagtgtaatacacttaaggatggcttcaatgttagactgggatggttttctcttttaaatgaaaaggatccctttcctaggaaaatgttaggtaacacagtataagtgactattttcactcttcaatttgaagatcaattatccttcaataaatgcccacttaatccagcatggttactcctccccttctttaaattaccaaagctaagtacattggtatatttagttgtgtcatttgcacatgaaaacttttttttttaactttttttttttttttgcaataagtctcgctcttgtcctccaggcttgagtgcaatggctcaatctcggctcactgcaacctctgcttcccggattcaaacgattctcctgcctctgcctcccaagtagctgggattaaggtgcctgccaccatgcccggctaatttttgtattttttagtagagatgaggtttcaccaagttggccaggctggtctcgaactcctgacctcaggtgatctgcccgcctcggcctcccaaagcgctgggattacaggcgtgagccactgtgcccggctgaaaacatttattaataacttcttaagcatttgtctgtccttcctcccaagatttcaataaactgatgccaagaatttatggagaaaattataaaaactttactaaaagacatacgaataactgaatgaaacaagcaattatgttcatggactggaagaggcaatacaagggaaatatatcatttctcctcaaacgaatctgcaaaatcaaagtgaacaatttgttgttgttgttgagactcacactgttacgtaggctggagtgcagtaacacgataagagtctcaacctcctgggctcaagcgatcctcctgcctcagcctcccaagtagctgaggcacgcgccaccatgcttggctaatgttttttatttatttattttttgtagagacgaggtctcaccatcttgcccaggctggtcttgaactcctgggctcaagtgatttttctgccttggcttcccaaagtgttgggattacaggcgtgagccactgcacccagcctgcacaaatcttgtgcataacttgataaaattttatgtttgaatacactgctgtgattaccagccagatcaagatatgtaacatttcccgcatccgagatttcttcatgctcctgttccccaccctccctgacaaccaggaggttcccttatgatacctctcatctaagtggaatcaatcatgatgtactccgtctggcttttttttttttttaccacaacttatgtatataagcttcatccatatcgttgtgtgtagtagtcgttcattcctattgctatgtaatatttttttctcctatttaaggacatttagattatttccagtttttgctaccttgggtaatgctgcaatgaatattcttctacatgatcataaataataaatactcttgggtatatgcccagtggtagaattattgggttatggtctgtgtataactagctttagtagatagtgtctgatatagtttggatatgtgtccccacccaaatcacatgtcaaattgcaatccccaatgtcggaggtggggcctggtgggaggtaactggatcataggggtgggtttctcatgaatggttaagtaccacctctcttggtactgtccttgcaacagtgaattcttgtgagatctggttgtttaaaaatgtgtagcacctacccccaccctacttgctcctgccatgtaagatggctgctctacctttgccttgtgcggtgattggaagcttcctgaggcctctgcaaaagtagaaactgctatgcttctcgtacagtctgcaaaaccatgagtgaattaaacattttttctttataaattacctagtctcatttatagcaatgcaagaacagacatacggtaccacagttttccaaaatgattaaactctcaccaacaatatatgaaagatacagttgctacatatccttgtcagtgcttggtattggaagtccttttaatttaagccattctggtggtagttttggtatctcattgatttcaatgtccataatatatagaacttcttttcatgttgggcccatagggcggtcttggaattcaccctttcagaggccatacatatatgtgtattggtgcatggcagaggctggtgtacacacattagtgtatggctgagccataaccggagcatacctgagactaaccctatggtctaagaagaacttacgtttggagtcctgggctaaggaatccaggagcagccaacccagagattcactccttatctatgaaggacatccacatccctggcccgtatcttacgctgtacagatcaaggccctttggggttaaatggaggttgctagaaggagagtgctaagtgaaaatgctatatagactacgtgctttttacaaatggtagcagttctccaggtcagccctccaccaccggaccacccttgtatgtaaatcctgaataaaccttgtctccttcactgactctgcctctcttcttacagtgccatcccaactggagtcagtggggtccagaaggacaattggccatttagataacatttgaaaactaaccaaggtaattcacagtaacattaaaaaatacaaatgaacatttcaataaaggcagaaaaagcagttgatattcaatgctttcctcctgatgttatgaccaagacaaggaagtccattatcactgtttttattcaatagtggaaacactagccagcaacaaaaggcaaaaataaataaaaataaaaggtataaaggttacagagaagttaaaccatctttattcgtggattgcaagattttgatcacagaaattccgaaagaatctacagagtattacaaataacaagggaacttagcaagatgcttgcatataaggtcagtatgttaaaatcaatattgtttattcttacgagtagaatataaaaaagtcaaaatgccatttaacattgtatacaaaacactaaatactcaagaataaatctaatgaaagatatatatgatctctatactgcaatctatccaagcacagctgcattaaaatatagatatatgtgcaatctacaaaatattgccaggagaaattaaagaccgcttaaataaatggtgggggaagaatgatattcatggattgaaggacttgttgttaagatactagttttcccaaacagatctatagattcaatgcgagcccaataaaaaatcccccccctttttaacaagctaattccaaaattcacctagaaatacaaaggccgtagaataagccaaaacaatcttgggagaataagttacaggacttaaagatttattataaaactacattaaattaacatagtttggtactggtataaagttagacaaagactactccctcccgctcctcaatctgcccccatccctagaacgtgctggcagctttctccatccgatctgcaagggttaaagggcgctgaggaagggctgaccgactggggtgggaaacaaagcggcactgagataacttcaggccaccttcctcccctcagtaccttcggatgaaaggtttcccttcttggtctgggaagcccactaagaagaaagcctgggctgtggcgttctggggaagtgaatagtacggccgccgggcgcgtcgccccaggaaccagaaggctttttgccgctattagtgcagaatgacttccggcaagtcccagtcgtttagaatccccagcccaaagatcgcggggatccacgcgtcatccgggcctctgctcccggaagagaccacgcagccgctaaagacgtaatggaggcgaaagggcttggctagctgtggcagccatgataaaaactagggaaaatgggagctcgaagtagcttccgttattaacagacatacaaacgcccctaaccgccacacgttccttagggatgacagtacgttacaaaagtgcttctaaagtactactgaaagctccgtgggagtgcccgctggcgtgggcgcggtggaagggaggaagaacgtgtacgccccaggcctccgtaaccatggctgcgaggggcggggactgggagcgcgggtcctgggccggggtgcggctgggaggaatcggtcctccactgtcccagccggccccgcgccggcgtgtcgcctcccgtccccctagcagcacgctgcgtggctgctcgctggctatttaggacggaagctcggttggtgtttctccagaagtttcccccttgggcggtggtggaggtggtaaccgtgatagtagcagctccggcggcagcaacagcgactacgagggatggcggcggctgcagcaggaactgcaacatcccagaggtgcatgtttttctttccctttggtatttattttatccccctttccttggctagtgagccctgctgaagtcgttgttttcctgacaggtttttccagagcttctcggatgccctaatcgacgaggacccccaggcggcgttagaggtgagagagcccatttctgcttcctccactcttcttaggggagctgggccacttcgggtccccgctgacccgccttctccccgcaccgccggacagggacccaggctcttgttgatgctgcgtctcagctccggtattgagattctccgtctcttttctctgttacacggtagccgcgttaccccagactcctgtcttgccctttccactccctacagctcctgagaaaaacctcctctatttcttgggagcatggttggcatttgtagtttggctgaaaggattttttttttaatgacatttatgattagagaagtggactctgggctcgatgaagttaattttttcgtttgacaataattcttgccattcttacgtaaaagtgtcggtatgaagtcagtctactggagcaaaacccttttccctcacgtccctgaaactttccagatgtcttatcacaattcattattcactcatttgtatattcatcaaaatttttttttggagtggctgtgtgcaaaggcgctgattgctgtgggttaaagtcttggttatatactcagctaacctagaaatcactttttgtaggtgtgcaatgaaggcaaaccataaagctgtaaaggaatgtaaaagatcaagagttaaataataagaattaaaggagaacctaaagataaatgatgctgcgggtcacagaatttagccaggagtttttgtttgtttttgcgttaaatcacagaaaagaggaaacctgttttgctgttacgtttaacaatttgaggcaagacagcgtcttttctagctatgacttttataa

SEQ ID NO: 1784 - DNA, 6000 bp, Homo sapiens
ggagtgcagtggtgcgatcgtggctcagtgcagccttgacctcctgggctcgagtaatcctcctgagtagctgggatcacaggcatgcgccaccattctcagttaatttttttttattttttgtagagacgaggcctccccatattgcccaggctggtcttgaactcttgaactcaagcagtcctcccatgttgacctcccaaagtgctgagattacaggcatgagccaccacgcctggcctgttgtctgaaagttttctgttttcctaggcagcgtccttccctgatctcttggcaagagagagcaggggtttgttgggactttttttttttttccttgtttgtgccccttggtgtttccagcttcttcagctccaagtctaggatatatgaggcaaaaagaaaacccagaatttgccaccacgtcatttcttgagtcccaaggtccctggtaggtctatcttcactttaccttttggtgtcttttttttttttttctagtcagggtcttgctctattgttccagctggaatacagaggtgcgatcatgaatcattgcagccttgaactcctgagctgaagtgatcctcccacctgagcctcctaagtagcttgcactataggtgtgcaccaccacacctggctatttttcttcttcttcttcttcttcttttttttttttttttttttgtagagataaggtctcctatgttgcccaggctgttcttgaactcttggacttaagcagtcctcctgccttgtcctcccaaagtactgggattctaggtgtgagccactgcacctggccccttttagagtctttttacctctgtttcatatgtagcatctagggtgtttagatttactactgggaagaataggaaaagtacatctacttgatcttcccaggagaagtcattctcactttctacttttaaaagtgtggtagacaaaattagcagtatgtcagatcaaagatgtcaagtcaagtcaaatcaaagatcaaagatagaatctgaactcattttcatatagaaactttgacaattataaccaaattgtgtatacccataaaataagccatctgtgcagcaacattgatctggaatatacgaggggcttctgtccttgtgagaatatgaaagaaactagactttgttctctataatctccttatctaattgggacaaaagaccaagatatacaaaataatcaaagggaaatgctaaattgccctgcagtctattaggagagatgcgggggtggggcgataagtgtcatcagcaaatatggtcagattgtaaaccaaatccacaactgaaggtcctcttggggtagtttgtgtttgtctgtttatttgagagagagtttcactctgtcactcaggctggaatgcagtggcgctgtctcagctcattgcaacctctgcctgccaggttcaagtgattctcgtgactcagcctctagagtagctgggactacgggcgcatgccactacgcctggctaatttttgtagttttagtagagatggagtttcaccacgttggccaggctggtcttgaactcctgacctcaggtgatctgcccgcctcagcctcccaaaatgctggaattacaggtgtgagccactacgcctggccttggggtagtttattatacagacttgtcaaatgtaattcagtcattttatttaaagcccactgtgtgctaggccactgtgcttagaactacgatatgaatattagtaaaatgtactccttgcccttaatgagctgtcagcattagttgaagtcaagggtggaaagcagatctaagaagatagaaccttaaattgcaacaatgcactgtgacacatgttatgtaaatggtaattaggctcacacagaagacaaatttacaggaatagagaaataagaggtcagagaaagccacatagaggtggtgacatttcatgtttggaagatgactaaggacacaaaaatctctgccatgcaaaaaagcccatgtaagggagctcggtagagcgtgtcggacatggggttacattgaggttccaatgtgtaggatatgtaactgtatacattggccactaacacagttgtttatttttaaatgtttatattgtaataattcgctctattctttgatgtggttcaaatccattgatttttatcatgttaaaataagaaatatccagatggggctgggtgcggtggctcatgcctgtaatcccagcactttgggaggccaaggtgggcggatcacctgagggtcgggagttcgagaccagcctgaccaatatggagaaaccctgtctctactaaaaatacaaaattagccgggcatggtggtgcatgcctgtaatcccagctactcgggaggctgaggcaggagaagcgcttgaacctgggaggcagaggttgcggtgagcccagatcgtgccattgcactccagcctgggcaatgagtgaactccgtctcaaaaaaaaaaaaaaaaaaaaaaaagaaatgtccagatggttttttaaaatatattaatgaatatgcttgggttgttggtaggtggtatattcagtagatggtaaataaatgaccaattcttcagtgagacactgactttctatacctgcatttatgtaccttgatttttaaaaatttttggataaacttgcatgtgtttggcacaaagagagcacaaagtagaggcccttcaagttctcttcagctggtacaagaagagattattttgactggtctttacggtcttcagcaaaagagattataataatcattttttttgggagctaataatattttcaattgaaggtagtttttccacatgcacatctatgctcattagcaaaggatgtagtgcacctccctgactactttaggatttccttttcagattttatggaacttgttaacctctggaatgcctaagtttaaataaaaatattgttttgagtttatattgagctatatattttatctgtataatctattatatatgtattgcatagagtttatattgagctgtatataatagccaatatttggggctctatgcttggaacattttaagaaaaatattctattttgattatatggtccaggaattaatctatttttatttttcattgcagatggagtcgggtggtacagttttgagtaccaactggtctgatgtaggtaaaaggaaagttgaaatcaatcctcctgatgatatggaatggaaaaagtactaaataaattaatttgctctcatcgtattgtgtatattcacctaatgcccattgtgtattgatattgcattcttgaattttgaacactgaatatctttttgaaagattatacttctttacctctttgtgctttagaaattattttccttcaagtgttcaagtctaatgaagaatgaagataacattttatcacttctgtccttaaaggtttcagacatggtgaaactgaataaagcatgtcatttgctcctagatagattcattctatctagttgtggggatggagaaatctttaatggtatattttcggttattgccttatttttgatacagtattctgtcagtaatttattagacctggcagctttgggtgagcttagatttttcaccttcagtgttacattgtgtttgcttttaaaaactgcttttgaatggagttgtaaatacaatttttctatgaagatgtttggtttatttacctttttcttaagtttttaatgagaactttgagaaattatcacagggaattcccatgtagttcttttaatgggaagaatttgtaaatttaattgcactgagatattttggtcgttaccttgcaagtttctgtataaaacatagatacctgagttttaacacactgcaagtttatactaaggataatctgtgaaggtagggcaaagaaggttctaggaaagcccaactccacttgcttcttttatcacgacaggattcttgaaattacagcattggtgggttttttggtattttttttctttattagaaaatctctgttgtcacgtccccatgattactttggtttcattggtttatggtaactgctgtgagagtaaattaatgtgtatatgtttagtatttactctgtgcctagaatatatagatatcatgagaatacaaaaaattaaagacatgattattaacttcaaagagcttataaatgtagcagggaaaaaaaataacattcatgaaggaactgtggaaagattgaatgctgaactcggtataaatacactttagagacaggaaaatgttctgtgattaaaattgtttacagtctaggctgttataaagtatagactatggatgacctgtagatctgactttgttttctcaccatgattttctcaactgtaataccccagatgttggtctcagctctgttaggtgtcactaacatttttatggcaaagcactactctataccctcagagcagggggagtgggaggcaaacgggtcatcatttcagcctccaaaacagtaggaattcagctccttccttctcgtcctttgttgtggggtgtaggggagttactaaggaaagtttcagtaaggtgataccagatggtgcccaaacctgttgttatagcttgtttaagcattctagagttttcacttgtccttctgtccacttagagctactagatacatttttttcttcttgaacactgaaggaaaaggcaaaattaagttttggttggatggatttctaaagttttcttcttaggaaaataggatagtgacttttgtattctgtatgttaaattttctcagtaccattaatcctaagatgaagaggaaggctattgctgcagaggcatagttgaggacgtatagcactataccagagacaagaatgcttagctctagcaagtcttctgtcattgactaccttcataatcttcagcaggtttaggcctttcttagttcctttgtaaataatccatagagtcttagagttataattaaaggtccatggttctaaatacagaagcatatttttgccgcttaactttttctttcttaaagatgacactattaaaatagctgtttctgaccaggtgcagtagctcatgcttgtaatcccagcattttgggaggcggaggtgggcagatcacctgaggtcaggagttcaagaccagcctggccaacatggtgaaaccctgtgtctactaaaaatgcaaaaattagctgggtgtagtggcatgcacctgtagtcccagctacttgggaggctcaggcagggagaattgcttgaaccgggaggcagggggtgcagtgagccaagatcatgccactgcactccagcctgggcgactccatctcaaaaaaaataaatagctgtttaaaaaaaaaaaatctggtactatctttagttggttttaaaggatatattatctagaatatgcttacccattggctagatttgctaagtgttgtgggatttgggattttgctggtctgaagggagtttgtaaaacacatgactgaaagcattataaaacataccttgtcaaatacattagattcattataggtcaagggaattttgaaaagtaggctagattgctgcctaagaatcccactctaaagtactgctttgtttaatcattctagataatggaagcttgtaagcctccagaaagttaaaacaaaaaacttctttctgattaagagcctcttaactctatccttatcctctgctatctcaatgtagctattaattgttccctctttgtttctagactccaattttcatttctcaaattttggttctcagtgctgttagtattagtagccttttgtttcttcagaatgtatgtatttttcctcttaaatgtttcctttcccttttaaggttagtcctggaatacatgtttttcttggtcttgtagacttcatctcttctgatttccataataatttgcaccttgatgaatccagaattctccca

SEQ ID NO: 1785 - DNA, 6000 bp, Homo sapiens
tcttttatacaaatgtttagacttgggttatcttttacgcagaggcaagtaatatctactcttttattggtctaggaaaatataactaggtccgtttctaccatgaaaatctaggtcagatttgtagatcttgggagtgagtttagaacagtgcttgacatatattagctgcttatctttttattcctaacttcagattccagtagaatcttaatgtgtgggtgttttttttttgcctgctgtttccatttagtgtgattaaattgtttttctcattcaggcttcaaaagcacttagaatacaatgcatgtgatacatgtctgtaagtgagattatatgtacgggatagtatgttctatatgtactctaagtcttatatacagatgcctttatctacagatgcctaattgtatagttgccaatgtgtaataagactaagggttaaggctttaaaaagattgtttttcatttaaaagggatttaaagtactgaatattaagctcagttttttcagttgtctgatggtaggatagaaagttaagttacaagaattaaatgtaacttttgcatttaattagctttttcctgtgtcacttaaaaattatttgtattaaagtgatcacatatttctttagaagccgtgatgagaggaaaaaagatgatcgttctcgcaaaagagattatgatcgaaaccctcctcgaagagattcatacagagaccggtacaatagaagacgagggcggagtcgcagttatagcaggagtcgaagtcgaagttggagtaaagagaggcttcgtgagagggacagagatagaagcaggactagaagcagaagcagaacacgaagcaggggtaaataatatattttggttatctttttatgaaaaactccatgtttaaatgtttttaaaaattgcttaacattttgtcagtgttgtcttcatttttttctattatgatgtattctgtggtccaagagaatgctttttaaaaattcctttaaaagttttattccttgcaaattaaaatcacagttaccactacacattcaacaggatagccacgatgatacagactgattctattccatgttggtgagaaagtagataagctgaaactctttggaaaacattttggcagtatgtaaaaatattaaaactacacttagcatatgggtccgctattctacttcttactgtttacctggaagaaatgaaagtgtatgtccacacaggtgtttgttcacaaaggttcatagcagacttatttgtaagagccagatctagaaacagcctaaatgtccatcaagaggtgaatgtataaacatgttgtggtatatccataccataacatggataaaaagaaaagaactattgatacatgcaacaaaatggatgaatctcagtataattatgctgagtgaaagaagcaggacaatacatatgtatgttaaaaaattttttttcttaatctttgtttttgtgacagagtattgctctgtcgcccaggctggagtgcagtggtgctgtttcagctcattgcaacctccgcctcctgagttcaagcgatgatcatgcctcagcctcccaagtagctgggattacaggcaagtgccaccatgctcggctaatttttgtatttttggtagagtcacgttgggggtttcaccaggttggccagactggtctcgaattcctgacctcaggtgatccacccgcctcagcctcccaaagtgctgggattataggcctgagccactgtgcccagactagtttttaaaaatgcaaactaatctgtgatgacagagagcaaagccagtcgttgcctgaaatggagtaaaggagggatgatagattacagattacaaaggggcatgaggattcttttggaagtgatgaatatgtacatcatttatttgtggtattggtttcagaggtgttatatcttgattaaaacttatacagtttaaatatgttcagtttattatatatcagttatacttcaaaactatttttaaaagtttaaaaagttttatttcagatatatatttttgcaagagcgtgtcattcccaacatgtataattttcttctagtacatgttattgaaagtaagatgttgtcgtaaaacacctaaaacacttttcagtaaagcaccttttctcaaactttttttgctactcttaatactatttatggcctttgtataagccctgtattctgttactcttttcttagaaattttcccctgctgtgatctaggtatacaaggcttcatggaatgttacttcacttaactaatctctttaatttcttttctgtttcctgaggaccatatgtatagtctagttaatttctttgtgcatgtttaatatgaactctttctgggtcatccgttcttatcttaatataacagccattgtagtaactttaaatggatgactacaaaatgttcatcacaggaaaaataaccatactttattgcatgttttgttttgtggtctgtaattatgcataccaagattgtgatgaagaaaatataaaattccttttttctataaacaaaactctaaggaaaaacattaaatatggcagcattacctggttttgtagtttgggttatattaaaaagaaatcgcttaccttttaacattgtatattaattgaatattttttaaaagaaaatgattattatgcaaaatttaaaattttttttctatgtttataaaaatatcactatttcttagatctgggacttttttttttttaatacagtgtagttttatatgtcatttatctttcgttgcagaaagggatctggtaaaacctaaatatgacctggatagaacagatccattagaaaataattatactccagtctcttcggtacctagtatttcatctggccactaccctgtacctactttgagcagcactattacagtaattgctcctactcatcatggaaacaacactaccgaaagttggtctgaatttcatgaagaccaagtggaccataactcttacgtaagaccacccatgccaaagaaacggtgtagagactatgatggtaagtctttcagctgtttgataaagtatttaattaatatttccagctgcctaaattctgtgtttatgttgtacatagttattcaaagacttacctctgaaaagtgggaaattagccttagtcactttttgaattcctcaatatgattgaaacatttattagttgccactaatttgattatcaatttaaaggtagtatttatttgcaagtaagtcttaataaattgtgggagtttaccaaatgagtaaatatctactgagtttttatcagggaatctgctactgaaacattattgacaaaactcatttctttagaatgagtgattattggactgtaaatagaaatgtatctagaaatgtaaatgtcacctttgtaagaattttattaaagaattaaagacttttggctgggcgcagcggctcacgcctgtaatcccagcactttaggaggttgaggtgggtggatcatgaggtcaggagatctagaccatcctggctaacatggtatgcaaccccgtctctactaaaaatacaacaaattagctgggcgtggtggctggcgcctgtagtcccagctactcgggaggctgaggcaggagaaggcgtgaaaccgggaggtggagcttgcagtaagccaagatcgcaccactgcactctagcccgggtgacagagcgagactccgtctcaaaaaaaataaaaataaaaaaataaaaagaattgaagacttttaaggatttaccgtaaaagatttataagtagtattaaagccatcattgcaattttttttagttttaagagatttaaatgaaggacatttctaaagacaaaaatatgacaaaaattatatttaagtctcatctcgttaggttattttcatttgtgtgttttttttgtttttttagtatgtatacgttagtttaacattgctctaaagtaatgcctgagcctgggaaatttataaagaaaagaggtgtctttggctcatggttctgcagactgtacaaaaagtgtagtgccagcatctgcatctggtgaaggcctcaggaagtttacaatcatggtagaaggcgaagggagagcaactaaaagggagcaagagtggggttggtggtgggggaggtgccatgctcttttaaacaaccagctcctgtgaactaatagagggcgaactcacttgttaccttgggagggcaccaagctattcatgaaggatctacccccatgaccctaacacctcctaccaggccccacctccaacatcgtttgtcacatttctctcttttgcctcttcttcttcttttttttttttttttttttttttttgagatggagtctccccctataccccaggctggagtgcaatgacacagtctctgctcagtgcaaccactgcctcccgggttctagcgattctcctgcctcagcctccctaatagctgggcttatgggcgccagccaccacgtccagctaatctttgtatttttagtagagatggggtttcaccatgttcgtcaggctggtctcgaactcctgacctcgggtgatccacctgcctcagcctcccaaagtgctgggattacaggcctgagccaccacgtccagccagattgtcacatttcaacatgagatttggagaggataaacatcctaactatatcagtatgttaaatatactatcactttacaagtatttatattactggagaagatcaggtagctcttgggaaatggttaattatacttttgtccaatattaaaaatattcatatttttaaatattttacttttgctaacttagagaaaatatatatttccagtgcttttgacatttgtttctaactattccttcctcatagaaaagggtttttgtatgagaggagacatgtgtccttttgatcatggaagtgatccagtagttgtagaagatgtgaatcttcctggtatgctgcctttcccagcacagcctcctgttgttgaaggaccacctcctcctggactccccccacctccaccaattcttacacccccacctgtgaatctcaggcccccagtaccaccgccaggtccattgccacccagtctcccacctgttacaggtaagtaaatctgtttgtttccctgtatttatctagccattcttagtctatttttaaaacttaatagattcttaaattaaaagtatctaaaggaatcccaaaaatgcctgatagaaattaatagcagtatacttccatttggaatacacctccactttgtagcctgtgccaagccagttactatggtttggagtgaccctgtgaattaagtatatcactggtaaaacccagctgcctgcaggccttcatagcttaaggcaaacctgctttggaatgtattaaaaggatattttaccctggatatctaattcagttgtaagggcttggtgtttgtagatattatagtttgataaatgagaagattatgttcggatgtgcaataacttgttttatttgtttgctttcagatgatatttcttattctttggttttgacaggaccaccacctccacttcctcctttgcagccatctggcatggatgctcctccaaactctgcaaccagttctgttcctactgtagtaacaactggcattcatcaccagcctcctcctgctccaccctctctttttactgcaggtgcagttttggccctttttatattcgtaatgtaacacagttttagatgaagaattttaaaatgtctagagagaattgctctgtgaggactacttttctcactaaaattatgtagccgtggtgaatgaacattaaataagccctcagttttgaatgttttcaaaaaaacattttctttttaataacttttttaaataaagttattttctttttgatacatatagagcatgttatatgttaatatgttatattgttta

SEQ ID NO: 1786 - DNA, 6000 bp, Homo sapiens
attggagatggtgtcagactctgtcccaggaaaaaaaaaaaaaaaaaaagaaaaaaatcaacaggaaagaataaactgagtgagtagacttatagaaaaaaaaaatggcctagatcctcactttacaccacaaacagggatgtattacagagagaataaatacttaagtgtgattctaagtagagtaatggactgcaaaagaaatagaagaaaatacagaatctctttttgatccggaaatgctgactgtttttaaacaagacttcaaaagcactattgagagtagtaagactgtattcaactagaggagagagctggaaaaacctgaggaggagttcagcacactatagagaatattcctgggattggtgcagctaaaagatgaaggcaacttatggtaataaaccataaagaaatacagatctgttagagggcatatcattctcttgcctatctaaaatattttctcctgcctctgcttccttcctatttaaaacgaagcatgtgtcttcaataaacattttttgagtttcagacactgagttaagtgcaggacgtagaaagaggaataaacttgagtccagtccttaaaagagctcacaaggccgagaaagatgagaaaactaaataaaatgttttatttttatctgtcctcacaatctcttcccagtaaatgttttaactcctgttctacaggtagggagctagacctttgtccagggtatcattgaggtactgacatttgagcaataaggaaaatcattctggcaaaaggaacagtgctaataaagtcacatggccttgaaagaacatggtgtattggaaaacgttaagcaggcaacctgatactggacattccaaaatgtacatgttactgaatagagaaagtagtccacagcagctgtttagtcttctcttagtagaattgatgattacatcagctaattgtcgcctttgaaggcagggccaaagaagatgaagcagggataaatgaaggataaatgttaatggttaaggaagagaagcattctaggaagcaaaaatgactaactgtgaagtgataataagcactgtaccataaatttagaggaggaagatactgctatcagccacagtggccaggaaaggtttcatggaagtggtacggcttcctttggtcattcaaaaaatatagttaatccttattacttacagattctgtatttgtgagtttgcctacttgctaaaatttatttgcaatgcccaaatcaatacttggaatgcttttgcagtcatctgtcgacatgaacagaggcaaaaaaatttgagtcacctgatgcacatgttcccagctttggtgaaacaaggggatgctctgccttcctgttttagctctcacactggaaacaagtgtccttttcatggtctatttaaggccacatttgttgcatttttgacctttttgtgatttcactgtttaaaatgccccccaagtgtagtgatgaggctatctgggtccctaagtgccagaaggctcttctttctttttaaagagaaaatacatacgccaggtaagcatgagttatagtgccactggctgtgagttcaatgttaatgaatcaactatattaaataaggtgccttaaaaatttttttttttcctacataaggtgcctttaaaaagaaacacacataaaacaaggtatttatgggctggttgacaaacatttaataagaggcttgaaggaacctaatcctgcatttctcctaggagcaatggttccatattcactaattcagcatttgtggcttttttacagaaccaccgtgaataaggattggctgtatatattagcagctgttcttgaagcgggggattcaaagctataatccactaaagaacagataatcacatacttgcaaaaataaagctatgagtgctataaaagaagcaatcacaggctgatgtcagaaaatctcagagggactctcgctttacagaagggaggtcaaagatggatttccaaaggcgatgctgtatgcactgcattttgacgcttaagtaggaatctatcaaatgaaaggtagagaaacacattttgcaatggctcaatttagtgagaggacacacttctgtggagacaaacgtttactccctcttgaatgctaatttgtcatgttgccttctgattaaccccagccctgtgattattactttatttactgtccttagtttaacaacaaagcaaccctgatgttatcacacaaattacaggctatgatgcatatagcattcttgcctgtctggagggttgcctttaaatgtctctatagagtacgtacaccctttccttatggcatgtaagtactggtctggggagtaaaagggcagacatctacctgtcttgctgccactgaagaccatgcttctgtctgtaagttacccccaacaaaacactctttactgaccaaactggatttgtctgctttgttcatttgatttctcctttgatgtttggggggcactttgcataaagggccttttcatggaacaacttattttaaggaactcaaaatagtttaggatggctggagcaaagactgaaaggagtttctaggcaaaaaggaaggtgtctgatttatgaaagtccctttataggatgttaaataatgtgttttattctaaagataatgtggaagttgaagattttaagcaagaaagtgacatgattagatcaaaattttagaattactgctattaaaggcaatgatgatgagggcaactgaagatgaactgagatggaggtcagcataaaaggcaaagatattaaaaggcttttgctattatttaggaagaataaaagactttaaataagacagtgacagtggtatgagagatggatgggcaaagtttgagcagtcagggaaagaagtagaagcgttctctgtggaaaataaagtgaacaaatgtttggagaaagggagggtgagcaaatcagtttatctggggtatacagtatttgatagaagctttggaaggctgaagtggagagccagagtaatggagtagctggtgataaggttgaaaatattggtggcgtcagcctgtggcaaggctacaacaaacagactaaacaaatataattttaactttcggcagtattaaatttataaacaatttttattgtaaaatacatataaaacctaccgttttcattaagtatatggtccactgcattaagtacattcatattgtgcaacccacacaacaccactcatctccagaatctaaatcatcctaaactgaaactctattatccactgaaatataactcctcatttccccttctcctgggcaccctctccacccctgctcttgctaccattccaccttctgtctctaggagttttgactactctaggtacttaatgtaagtggaatcataatatttgtcctttcatgtctggtttatttcactcagctaaatcactttaatcaacaccctggttattcagtagctggattctaatttgtattctactctatatgctgtattttaaaacaaatgtcttgctttgtagttcataatctttccacctaatccttaaagacacttcactctagcaaattataaactcaagagttcctaagaacaatttagcctatcggtgtctctcataaagagcttttattgatctacttactgaaaatgtctttagattgtgaatattttcattccattacagttcatggaacgtagaccctttgtaaaattccacctagtatctaaatagaactcaagcaggaatcaaacttatttgatcacccaggaaaatagtttatttatttgggttgctaatatgaagactctctcttttgatactatataatttcccgatctgagatagggctgaatttgctctaaataaagagaattttaaaaataacaaaacttatctttagctgggggaaagtgcaggctggaaactacctgagagacgtgaaggttctctcacctttcccttgtgggcagccctcagtcattagggctctaccagcaagtcaagtactgttggacaagacactaatcctctggcggtctcattgggctccattagaccagcctgtgtttacaaacctcgttcacatcacagcatacacagaatatgatactggtagggcacttaggtaaactgaggaggtagtgtgctcggcacctggaacctacgggccgcctggtgtcgcgcacgcgggagtgtacgctctcaaagagcgatccatccggcaggaccgttccagctgacaggccacggccgtcttaccggggacgagctggggttcccgctgtttctgaagtcagcggtcttttcctccttgtaagaaataaggtctttatatcataaaggtaagcaaagaataaaaaggcacaaaggccgcaagcaacgcacacacgcaaaaatcgaactacagcactcgacccgcgcattctccgccgaccttacgtctctcccagcaggctccgggagccaccgcgagacttcatcaattctcgcgagatttaccggcagccatcttcttgggggtgctgggagccgggaagaccccctgaatcgttcccattgagctgcccttcgccttcgctttctttacttttgccttttcgacgtagccaacaagcacctggtcccgaggctgagagaaggctcgggtctaagcgcgtgtcgcgcttccggtctgggtagatttgctggggaagagggaagggggagggcccgggcaaaccgttgctgtttcagcccgggctgggggccggggacggggagctcctggcaccccgtgcacttgtggcctgcggcggtccttgcagagctgttcgccgaccggggcccgcgggaacctgccaccggcgcctcccaccgcggcccacgcgggcggcgcgcggaggagggggcgggggcagcggcggctgtagcggccgcgacctgggcgggcggaggagtgtgacgggccttagggccgctgtggatggtttctaaaatgatcattgaaaacttcgaggcactcaagtcctggctcagcaagactctcgagcccatgtgagtatccgggggatatctctttgcagggatggcagtgggagataggcggacccagagatctgtgcagtttccccaagtgcctgcggtggaggccgaagcggtgaacggaggtcccagggttctgtggcttctcctcctcgtccacctcgcttccagattcaggatacccccgagagcctgagtcgagctttattttattgctgagctgctctcgttttcccgttatatatagaccgtctccaacccccacccgcaatattttccgggggcctcaaaatcggtttattttagtgaaaccgactgtattttacttcctacagattattttaccttgtttttctaaatgaagtagacggcctttattggggattcgggcagttctagcttaaatcactcacgtttcacctaaatataattcctgaaagcaaggccacgtctcccatgtgctgtctggctcatctgcacctctcttcactgattgaagatgtaacaggtgctgaggtggccagtaaaattcccctttcccgcctacgcgttcgttagcttggagaggaggaagaaaattgaatcttcatccatatggaatatttagcagttttaagtgggatgctatagatagattttgtgttgggggctgcggttagagtgctgaaatagtcttagattggaaaatttaaggagtgttttgacgacttgttaatacaaaatatgacatggaccaaagtgcttaatcagaattggttgatttacaataatgcaatggggaaaattcacgtatttaataaagttattaggtacctactgtatactacgggaggctttggggatagagcttttaaattctaaaatcgacaagacataaataaatccagatattaatagagttgtgactattgtaataatagagaatcatgtaaaagt

SEQ ID NO: 1787 - DNA, 6000 bp, Homo sapiens
aaaaagtatatgcagtaacagaaaacactaggatgctgcattctgtagtagtaaattaagaatatgcacacagctctagagtcaaaaagccttagtttaaatcactgtgggcaaataacttcatgcttcagtgcctcagtatcatcacctgcaaaatggagagataacaatgcttacctcataaaacttgtaagtacaataatacaaaatgtttaacaacaatgcatacagtttaggtggtagtcacagcaggagtgttggtgataattctaacagtagcaacagtagtaatgtagcctatctgtgtttaatcaaccaatatctaagaaaggaggggaagggcaaggctcacaaacatgtgtcccattcaaccctttcaactatagatggaaatactgtaattcttcctattataccaataaggaaagaggaggtttctttgcctagacagctaataaatggcagaagtgagatttgaatactgatctggacacagagatcttccttccaccacacacttcctccacagcactacacagtggcagaagcacaacactaggcattttgttctttactactcaactcacaaaacctcagtacgtcattacatccacctgcccctcaattttattttctaaaaaattaaagtttcattagatgtttaggtgtctcttcaggaaaaaaaaaaaaacatgactttgatgtgtaagtccacctaaaagttttaaatacagtagaaagtgttttctgttttttttgtttgtttaaaagtttactacaacaaaggagcttaatttttttttcaggacttctcatcatcaaaacgaaatgttagaaaaaagactaacatttagtttcatattattggcaagtatgactaagcaaatctttgagataacaaaacatcaatcttaagcatttcaagatgacaattttaataaagttcaaaattctcaatttatgaaaaagacattgaaaattattttcaataatttatgaaactcagaaccctgatacatgtacagaagttatgaaacagtaaatacagatatgcagacttctatttcacgctgaaaacacagccaggcttttttttttttttttaaacatccatctgaaaaccctcttgccctaaaacccttcactggcttcccactatccttcaataacatccaaagtcttaaacatgactcaacaaagtcctgtgtgatctggctcctatctctggagctttccactgccattcttctcctttgcttttttctatttctttcaattcctccaacatatcttttttgtccatttttaggacctccatacaatctgttcaccaaacctataacgctttcacaggtctccaatcccatccttttgccccagcaaagtattcttcatccttccaagctgagataaacattacaccagggaagtgtttcctgatgttcccagacttcaacacctatctttcctgctaaatggtaaataaaatgaagtgagtcatttcatgtcttgttacctactatatcttgcacactgcttagcacagagtaggttaagtactcttaaaataaatgtttgctgaattaacacattcaaaatgtggagtaagtccaaaaccatgaagtatttaaccaccacaggtaactaaaaagttttatgtaagtttcaagttacagcttacccttggtcctctgtatgttcctctctcaaacagaggtcgtttggtaattacaatgttaaagcaaaaaaaaaaaaaaattccttttagataacagatcataacatttcacaaaaccaacgttagaaaccactgatccataattgggatcagcttttataagtcatcatacaaaagaatccacctgaaatgcaattaaaaggacaagaacttgaataagggctcaattttaccacagctacacacattagaaaaggaccaattacaattcccagtgtctaggctctactagcagagccttatttattacaacataatgactgcagtgctacagccatcgagagtaggctttatgatacatggaatatgtttcattaagactaaagaaaaattacaagcatacactctaagtagctacagtcttctcatttaggtaagatggagggatacggcagtaaatctaatatgaaactgaacgcttaaaggaaagctatttcaatccaaaacatttataagttttgtattcacctaataactactgaatgctaattacacaccagacagtagtctaagatttccttaatatacacccattattttcccaattttacagttgaggaaatggaagccctgagttaagtaacttacccaatatcatacagctggtaagtggcagaggcagaattcaaagccagacattctgctccagagttctcctcaccgctatactatgatgcccactctccaatacaccgaaataggacttccatctgcacaactctactccagtgaaactattttgctaaggttaccaatgacttccactttgctaaatctaagggctacctatttgcctccattttttcatgcattctgcagcatttcataaactcctctcttttgccatacacttgttttttaatgacataaagcccagttttcctcctgcctcagtactaggccctcttctcttccctacctacacactttttctatgaaatttcccacaatgtcatcgtcttaaatactatctgcatgactccagatttctccagtcctgtcctgagttttagactcatatattcaatgatctgctatcacacttagctgtatcccacagacttcatacttactgtatttattattatcaaaactagccatccactttccttctccccttaacctgttctctgccttctctaatatcacccattctgttgcttgggttatctaaggcaccacccttgatttccctttccctcatctcccgcatttaatccattaattttacttatgaaatgtatttggatctgcctgtctccaccatcactctaatgcaaactagccacatctctgcctacaacacacttctgaataatcttcttacttccattcttgccctttcagtctctacaaaataggcagagttaaaacaaaattaaatcagtccttgtctgctttaaatcatctcacgtcttcccatacatgatgtggcccctacctacttgtccaacttgttgcctttatatcctctccctcatcacaaggctctttccagccacagtggcctttctcttcctgaaacacaccacaatcacttctgctacagggcctttcatttgctcttccttttgcaaggaatgttcttttccaagactttgacacacatggtcccttctctttagatgttactccaatgtcaccttctctgagagtccttccttgaccaatgtgaaatagcccccctcataatcacttttacatgattctctattattacaatagtcacaactctattaatatctggatttatttatgtcttgtcgattttagaatttaaaagctctatccccaaagcctcccgtagtatacagtaggtacctaataactttattaaatacgtgaattttccccattgcattattgtaaatcaaccaattctgattaagcactttggtccatgtcatattttgtattaacaagtcgtcaaaacactccttaaattttccaatctaagactatttcagcactctaaccgcagcccccaacacaaaatctatctatagcatcccacttaaaactgctaaatattccatatggatgaagattcaattttcttcctcctctccaagctaacgaacgcgtaggcgggaaaggggaattttactggccacctcagcacctgttacatcttcaatcagtgaagagaggtgcagatgagccagacagcacatgggagacgtggccttgctttcaggaattatatttaggtgaaacgtgagtgatttaagctagaactgcccgaatccccaataaaggccgtctacttcatttagaaaaacaaggtaaaataatctgtaggaagtaaaatacagtcggtttcactaaaataaaccgattttgaggcccccggaaaatattgcgggtgggggttggagacggtctatatataacgggaaaacgagagcagctcagcaataaaataaagctcgactcaggctctcgggggtatcctgaatctggaagcgaggtggacgaggaggagaagccacagaaccctgggacctccgttcaccgcttcggcctccaccgcaggcacttggggaaactgcacagatctctgggtccgcctatctcccactgccatccctgcaaagagatatcccccggatactcacatgggctcgagagtcttgctgagccaggacttgagtgcctcgaagttttcaatgatcattttagaaaccatccacagcggccctaaggcccgtcacactcctccgcccgcccaggtcgcggccgctacagccgccgctgcccccgccccctcctccgcgcgccgcccgcgtgggccgcggtgggaggcgccggtggcaggttcccgcgggccccggtcggcgaacagctctgcaaggaccgccgcaggccacaagtgcacggggtgccaggagctccccgtccccggcccccagcccgggctgaaacagcaacggtttgcccgggccctcccccttccctcttccccagcaaatctacccagaccggaagcgcgacacgcgcttagacccgagccttctctcagcctcgggaccaggtgcttgttggctacgtcgaaaaggcaaaagtaaagaaagcgaaggcgaagggcagctcaatgggaacgattcagggggtcttcccggctcccagcacccccaagaagatggctgccggtaaatctcgcgagaattgatgaagtctcgcggtggctcccggagcctgctgggagagacgtaaggtcggcggagaatgcgcgggtcgagtgctgtagttcgatttttgcgtgtgtgcgttgcttgcggcctttgtgcctttttattctttgcttacctttatgatataaagaccttatttcttacaaggaggaaaagaccgctgacttcagaaacagcgggaaccccagctcgtccccggtaagacggccgtggcctgtcagctggaacggtcctgccggatggatcgctctttgagagcgtacactcccgcgtgcgcgacaccaggcggcccgtaggttccaggtgccgagcacactacctcctcagtttacctaagtgccctaccagtatcatattctgtgtatgctgtgatgtgaacgaggtttgtaaacacaggctggtctaatggagcccaatgagaccgccagaggattagtgtcttgtccaacagtacttgacttgctggtagagccctaatgactgagggctgcccacaagggaaaggtgagagaaccttcacgtctctcaggtagtttccagcctgcactttcccccagctaaagataagttttgttatttttaaaattctctttatttagagcaaattcagccctatctcagatcgggaaattatatagtatcaaaagagagagtcttcatattagcaacccaaataaataaactattttcctgggtgatcaaataagtttgattcctgcttgagttctatttagatactaggtggaattttacaaagggtctacgttccatgaactgtaatggaatgaaaatattcacaatctaaagacattttcagtaagtagatcaataaaagctctttatgagagacaccgataggctaaattgttcttaggaactcttgagtttataatttgctagagtgaagtgtctttaaggattaggtggaaagattatgaactacaaagcaagacatttgttttaaaatacagcatatagagtagaatacaaattagaatccagctactgaataaccagggtgttgattaaagtgatttagctgagtgaaataaaccagacatgaaagga

SEQ ID NO: 1788 - DNA, 6000 bp, Homo sapiens
tgtagtttgtgcaaacttacgtggcagaagttactattacagcgtaattaacctgcttacacaggctgtgagttcctcgatgacagagacctcgtcctattcaactctacattttctgtacgcagcagtgcctgatgcatagtgggcctctattaacgattatttaattgagcagctgatgtcttaggtaggatatcatgacattaacactaaatcggcaatcaagaaatcttacacagtaaaataaaatttgatattttagtcaaagacgagtgatttccctaagcatgcatacaaataagtattgatccacgaaccccctcccgtcaaaagagatcagtgaaaaatccaatatcaacacacaaagccaatatactcatctctttctatccagttactatcacatagtaaacataaataagagttgttaaatggggacggacttttttttggtttcgataccttgggtagtaatactagtaattcattttacttaaatgttgactaaaatctacagcaaaattgacttcgattgtatggggtgcttttttgatgtttcctgaataaccccagaacttcctgtcatgatattcacaggtctaaacctgttactgtcgtgattagatcggggctctccctctctccaacctagtagctggaattattctattttacttttcatgtctgtgtgggagggtgggggagcggagggttggattttagggatcttaggtttgtacacattactggaaatacaattgacatagaacactaagatacgttttaggttccaattacaaaacgacacccggcgagcctctggcaatgcgcgcaccttagtttccaaaacaggtatttggcttcagtttgcttcccctggtgagtggtgagcggagtcggggcggccggcagggctgcaccccgggctggtcctccacaacccccggcgctcggcccccgcacgacccccaggggaagccgcactagccccggggctccccccacagcctcccgggagggtttcgcgcccgcctggaggagccggcggctccccgcgaccctcctagaaggagcggaccggcgctcgggccccgcgggctcggggtccccgagccgcacttactcagactcgcggacaggctgcgcagtcggccgcgggcacgaaaccgggcgccgcgcagcagcgtacccccgcgtcgcttccgtcgctcctcatcatcctcctccagcccaggggccgctgccggcgccacggtctagcccggagctcctgctgcgagctgtggccccacttccggcccccgctcgggtgtcgccggcaaatgcccccgccggctcccacataacctgttctccgtctccgctcccggagtgggaaccctgcccgctcttccgagcatgcgcagaagccgctgccagtgagcccccgcgacggtggcccggacggaaaagatacctcggcggcgtgggcccggctccctgctccaggacctagggatcttggccttccaccctcctccgagcaccaggactccctccagttccgtacccgaggcctccgtggtgaagaggtgccggacccgatgagctcgggagtccaccatcgctctgcaagccgcaggtttgcggagcaatttgttctgcctgatagggttgttaagggtgtcgcaatgaggtccacgatttaaagcgcttccataactatttttctccttttacctctacgagagtggactgtcaagggcgaatgcaggttttgtgaggcctgaaccttgtgccatttggagagcccttttaaagaaaaataatgtaaaattgtcttatttttgcaaattttaccgaggtacacgaccatgggaacacctcgttagggcccctctcaaggccttggaagtgttcgcaaaaatgggcccttaaaacttgggcttcattagcttcgctgtcaacccccctgtgcactgaagtgtacacacttgtttacagatgtgtgcctcccctcccttgggctttccttattctatgtcccctattttatatatacagaggatatttcataaatctgtgggtttttttttttttccttttgagatggagcctcgctcttgtcgcccaggctggagtgcaatggcgtgatctcggctcactgcaacctccgcctccctggttcaagcgattctctcgcctcagcctctgacctagctgggattacaggtgcccgccaccacgccccgctactttttgtttttgttttgttgctgttttgagacggagtttcgctcttgtttcccaggctggagtgcaatggcaagatctcggctcaccgcaacctcccgcctcccgggttcaagcgattctcctgcctcagcctccggagtagctgggattacaggcatgcgccaccacgcccagctaattttgtatttttcttcagtagagacgggatttcaccatgttggccaggctgctctcaaactccccacctctggtgatccacccacctcggcctcccaaagtgctgggattacaggcgtgagccaccaggcccggcctaatttttgtattttttagtagagacgggggttcaccatgttggccaggctggtgtcaaactcctgacctcaagtgatccgctcacctcagcctcttaaagtgctgggattacaggcattagccactggcccggcctgtggtgttgttgttattgaacatatgtgtcttgctaccagatggagagctccaggtcaaagctgggttcttgaatcatagcttcctaatcttgatcacggaataagtgccaagcatatataaagtagaccatttacataaataaattaataatcatggcaactctagaagatacttagtgaaaaaaacccttgattgtctttgaaccaatcaactaaaataacatgatgaaatggagactgggctttgaatcaatttggagtttgcctggtttcataattcatggttcttctcatgtaactaatacaaagtccagcttctgacattgtaggagctcagtagaggttgaacaagctacaaatgtacacggataggtaccctctcctaagatgggcaagtggaggctcctctaccttaacactattcatttttcctccaaaataaattgataactaaattgaagagcagatactcacaaaacaatatcatgagactttacaacatcacagatgattttagatattcaggcatattaggtcaattagacatacgaagtaaataactgaatgttcttgggctagacggaacctccgctacaaactagcactgaatgaaatgtgtcagttttgaaaaaggaggtttttatacattacacaacctctaagggcacttaacagctctaatatgttttatcagggcccactgcagcaaaatttattttattgtaaagcaatattttatgctaaaataaaatagttctaaaagttgtttccacccctctttatgaataacttctcacttctccatggcgaaagaggactgaccacagcaaaaattcggtggaaaccaacagctcctggaacacaaaaactggggttgtttataatctctccaccctgaatatctagcaccattactatataataataggtgctcaataaaggtttgttaaataactttatttttaaaccttaaacagatactagaagagtccatagttgatttctggtcatgcaacggtttatttctatattgtaagttatgtattgttatgtattatttctgtattaagagaactgagaccacagtagcaaacatcatttaaaaaaaaaaacagctctatatagtttgcaaaagcctattttttaaaagtttaaatgaaacaaccaacgttttgagttgggaggatgtcctgttctctcttgggagttttcacaaccagcgaaatcagtatagttaccactgttttacgtacagagaacaagaattagaggctatcactagccagagcacaaagtgatcttaggtctccctcgagacaaaatccactggcgtgtggatcaactgcttgcagagagcatctgctgccgaggccaataggagccgtgtgtactcaagaccctaaccaggatcctgcaggtcccgcctccgcagccccacggggctgccggcccccccacctcccatcgcgagcctggctgcgccggcgtgcttgagcccggtgactgcaaggccccgggtctcccctgcgcctgcgcggcgagcagctggcggaaccggcatcttctggcgccagcttccggcttagcggctgagcttcaggcttgacgtcaggtgggaagggtgtggggtggcaggtgggggcggttgggaggttggggggggttggggtggggggggtggggggtggcagattgacggtgtggggggagtcaagtggaaggtgtggtccagcaggcggcgagaagtctgtggggcaacagaccgggggaaggtctgtggggcgtcaggcggggtatctgtgggacgtcaggttggggtctgtagggcgtcacgttgggggtctgtggggcgtcagaggggggaatctgtggggcggcaggtggggggtgttcggggcggggtttggggtgtgtgtggcggcaggaggcgggggaggtctgtggggcgtcaggttagggtctgtgaggtgtcaggcggggtttacgtggggtggcaggtgtggggtgtgtggagagtcaagtggggggtgtggggcgtcagattgggggtctgggggatcagatgggtggtgtctgggacgtcaggcgggggtcggggggtcgtcaggcgggggatgtgtggggagtcaagtaggggaagtggggcgtcagattgggggtctgggggatccggtcgtgggggtgtctgggacgtcaggcggggggcctgaggggcgtcaggtgggggggtctgggaggcgtcaggcgggggtcggtctatgggggcagcaagcagggtgtttgtgcagcggcaggtgatgggagttgccgagtccacagcgctgtagactgcgccgcattagaagcctggcctcctgatgctgtgctcttcatctagacccaagccccaggtcgtgggacgatttctcccgtttttgactccctggaactgtattgcctgctttacctgcgtacatgttgattctttctcatggcaaccccgcaggaaaccatcaagatctcattttacagctgggattctctggttcacagaggtaacggagcttgcccgaggccaggtattcactgggaatccgtgaagggttgggggagagtagggggaacgggcagaggaatgatgtagactccttagggattttccattttccgagagggtacagggggcattggagcgggagagactttaggcttggagggaattactttatttctcttcttacacttggtctttcattaacttttgggatcccaaagcccttctagcgtctttgtctgctcatttctttttgctgagattgtcccaaattgtcactaagtgctgtggaagataggcagctgtaaaccctttgtttcctagggaaacacagcttgtcaagggttgcatgaaggatacttcagttgcattcgtcacttactcctttttttcctctctcttttttaagtgcaatagcatagcacttaatcaccttccatagtcactgaataaaacctgccggtttattttcatgtgtcacttcaggacaatttagtcagaactgaatgaatgatgaatcgttattgtgtactaattgcttgcattcattctcctgaaagctttgcttattgttaaagagtgaagcttcttcccacctttttatctcgttaatattttgcaatatttatattttaaatgttgcttggatcagcaagcattatagtattaaaattatcaagacttactactttttaaagcacattttgtagattatctgatttttatcttcattctaatttctacatagtttttaaccccattttatactttaggaaactg

SEQ ID NO: 1789 - DNA, 6000 bp, Homo sapiens
ctggggcaactaaacaaggattagaaagatttcagaatctgggtaatacattaaacagagaaacagaaatagattcccctgagataagttatgagaagagatcatgggaaaatgttagatccaacagtttcctgcacctatcactaagttatattgttagcccagggcaatttggttagtaaaccctcttatccacatgccaagaggtctttgatgtgcccaagaagagggcagtgtgccaagggctacctgtaggtacctggcttgctttaatcattccaagttaactgtcagtgggaggcagtgtggtgcaatggaaaggagacagtgttttgagtcatggtctgttaagagataggtagcttttgccaactcacttagcctctctaaatatatatttcctcgtatgtaaaaggaggatgaaagattaaattgaactactgttgagataaaatgtaatagtgtgttaagtgcagctacttctatgagacaaaatttaaattacttaattatgtactatagcagagtatgtgaaagtaaggacaactagaagccctattagtcctagatcaaataatggatatgattccctagaggtaccgtatctgaacacaggaagtaatcagagcaatgcactctttctctgttaaaaccaaactcaggtagtagatcctctagaaagctttccttggacccctattccctcctgccacccattccacattctgtagtttgtgcaaacttacgtggcagaagttactattacagcgtaattaacctgcttacacaggctgtgagttcctcgatgacagagacctcgtcctattcaactctacattttctgtacgcagcagtgcctgatgcatagtgggcctctattaacgattatttaattgagcagctgatgtcttaggtaggatatcatgacattaacactaaatcggcaatcaagaaatcttacacagtaaaataaaatttgatattttagtcaaagacgagtgatttccctaagcatgcatacaaataagtattgatccacgaaccccctcccgtcaaaagagatcagtgaaaaatccaatatcaacacacaaagccaatatactcatctctttctatccagttactatcacatagtaaacataaataagagttgttaaatggggacggacttttttttggtttcgataccttgggtagtaatactagtaattcattttacttaaatgttgactaaaatctacagcaaaattgacttcgattgtatggggtgcttttttgatgtttcctgaataaccccagaacttcctgtcatgatattcacaggtctaaacctgttactgtcgtgattagatcggggctctccctctctccaacctagtagctggaattattctattttacttttcatgtctgtgtgggagggtgggggagcggagggttggattttagggatcttaggtttgtacacattactggaaatacaattgacatagaacactaagatacgttttaggttccaattacaaaacgacacccggcgagcctctggcaatgcgcgcaccttagtttccaaaacaggtatttggcttcagtttgcttcccctggtgagtggtgagcggagtcggggcggccggcagggctgcaccccgggctggtcctccacaacccccggcgctcggcccccgcacgacccccaggggaagccgcactagccccggggctccccccacagcctcccgggagggtttcgcgcccgcctggaggagccggcggctccccgcgaccctcctagaaggagcggaccggcgctcgggccccgcgggctcggggtccccgagccgcacttactcagactcgcggacaggctgcgcagtcggccgcgggcacgaaaccgggcgccgcgcagcagcgtacccccgcgtcgcttccgtcgctcctcatcatcctcctccagcccaggggccgctgccggcgccacggtctagcccggagctcctgctgcgagctgtggccccacttccggcccccgctcgggtgtcgccggcaaatgcccccgccggctcccacataacctgttctccgtctccgctcccggagtgggaaccctgcccgctcttccgagcatgcgcagaagccgctgccagtgagcccccgcgacggtggcccggacggaaaagatacctcggcggcgtgggcccggctccctgctccaggacctagggatcttggccttccaccctcctccgagcaccaggactccctccagttccgtacccgaggcctccgtggtgaagaggtgccggacccgatgagctcgggagtccaccatcgctctgcaagccgcaggtttgcggagcaatttgttctgcctgatagggttgttaagggtgtcgcaatgaggtccacgatttaaagcgcttccataactatttttctccttttacctctacgagagtggactgtcaagggcgaatgcaggttttgtgaggcctgaaccttgtgccatttggagagcccttttaaagaaaaataatgtaaaattgtcttatttttgcaaattttaccgaggtacacgaccatgggaacacctcgttagggcccctctcaaggccttggaagtgttcgcaaaaatgggcccttaaaacttgggcttcattagcttcgctgtcaacccccctgtgcactgaagtgtacacacttgtttacagatgtgtgcctcccctcccttgggctttccttattctatgtcccctattttatatatacagaggatatttcataaatctgtgggtttttttttttttccttttgagatggagcctcgctcttgtcgcccaggctggagtgcaatggcgtgatctcggctcactgcaacctccgcctccctggttcaagcgattctctcgcctcagcctctgacctagctgggattacaggtgcccgccaccacgccccgctactttttgtttttgttttgttgctgttttgagacggagtttcgctcttgtttcccaggctggagtgcaatggcaagatctcggctcaccgcaacctcccgcctcccgggttcaagcgattctcctgcctcagcctccggagtagctgggattacaggcatgcgccaccacgcccagctaattttgtatttttcttcagtagagacgggatttcaccatgttggccaggctgctctcaaactccccacctctggtgatccacccacctcggcctcccaaagtgctgggattacaggcgtgagccaccaggcccggcctaatttttgtattttttagtagagacgggggttcaccatgttggccaggctggtgtcaaactcctgacctcaagtgatccgctcacctcagcctcttaaagtgctgggattacaggcattagccactggcccggcctgtggtgttgttgttattgaacatatgtgtcttgctaccagatggagagctccaggtcaaagctgggttcttgaatcatagcttcctaatcttgatcacggaataagtgccaagcatatataaagtagaccatttacataaataaattaataatcatggcaactctagaagatacttagtgaaaaaaacccttgattgtctttgaaccaatcaactaaaataacatgatgaaatggagactgggctttgaatcaatttggagtttgcctggtttcataattcatggttcttctcatgtaactaatacaaagtccagcttctgacattgtaggagctcagtagaggttgaacaagctacaaatgtacacggataggtaccctctcctaagatgggcaagtggaggctcctctaccttaacactattcatttttcctccaaaataaattgataactaaattgaagagcagatactcacaaaacaatatcatgagactttacaacatcacagatgattttagatattcaggcatattaggtcaattagacatacgaagtaaataactgaatgttcttgggctagacggaacctccgctacaaactagcactgaatgaaatgtgtcagttttgaaaaaggaggtttttatacattacacaacctctaagggcacttaacagctctaatatgttttatcagggcccactgcagcaaaatttattttattgtaaagcaatattttatgctaaaataaaatagttctaaaagttgtttccacccctctttatgaataacttctcacttctccatggcgaaagaggactgaccacagcaaaaattcggtggaaaccaacagctcctggaacacaaaaactggggttgtttataatctctccaccctgaatatctagcaccattactatataataataggtgctcaataaaggtttgttaaataactttatttttaaaccttaaacagatactagaagagtccatagttgatttctggtcatgcaacggtttatttctatattgtaagttatgtattgttatgtattatttctgtattaagagaactgagaccacagtagcaaacatcatttaaaaaaaaaaacagctctatatagtttgcaaaagcctattttttaaaagtttaaatgaaacaaccaacgttttgagttgggaggatgtcctgttctctcttgggagttttcacaaccagcgaaatcagtatagttaccactgttttacgtacagagaacaagaattagaggctatcactagccagagcacaaagtgatcttaggtctccctcgagacaaaatccactggcgtgtggatcaactgcttgcagagagcatctgctgccgaggccaataggagccgtgtgtactcaagaccctaaccaggatcctgcaggtcccgcctccgcagccccacggggctgccggcccccccacctcccatcgcgagcctggctgcgccggcgtgcttgagcccggtgactgcaaggccccgggtctcccctgcgcctgcgcggcgagcagctggcggaaccggcatcttctggcgccagcttccggcttagcggctgagcttcaggcttgacgtcaggtgggaagggtgtggggtggcaggtgggggcggttgggaggttggggggggttggggtggggggggtggggggtggcagattgacggtgtggggggagtcaagtggaaggtgtggtccagcaggcggcgagaagtctgtggggcaacagaccgggggaaggtctgtggggcgtcaggcggggtatctgtgggacgtcaggttggggtctgtagggcgtcacgttgggggtctgtggggcgtcagaggggggaatctgtggggcggcaggtggggggtgttcggggcggggtttggggtgtgtgtggcggcaggaggcgggggaggtctgtggggcgtcaggttagggtctgtgaggtgtcaggcggggtttacgtggggtggcaggtgtggggtgtgtggagagtcaagtggggggtgtggggcgtcagattgggggtctgggggatcagatgggtggtgtctgggacgtcaggcgggggtcggggggtcgtcaggcgggggatgtgtggggagtcaagtaggggaagtggggcgtcagattgggggtctgggggatccggtcgtgggggtgtctgggacgtcaggcggggggcctgaggggcgtcaggtgggggggtctgggaggcgtcaggcgggggtcggtctatgggggcagcaagcagggtgtttgtgcagcggcaggtgatgggagttgccgagtccacagcgctgtagactgcgccgcattagaagcctggcctcctgatgctgtgctcttcatctagacccaagccccaggtcgtgggacgatttctcccgtttttgactccctggaactgtattgcctgctttacctgcgtacatgttgattctttctcatggcaaccccgcaggaaaccatcaagatctcattttacagctgggattctctggttcacagaggtaacggagcttgcccgaggccaggtattcactgggaatccgtgaagggttgg

SEQ ID NO: 1790 - DNA, 6000 bp, Homo sapiens
agatatttactagaaaatgaatgaggttgccaatagctcctagacacttaagggacctttttgatggcactgtggtaatctattaatattaaacatgtcaccatttggaaaaatctgcataactccataaaccaatatattccaaatgaccaatgaatggtgtcacaaaatcaagcaaacgtgagtaaaaaattcactacaaaccaacagattttgatgtaacaagagacaacaatttctctgatgtaggtttcagatggcacaatataactgacctttaaggaagtgcctcctgttgggtgatggagtcgtaccaacgagtacccacaattctctactacaatactcttccctttacaactacaaatttgtgtgagcctgactttcttcatgtttcactttaagagcctaataatctgcctgtcttctatgaggcagacattaaagataattacaaaaatataatcccacacctctattttttgtaattacaattgttttatataaaattttatttatgtgagtatgtaatgaacttactactgctatttttaaatgaattaaaacttccagttttccaattttaatttatacactttataaacttccagttttccaattttaatttatacactttataaacttccagttttaatttctaacacaataaatatctatataatccacatacatacaaaaaaatctttgggatctttacatttctaaaatgtaaacggtctgagaccaaaaagcttgagaaccacggttccatactatttaaccatataactgtattgccttatgccccagagacttgccttcttcaaattaagaaagatatattacatttttttaaatcctttctgcattataacatatataaatatatttaaggtttttacccagtaatattttctccaaaaactaaaaataaataaaaacttatatatatcaagaactgaaactcaaaagtataggagtaaatacattgtaattattgccgtaaggttagtaggagaataaattagacaaatctattgtatcatagataacattttacaataaaaattgtattttaatgaaggtcagaactgccctacaaattaaattctagttattctaattatttttaattaaaaagtgtacattgggccaggcatggtggctcatgcgtgtaatcctagcgctttaggaagccaagacaggtggattgcctgagctcaggagtttgagactagtccgggcaacatggtaaaacaccgtctctactaaaaattacaaaaaattagccgggcatggtggcgcgtgcctgtaatcccagctactagggagactgaggcatgagaatcacttgaacccaggagtcgaggttgcagggagctgagatcgtgccactgcactccaacctgggtgacacagtgagactatgtctcaaaaaaaaaaaaaagtgtacattgttttgcatattgtatatcgagttacggattctgccaccagcaaatggtcttttaaaaatacaaaaaagtgcattacccatagtgaattacaatgaatttccgaaaaacaatttggcaaaaggctaaacaatttcaaatacaattaaaaagtcctaagtcataaaggcactattatttctttaaagatctttaagtccatcctagattgataattttgggaacagcttgtttaaaaataaaaactgttcatacatttaaaaaaaatgtgcaggttcaagtgaagactgtaaaaagtggaaagggagttcgtgtgtcaatgccgacatccacatcccagcagagaatgaggaccccacaccccatgggctcattaattactctgggtgaatcacagcttccaatcacatgtgaagtaatgtggaactcagattcagtattcttatatcaatctctctcctcttctgttaagcattgggaagttaagaaaccatgccagctgcacagctgaaatggaaacacaaatagctgctatcaaggtgttggagacaccacagaatgaattatctatttccctaatggttacccacatgccatcaataatgaaaaagtgtgtattaatagtcctatgggacaaatgaacagtaactgcctatggagatgctggataataactggatggttcagacagcatctttaactaggatttaaatctgtatgagcagatagctcaaaaattataccaggcagctacttagtagctttttcatgcttgaaaatcttggcaaatagagtcaactctggcagaagtaaaatgagagattattgttactatggaagccaaccacaatttgttctgagattataaatatctgaaatgtttaaaacaaatccactagcctaaaactgtagtgatgttagactgataatgaaattcacaaagtttccaatttataaatgggcaatgttctaaaactttacctataaactagatggatgaaacttagaatatttgttttgtataaaaccagtgttatataacattgagtatgtgaaagtaagtacaactagaagccttactagaagtatctagattctcaggctagctcataaatgcatgtagtccctgtactggaaatactacatctttgcaagggatttcagcagaatatactgttgtaggagttcacaccatgtgaaacagaaacataaaatataataatgtattacaaaatctgtcatttgaggaaaaatatcttacttagaagaactagagcatcttttaagtccacacgaaaaaaggctatttaaaggtcttaagactttcctggggcaactaaacaaggattagaaagatttcagaatctgggtaatacattaaacagagaaacagaaatagattcccctgagataagttatgagaagagatcatgggaaaatgttagatccaacagtttcctgcacctatcactaagttatattgttagcccagggcaatttggttagtaaaccctcttatccacatgccaagaggtctttgatgtgcccaagaagagggcagtgtgccaagggctacctgtaggtacctggcttgctttaatcattccaagttaactgtcagtgggaggcagtgtggtgcaatggaaaggagacagtgttttgagtcatggtctgttaagagataggtagcttttgccaactcacttagcctctctaaatatatatttcctcgtatgtaaaaggaggatgaaagattaaattgaactactgttgagataaaatgtaatagtgtgttaagtgcagctacttctatgagacaaaatttaaattacttaattatgtactatagcagagtatgtgaaagtaaggacaactagaagccctattagtcctagatcaaataatggatatgattccctagaggtaccgtatctgaacacaggaagtaatcagagcaatgcactctttctctgttaaaaccaaactcaggtagtagatcctctagaaagctttccttggacccctattccctcctgccacccattccacattctgtagtttgtgcaaacttacgtggcagaagttactattacagcgtaattaacctgcttacacaggctgtgagttcctcgatgacagagacctcgtcctattcaactctacattttctgtacgcagcagtgcctgatgcatagtgggcctctattaacgattatttaattgagcagctgatgtcttaggtaggatatcatgacattaacactaaatcggcaatcaagaaatcttacacagtaaaataaaatttgatattttagtcaaagacgagtgatttccctaagcatgcatacaaataagtattgatccacgaaccccctcccgtcaaaagagatcagtgaaaaatccaatatcaacacacaaagccaatatactcatctctttctatccagttactatcacatagtaaacataaataagagttgttaaatggggacggacttttttttggtttcgataccttgggtagtaatactagtaattcattttacttaaatgttgactaaaatctacagcaaaattgacttcgattgtatggggtgcttttttgatgtttcctgaataaccccagaacttcctgtcatgatattcacaggtctaaacctgttactgtcgtgattagatcggggctctccctctctccaacctagtagctggaattattctattttacttttcatgtctgtgtgggagggtgggggagcggagggttggattttagggatcttaggtttgtacacattactggaaatacaattgacatagaacactaagatacgttttaggttccaattacaaaacgacacccggcgagcctctggcaatgcgcgcaccttagtttccaaaacaggtatttggcttcagtttgcttcccctggtgagtggtgagcggagtcggggcggccggcagggctgcaccccgggctggtcctccacaacccccggcgctcggcccccgcacgacccccaggggaagccgcactagccccggggctccccccacagcctcccgggagggtttcgcgcccgcctggaggagccggcggctccccgcgaccctcctagaaggagcggaccggcgctcgggccccgcgggctcggggtccccgagccgcacttactcagactcgcggacaggctgcgcagtcggccgcgggcacgaaaccgggcgccgcgcagcagcgtacccccgcgtcgcttccgtcgctcctcatcatcctcctccagcccaggggccgctgccggcgccacggtctagcccggagctcctgctgcgagctgtggccccacttccggcccccgctcgggtgtcgccggcaaatgcccccgccggctcccacataacctgttctccgtctccgctcccggagtgggaaccctgcccgctcttccgagcatgcgcagaagccgctgccagtgagcccccgcgacggtggcccggacggaaaagatacctcggcggcgtgggcccggctccctgctccaggacctagggatcttggccttccaccctcctccgagcaccaggactccctccagttccgtacccgaggcctccgtggtgaagaggtgccggacccgatgagctcgggagtccaccatcgctctgcaagccgcaggtttgcggagcaatttgttctgcctgatagggttgttaagggtgtcgcaatgaggtccacgatttaaagcgcttccataactatttttctccttttacctctacgagagtggactgtcaagggcgaatgcaggttttgtgaggcctgaaccttgtgccatttggagagcccttttaaagaaaaataatgtaaaattgtcttatttttgcaaattttaccgaggtacacgaccatgggaacacctcgttagggcccctctcaaggccttggaagtgttcgcaaaaatgggcccttaaaacttgggcttcattagcttcgctgtcaacccccctgtgcactgaagtgtacacacttgtttacagatgtgtgcctcccctcccttgggctttccttattctatgtcccctattttatatatacagaggatatttcataaatctgtgggtttttttttttttccttttgagatggagcctcgctcttgtcgcccaggctggagtgcaatggcgtgatctcggctcactgcaacctccgcctccctggttcaagcgattctctcgcctcagcctctgacctagctgggattacaggtgcccgccaccacgccccgctactttttgtttttgttttgttgctgttttgagacggagtttcgctcttgtttcccaggctggagtgcaatggcaagatctcggctcaccgcaacctcccgcctcccgggttcaagcgattctcctgcctcagcctccggagtagctgggattacaggcatgcgccaccacgcccagctaattttgtatttttcttcagtagagacgggatttcaccatgttggccaggctgctctcaaactccccacctctggtgatcca

SEQ ID NO: 1791 - DNA, 6000 bp, Homo sapiens
gtaagtatttttgctcattacaacggcataaaaagtcaaagattaggacttccattcatttttacatgctaattttattttttggattctgaggattttagctgattcattccatttgcagtaagacaaatgaggaggttcctggttagggctcaggttttagactctaataaatctgagttcaaatgtggatggtaacatttaacagctgtgtgatactgggcaattacttaatttctctaagcttcagtttcctaaagtataaaatggggttaaaaactatgtagaaattagaatgaagataaaaatcagataatctacaaaatgtgctttaaaaagtagtaagtcttgataattttaatactataatgcttgctgatccaagcaacatttaaaatataaatattgcaaaatattaacgagataaaaaggtgggaagaagcttcactctttaacaataagcaaagctttcaggagaatgaatgcaagcaattagtacacaataacgattcatcattcattcagttctgactaaattgtcctgaagtgacacatgaaaataaaccggcaggttttattcagtgactatggaaggtgattaagtgctatgctattgcacttaaaaaagagagaggaaaaaaaggagtaagtgacgaatgcaactgaagtatccttcatgcaacccttgacaagctgtgtttccctaggaaacaaagggtttacagctgcctatcttccacagcacttagtgacaatttgggacaatctcagcaaaaagaaatgagcagacaaagacgctagaagggctttgggatcccaaaagttaatgaaagaccaagtgtaagaagagaaataaagtaattccctccaagcctaaagtctctcccgctccaatgccccctgtaccctctcggaaaatggaaaatccctaaggagtctacatcattcctctgcccgttccccctactctcccccaacccttcacggattcccagtgaatacctggcctcgggcaagctccgttacctctgtgaaccagagaatcccagctgtaaaatgagatcttgatggtttcctgcggggttgccatgagaaagaatcaacatgtacgcaggtaaagcaggcaatacagttccagggagtcaaaaacgggagaaatcgtcccacgacctggggcttgggtctagatgaagagcacagcatcaggaggccaggcttctaatgcggcgcagtctacagcgctgtggactcggcaactcccatcacctgccgctgcacaaacaccctgcttgctgcccccatagaccgacccccgcctgacgcctcccagacccccccacctgacgcccctcaggccccccgcctgacgtcccagacacccccacgaccggatcccccagacccccaatctgacgccccacttcccctacttgactccccacacatcccccgcctgacgaccccccgacccccgcctgacgtcccagacaccacccatctgatcccccagacccccaatctgacgccccacaccccccacttgactctccacacaccccacacctgccaccccacgtaaaccccgcctgacacctcacagaccctaacctgacgccccacagacctcccccgcctcctgccgccacacacaccccaaaccccgccccgaacaccccccacctgccgccccacagattcccccctctgacgccccacagacccccaacgtgacgccctacagaccccaacctgacgtcccacagataccccgcctgacgccccacagaccttcccccggtctgttgccccacagacttctcgccgcctgctggaccacaccttccacttgactccccccacaccgtcaatctgccaccccccaccccccccaccccaaccccccccaacctcccaaccgcccccacctgccaccccacacccttcccacctgacgtcaagcctgaagctcagccgctaagccggaagctggcgccagaagatgccggttccgccagctgctcgccgcgcaggcgcaggggagacccggggccttgcagtcaccgggctcaagcacgccggcgcagccaggctcgcgatgggaggtgggggggccggcagccccgtggggctgcggaggcgggacctgcaggatcctggttagggtcttgagtacacacggctcctattggcctcggcagcagatgctctctgcaagcagttgatccacacgccagtggattttgtctcgagggagacctaagatcactttgtgctctggctagtgatagcctctaattcttgttctctgtacgtaaaacagtggtaactatactgatttcgctggttgtgaaaactcccaagagagaacaggacatcctcccaactcaaaacgttggttgtttcatttaaacttttaaaaaataggcttttgcaaactatatagagctgtttttttttttaaatgatgtttgctactgtggtctcagttctcttaatacagaaataatacataacaatacataacttacaatatagaaataaaccgttgcatgaccagaaatcaactatggactcttctagtatctgtttaaggtttaaaaataaagttatttaacaaacctttattgagcacctattattatatagtaatggtgctagatattcagggtggagagattataaacaaccccagtttttgtgttccaggagctgttggtttccaccgaatttttgctgtggtcagtcctctttcgccatggagaagtgagaagttattcataaagaggggtggaaacaacttttagaactattttattttagcataaaatattgctttacaataaaataaattttgctgcagtgggccctgataaaacatattagagctgttaagtgcccttagaggttgtgtaatgtataaaaacctcctttttcaaaactgacacatttcattcagtgctagtttgtagcggaggttccgtctagcccaagaacattcagttatttacttcgtatgtctaattgacctaatatgcctgaatatctaaaatcatctgtgatgttgtaaagtctcatgatattgttttgtgagtatctgctcttcaatttagttatcaatttattttggaggaaaaatgaatagtgttaaggtagaggagcctccacttgcccatcttaggagagggtacctatccgtgtacatttgtagcttgttcaacctctactgagctcctacaatgtcagaagctggactttgtattagttacatgagaagaaccatgaattatgaaaccaggcaaactccaaattgattcaaagcccagtctccatttcatcatgttattttagttgattggttcaaagacaatcaagggtttttttcactaagtatcttctagagttgccatgattattaatttatttatgtaaatggtctactttatatatgcttggcacttattccgtgatcaagattaggaagctatgattcaagaacccagctttgacctggagctctccatctggtagcaagacacatatgttcaataacaacaacaccacaggccgggccagtggctaatgcctgtaatcccagcactttaagaggctgaggtgagcggatcacttgaggtcaggagtttgacaccagcctggccaacatggtgaacccccgtctctactaaaaaatacaaaaattaggccgggcctggtggctcacgcctgtaatcccagcactttgggaggccgaggtgggtggatcaccagaggtggggagtttgagagcagcctggccaacatggtgaaatcccgtctctactgaagaaaaatacaaaattagctgggcgtggtggcgcatgcctgtaatcccagctactccggaggctgaggcaggagaatcgcttgaacccgggaggcgggaggttgcggtgagccgagatcttgccattgcactccagcctgggaaacaagagcgaaactccgtctcaaaacagcaacaaaacaaaaacaaaaagtagcggggcgtggtggcgggcacctgtaatcccagctaggtcagaggctgaggcgagagaatcgcttgaaccagggaggcggaggttgcagtgagccgagatcacgccattgcactccagcctgggcgacaagagcgaggctccatctcaaaaggaaaaaaaaaaaaacccacagatttatgaaatatcctctgtatatataaaataggggacatagaataaggaaagcccaagggaggggaggcacacatctgtaaacaagtgtgtacacttcagtgcacaggggggttgacagcgaagctaatgaagcccaagttttaagggcccatttttgcgaacacttccaaggccttgagaggggccctaacgaggtgttcccatggtcgtgtacctcggtaaaatttgcaaaaataagacaattttacattatttttctttaaaagggctctccaaatggcacaaggttcaggcctcacaaaacctgcattcgcccttgacagtccactctcgtagaggtaaaaggagaaaaatagttatggaagcgctttaaatcgtggacctcattgcgacacccttaacaaccctatcaggcagaacaaattgctccgcaaacctgcggcttgcagagcgatggtggactcccgagctcatcgggtccggcacctcttcaccacggaggcctcgggtacggaactggagggagtcctggtgctcggaggagggtggaaggccaagatccctaggtcctggagcagggagccgggcccacgccgccgaggtatcttttccgtccgggccaccgtcgcgggggctcactggcagcggcttctgcgcatgctcggaagagcgggcagggttcccactccgggagcggagacggagaacaggttatgtgggagccggcgggggcatttgccggcgacacccgagcgggggccggaagtggggccacagctcgcagcaggagctccgggctagaccgtggcgccggcagcggcccctgggctggaggaggatgatgaggagcgacggaagcgacgcgggggtacgctgctgcgcggcgcccggtttcgtgcccgcggccgactgcgcagcctgtccgcgagtctgagtaagtgcggctcggggaccccgagcccgcggggcccgagcgccggtccgctccttctaggagggtcgcggggagccgccggctcctccaggcgggcgcgaaaccctcccgggaggctgtggggggagccccggggctagtgcggcttcccctgggggtcgtgcgggggccgagcgccgggggttgtggaggaccagcccggggtgcagccctgccggccgccccgactccgctcaccactcaccaggggaagcaaactgaagccaaatacctgttttggaaactaaggtgcgcgcattgccagaggctcgccgggtgtcgttttgtaattggaacctaaaacgtatcttagtgttctatgtcaattgtatttccagtaatgtgtacaaacctaagatccctaaaatccaaccctccgctcccccaccctcccacacagacatgaaaagtaaaatagaataattccagctactaggttggagagagggagagccccgatctaatcacgacagtaacaggtttagacctgtgaatatcatgacaggaagttctggggttattcaggaaacatcaaaaaagcaccccatacaatcgaagtcaattttgctgtagattttagtcaacatttaagtaaaatgaattactagtattactacccaaggtatcgaaaccaaaaaaaagtccgtccccatttaacaactcttatttatgtttactatgtgatagtaactggatagaaagagatgagtatattggctttgtgtgttgatattggatttttcactgatctcttttgacgggagggggttcgtggatcaatacttatttgtatgcatgcttagggaaatcactcgtctttgactaaaatatcaaatt

SEQ ID NO: 1792 - DNA, 6000 bp, Homo sapiens
tcttttgctgcaagtgatagcataacactttacaacccctataggaccacttagcaataactgtcaaaattcaaaatctgtcccacacataggctgacatatgagaagttacggatgcacacaattatttttcgaagcacctgcattgcaaaagatggacaccaagaagtctattggtaggagactggttaaatacattcaattcatacaatggaatactatgctgctttttttttcatatgaggatctctgtacacaggcatcaaaatgtctgcaatatacattgttaagtaaagaatgcaggttataatctcattttcaaatcatatgtattgaaaatatggtttttaagtgtttactataagaaaggagggaagcagagctacatttgcatttgtttgtgttaacatagagggagtctgaagtctatgtaggaaactgaaagtgaggtgagtgtgggcaggaacagatgggaaaaggagcaatccacactcttcatgcttttttattttttgcaacgtgtgaatgcattacctattcaaaatctagattaaaattcaaaaaaacaaatgaacagaaaagacatgagactacactctgataaacccctcttgtctttttctcttttgtgaagtttacctctgccctcactgtctggacaaaagtatggggcagagcaagcataggaactcaaaatatcagatgaacgtagccccgctcctttgaatctccatgtctctggaatacataacatgatttcatctcaagacctgatgttatgtataatacaataagataatatatacaatatgctaataatatttatatatataaattctttccccagaagataataatatattattatatataattattataatacattatatattatataatatataattacatataatatgctaataatattaataatatattattatcttttcccagaagtcttcttatggacctgtgcaagtaaaatgctttagtgagtacagccttttttaacaaaatgcaacctacctgctaaatgcaatctgcctgctaaatgcccatgcacactcacatttatatactggtcaagggtttgctgacatcacaagggcaacctgtccatcctaaaggttggagcactgcaagcaagcatcccaggtaatcaccccagttcagcacccctggatctgtggcaagcagtcaccactccaggaagatcacagcatactctccagttcacacgcacattggagtatagcagctgcataatttggtgcaatttatagcattttggggggtgggggagagatgtgtaaagtaaaccttttcaaaagaatttttaaaaactgtaactttggcccttaagatcttctggctttcttttacttcttaggaaacagtgtgctgcttattaaaagttgcaaacatgatttaggaaaatgttgaacaataaataatagatttacaagtagtttagtacttgtgttgcatttaggacaattaaagtcacgcagaaaaaaacacagatgaaaagagcatgccagggaatcattaccagtgccaactcacattcatcatctgtgctagtgttgttttgcccattcctcatcgcctagcctaacctccagatactcctgaactcgtagttcgttcacaacacaaaactttctcctgcccccgcctgctttgctgccctccacagcatttcgtctcatctacattttacttgttcatttgtgggttgttgggcctttcgtttgttttctcctcatcaagaggtaagctctttcaaagtagaaaaccatgcatatggacttgcgatggtttggcttagaatcttcaactttacaaaggtgtgaaagccacatacattcaggagaaatcatacttcattccagtattcaaaacacaacatgagctactcaatactttactataaaatgggcttcatgttagatgattttgcccaattgtagactaatgtaagtgttctgagcacatttatggtaggctagactaagctatgatatttggtaagttagatgtcctaactgcttttttcaaggcccgttattttcagcttaggatgggtttatcaggacataactccattgtaagccaaggagcatttgtgcatattttagtcactgatacacccagtaaacatacagtaattaaaatattgtatattcttaattaataaatgtaaactaaatgaatcaatgaatgtgtgagtgaacgaatggttcttttttagtacatttttgttcactagttatcttatataaacaaatgctattatagagcatcaattcccatttgctttcagagagaggtcgatacatgataaagcagcatagtcacaaaaatttgtgaaaaactggatgaaacaaagttaaacaaacattttttaaagtaggactacttagattcaataacttgctaatgtgccttgtgactcaaagaaaaatatgtaagatgctgtgtttccaaacttatacgacactgaaactcttatttcaaggaccatttctctggattaacattctaggtgacacatattgggaaatgacattaaaagttgtttctttgtaaacctggtttcaggccattattatggaaaacacttaacttgtctaaaattaaaactaaaaaaggcttcaaataactgaaaaatgtaaaacattctacctctgtgagaaaacggtaaattatcaagcaataatttgatgttggaaatttattttaaaaatacagatttttaataatctgttcagttttattttcctctttctatgatttttacaattgaatataacaggagaattcatatttgtgaagatggtcttgagtcattcttaaagataaaatgctgtctaaataataaaaatggaatttgatttattattggtttttattttattgtagtttaattatttaacatttctaagtattcgtgcctctaaggtcattctccttattagattattactttggtcttaattattatttattcccaagtcattttgaataaatgtaggtttattattttttacctgattataagaagttctgagatggctgattgattttacatgcaattcaaatacagtctttagacttgaaacttacaaatatttggagtggactgaattctaagtggaaaaagtactggggatattttatttgtttttattatactttaagttttagggtacatgtgcacaacatgcaggttagtttcatatgtatacatgtgccatgttggtgtgctgcacccattaactcgtcatttaacagtaggtatatctcctaatgctatccctcccccctccccccaccccacaacaggccccggtgtgtgatgttccccttcctgtatccatgtgttctcattgttcagttcccacctatgagtgagaacatgcgatagcttgctgagaatgatggtttccagcttcatccatgtccctacaaaggacatgaactcatcattttttatggctgcatagtattccatagcgtatatgtgccacattttcttaatccagtctatcattgatggacatttggcttggttccaagtctttgctatattttattacctttttgtatagttggtgtttcactgtctgcaatcagttgcaagcagtcttgagtgactaaaaagcaaaaatttatcattttagttacttgagtagaaataataaagaaactgagaacacaaagctagaaacccactcttccagaaacactaaatcaattatactttttacattgattgcatgacattattcttaaagttactttatatttgcccattgatttatatatatgatatatatatatgaaattcatgacatttcagaaaagctctatgtgctgttaaaatataatatcacccttacagtttaacctaatttgctctgagaaatggctgaagagaaagcaagtttaatcatttgttttgcaagtctaccaaatacatgaaacagttaaccttataagaacattctaaacaatctttggttttaaaaaatctaacattaaataatgacctactactacagaaaatactatttctgacacttatgaaagtaaaaaaaaaaatgctaatacgtattgaacagatttaagtgcagacagtgtaccaagacagtatatatcacttccttttaccctcacaagaatcctaaaaattagatattggaaactaaggctcggaaagtgcaaacagcttgttcaggaatcagagacagaaagtgatgggaccagaatttcaaccccacctgtttcactctggatccaaagtcaagcttttggtaaaatatattggaccaaagagagaaagagagatagaacatcttttacaaataaaatggaagacttccatgcaagtgcatatagttagtaaagcttcctgaaaacatcaattcacatcacatattacatgtagaatattccagtcaatatttaagaaactaaataacattgtgttaaataaggagaaatgcctttaggcaaaagcaaattaagtacacctgctggatctgtagggaagatacaataaagcagtaaatgtctgtgaaaaatatgaaacagaaatctaagcttgcatgttttagattaagaaaatattagtgtagttttttatctaccaaatattttactaagagttaaagtaatactttataaagatgcttctcaatgtatacattttatgaacttgacacagtagggaacttctactgtgactagttggtgattgtatggagattagctgaaaaatttctaatacagtcatgcactgcataatatttaggtcaatgagaaactgcatatctgatggtggttcaatgggattatttataataccaagtttttactataccttttctatgtttagatacacaaatacttaccattgcattattatacaattgcctacaatattcaatacagtaacatgctgtacaagttggtagcctaggagcaatggtctgtactgcagagcctagttgtgtagaaggctacaccacctaggtttgtgtaagtatgctctgatgtttgcacaatgatgaaattgcccagggatgcagaatgtatccctgagactatatccctgttattaagcaacacatgaatgtatttaaaacttgaaataacatagcagtagctaaataagtttgagtttgtataaatacatactattaaagggtgtggtcacataagaaaatctgttaagaaattcttggtatttaaagatgaaaatatattgttaaaaactataattcctttataactataaagcttttctaacacatttttatgtcaattttcagatattttgataggagcagagcattttggtccactctgaggattcttttattaatcttatacaagaaaggtatccatgcctgtgccccaggaaaaacatgattcgttagtcactatggcagactctgttctgctggaagtatggaaaagcatcctaacaggaagaatggtagtgaatgaggacagcatgaaagaaaggaataacaaagcctccggggcagctaaagccccaagcgtacagtctctatagtagtacagtagtagccacattcaacctattttaaaagagtttttatttttccaacaaatccttcttaagtaattattattcacaaggcaccctgacaggtttctgagtggcactagggtcaatcagagcatacaaagctctcatctttcctccacatcaaaaacaagggaggatgttgatgaacgtcaaagtcagatttttaaactttgcatctttcctttgttatacgtatattgtaaagagtaaatgacacaatgcatgggaagcactttgcgctatactcagtgcataacacctgcaaaataaataaatcttgactatttgtatcagtagtggtgttagcattattgttcttaataatatcaaggcaaataacttagaaaacatcatggaaggacaccgtggaa

SEQ ID NO: 1793 - DNA, 6000 bp, Homo sapiens
gttacaagaccacactagcagaatcatggcttcaccctgagtccggctaattccacatctatgcgcagccaccctgcccctcgccttccctgcagggcgagtggctgaacattttctttggctagtgcaatggccaccccttctttctccctctgctctctaaatgtccttgaccctcaacttcccaacaatgacttcccatccctcacttccttcctgtgtgatctccttctctggagatcccttactgcctttctctctttgcagccacctctcaaatcccagaagccaggatgttacatgtgcaatttccctgcaaggtgccttaatttggttttcctaatggcatcttaaattcaacatgtccagaatggatcagtgtcttccctgaaaaccaattccatctcttgaccattttctctaagtcactggggctaaaatttagagggccacttatttctgacagctccctccccacatccttgggccctccccacatccaatcaactcctgtctgaaatgtgacttgtaaccgcccctcccttgccattcccactgatagcactttacttattacttgttacttcttgctgggccacagaaacggctggactcaccttcctgtctctggtttatgtgccattcagagaaactctgagacatcacctgacgaatcattgtgatgctcagcttgcaggatcccacttctctactcagggacccccagtacttccccgttcttactgaataaagtccaaattctacacttcagtgttctagccccttatcacgtgggcggtgaaacctttggctgcatctcggacagctcatgggcaggtcccctctgctgtcacacccagagttaggaaggcctcaaattcactccctgcacacttgcttccctgtctcctggcaaactgctttctctttgttcttaactctgcctgggaaaatcttccccatccttgaaggcctttctccactgttacccctgcatgaagacctcactgaccccccaaaaagtgtttgacccagaacactttggcttttgcttataatatttacctctgacttggggcacgtgtttcattctctatttgagtgtatgctctttgagggtaggaatgagtgactgtctggcctaccctgaatcttgactctcatgaatcaagttttataaattgactcaaaataataagttagagttacaagaataaggtggtaacggtggttttataattcagaaataatccttttaaaaatgtaaaaaatactctaaaaaagtcagctgtagaggtttgctcgtggttgccaaggagcaaagactttcagagagcttaactccagtgggtttgagcctctttctgattaaagcatcagtgccaatagcattggatccctccaagaatgtggtgtttgggactttaccatcatttgtttgtggaattgtgtgtaggtctgaaaattcaggcctgtggggaactaactttgaattttgataaatgactttcgtggtcagttcgggtcacccagctacactctgttgtgtatattttggcacatctgctcttgaaagatatgattatatgtaactccaacaaatatatcaaaagtgtgttttaatttttttgccttttagatttaatgaaccagttcctaagagaaccctacatgtttctttagaagacctaaccaattgatactgcattatgacaaaccctctaccagaatttcctcattcattcaaaattatgtttaaacccataatgtccacattctttttttttttaacatgaggagacatcataagaaatgaaacaacagtttgagtcagggcaacagagtccaagtttccttccaagaggccaagttgttttagcagaaaaggacattggcgccaaaacccacactaggtccaccggcagcaaacacagaatggtgccctcactctaggaagctggctgttccatatttttatactagatttaaggttcaaaatttcatgttggtgttcataaatgcaaacacacaagccagcaaagaaaaaggagagttatttagtttatattttcttctcccatcctttctctctctctttctatgcaaatgtttcaatcacataggtttgaccaaatagctgcgtcttacaccattctcctctatgtaaagatgtaaagcaactctgcactttttttttttttttttttaagacaaagtctcactctgtggctcaggttggagtgcagtggcacaatttcggctcactgaaacctctgcgtcttgggttcaagcgattctcctgcctcagcctcccgagtagctgggattacaggtgtgtgccaccacacctaatttttgtatttttattagtcagggggttcaccatgttggccaggctggtcttgaactcctgacctcaggtgacctgcctgcctcagcctcccaaagtgctgggattacaggcctgagccaccccgaccggccatgcacttggttttgagagcagcacagtggcggtctgttctccctgcccgcctgctccagggagaggagttgcttgctcccttacagccctcacctcccatgggaccctgcaggtgctgagggctcaggcgcagctgctgccagtcgtcacagccatctcatccattccagagttgtaaataggctgatgattccgttttttgttcccagagctgtatatccagtggcctcctggagtcacctactgggatggctgatgatctccaaaagtgtcaacactgtcccaaactgagcaccccgccccacagcagagccctgccccagcgcctcctgttctggctctatggcaattccctcttcccagcggccgcagcaagagtcgggtcccctgcgccctggcccagcccctgccgcccctgcctggcctggatgttggcaatggtggtttcccagtgccctgcccccaccctttcccttacccctttcagcccgttccttactaagaagccaccgcaatgttggtgagaaagtgggtcagatgtgccacagccttaggccgcttcaaagtctaaccacgtcctgaaaaccttctggtttggttcccagctcctgctccgatctcgcctctatttgaaaaccaccatccccacatcggccacctctcagtcaccccatcctctggctcacccccgagaccgctgccaattggggggacccgtccatagcacggatggcgctgcttccggcacctgcgccgcccgagggtctcctggccatggcctgggggtgccacgcagccgtggccaccgcatcctccctcagtgctccccacggctctcaatgcgctccccaagtgctgaccacgcgcgcccccacggctccccgacagctccgccacgccctccccacggctctccacgctctccccaagtccccaacggctcccccaagcgctgcccacgctcccccacgactcccccactccctctccacgtgctccccacgtgctcagaggagcctggacaggtggatccgggttgccccggggactcattcaggggtgagcacaccttgtacttttccctcgttgtttccctccttcccctcctggaaatgcctcctgcggaaaccactcaaacccttgtctcaggaccatggcaggggtctcctttcttacagggctggctgcttcctcagtcaaggcttctttggctatttacttatctaaaatgaaaactccagccatattctcagtatttcatagcctccttttccatgttgttctcattctttaaagtactacctatttcacctacttgtagtgttctctgtatccctctcctaccagaatgtgacatggacggtaatgtcagccttcttcactcctggttaagcagacttgagaaaagggcctggcatacagtaggcattcagtaaatgctttgtgactctgtcgagaggtgacagcatgctggcagccctcacaggccttgctcgctctcggtgcctcctcggcctcggcgcccattctggccgcgcttgaggagcgcttcagcccgccgctgcactgtgggagccccctcctgggatggctgaggcaggagccggctccctcagcctgcggggaggtgtggagggagaggcacgggcgggaaccagggctgggagcggcgcttgcgggccagctagagttccgggtgggcgtgggcttggcgggccccgcactcggagcggccgggcagtgaggggcttagcacccgagccagcagctgcggagggtgcgccaggtcccccagcagtgccggcccaccggcgctgcgctcgatttctcgccgggccttagctgcctccccgcagggcagggctcgggacctgcagcccgccatgcctgagcctgcccccgcacccccgccgtgggctcctggcggcccgagcctcccctatgagcgccgccccctgctccacggcgcccagtcccaacaaccgcccaagggctgaggagtgcgggcgcacagcgtgggactggcagacagctccacctgcagcccccgggcgggatccactgagtgaagccagctgggctcttgagtctggtggggacttggagaatctttatgtctagctaagggattgtaaatacaccaatcagcactctgtatctagctcaaggtttgtaaatgcaccaatcagcactctgtgtctagctgatctggtggggacttggagaacatttatgtctagctaagggattgtgaatacaccaatcagcactctgtatctagctcaaggtttgtaaatgcaccaatcagcaccctgtgtctagctaatctggtggggacttggagaacctttgtgtctagctcaggattgtaaacgcaccaatcagcaccctgtcaaaacagaccaatcagctctctgtaaaacagaccaatcagctctctgtaaaatgggccaatcagcaggatgtgggtggagccagataagggaagaaaagcaggctctccgagctagcggtggcaatctgttagggtttgtgtctgtcgtgtggaagctttgttcattcgtcttttgcaataaatcttgctactgctcagtctttgggtccacactgcttttatgagctgtagcagtcaccacgaaggtctgcagctgcactcctgaggctagcgagaccacgaacccaccgggaggagcgaacgactccagacgcgctgacttaagagctgtaacagcttaccgctaaggtctgcagcttcactcctgagccagagagaccaggaacccacctagaaggaacaaactccggacatgccgcctttaagagctgtaacactcaccgccagggtccgcagctgcattcttgaagtcagtgagaccaagaacccaccaattccagacacactgtcatcaaaaagtgggatatctttttaaacagagataacattgcagaatcttggagttggaaatagacctcagctggggtttagtcctgttttctcctcagagcagaagtcctgggatgccgttctggactgattgtcagttttttctcctgtccttgagctattctaatgccagacatctgtggctttacacagccaggctttcagttagagaacttggttagctcaggtcaacaaatgctgctctgagaacactgactcccatgtggggagactctgcacctggagctccgggagagccggctcaggcctcttcctgctatccagggaactgcagtggcgttggagggccttgctggggctggggctggggagaagggattccaaccctactgataattcgtttggaaacaccgggctgtggatttcagaagttcttgggcagcctgattaccactggcagtgagccggggacgaagccgaagctatgagtgacagacggaaagaactgggggctttggtgaaccagagaacacttagctcctccagccctgaagcaggcgtcaccgcagggcttatggtcctaagagccacttagtttccttattcatta

SEQ ID NO: 1794 - DNA, 6000 bp, Homo sapiens
ctagagtaaacataagaactcaggccaacgctgaagcttctctaaatggtaatattttccagagtatattctcaaactaaagacagctttgaagactcctagaggaacaatgcaggctgcctgccaccaggaggaaagccctagtctcatatagtaattaattataaaaataaatagctgtgttcaacgtatccaagtaataccaatttattcaacttatttatcataatgttaaaatatgtgtaccatttatttttaaatggatttagggttacaaaatggtatcacttcttttcatcagtaatcaaagttctaaagacaatattgtcatttcacagaaaactgtatcatataaatttaaaatttaataacacagaagttattttacatcacaagcaagcttccatccaggtgaagcctaatttgtgggcaagagaaacagatatcccatcgcaaaattaccaagaagtatttctgttacctaatatttctttgatactccaagcaaagtattttatcaacaaagccactaagtacaaatatttataaacaggaacaacaccactgctaaataggaagccatccttccagacactctgctttttcaatgccagcaactcagcttcagacactactgccttttttccaaacatattccacaccaacattaccatggaaagcagcagcacatgcaatttacagattaaatggggttgtagcaacatttaaattggtttgtccaattattttaaatgtattttaattttacatacgggttgcactgaagttctttatgaagcgaacttcccagggggtgggtgggtatttttatgataatgtttgaaaaataattcaagcaacctcaaacaccattttaaatcgacaaactaattataatccaagtttatgaattaacatacaactgatgcctactaagcaaaagacgtttgacttcctacagagtaggtctgtggaagtctttcagaactacgcggcagagctcagcatttacaccgaagtccaaggagctgtgacccttgcgacagattcgctcgcttctcggcgctcccagctgcgccgctccagtactcccgggggggcaggactgtgatctttcctgaagccaaaaagttcatcaccctaggtgaacatgaagcaagcagcaagccaggctctccccagcaacgacaggaggacaaagtggctccatgaactttgctgtctggacagctggaaccctgcaccccgccccgcgctacttttttctatcgtcgaacgatcaaagtggtctcagcccctgccttccttccgtccggagccccagggtcaccccacggggcccgtccggcccgaggacagcaccttccagaaaagtttctgcgccgagggtccccctcgtggacgcagccccagtcactcacgtttccacggccacgcgcggccccaccctcgggtcagcagagatgcggcctgaaactgtctccgagccggccccgcgggtcgcgggaggcggtccgaactgcagccccggccccgagcccacaggcccgggatcactgctactgctataaatccgcgcccgaaagtggccgggctgagcggggagaggggcaggggcgacacccgccaggcctccagccaatggggaggaggccagcgggagactcgccccgcaccccgagagccgccgcctatgggaatcgccgatttggagggcggaggccaggaggagaaccaaccacaccgcagggcggaagagcacggcccgccccagcagcgagaagaaccaatccaaggctggaggccgagcgacccgaagacgttcaaatcaactcgtccaccctccaccccgctcctccccgaaaaagaaaaaagaagacagcggaaacacagacccataccagttattgcgctaggcccgccttcatccgcctcagcgaccaatcgttccgcaggggaatgataaggacattccacgaaggacatcacagccaactactggggggctgaggcgggacgttccataatatgctaatgaagttcctataaaattcgctgcgaagctacgtctcggatagaacgcgcaggggcgccttcccggcagaggcgtctagtactttcggggatagcggtcaatttttttttttgcccccacccaactcttccgtttccctactgcgcagccttgtaaacattagtaaactccgagtggtgatccacattcaaaacagagcccccaaagccttgactgacctcgcaggaaagtttccccaacagccaacaattcccggcggacacgaactcgccacctctctctgacacccggggcggccaggtctgcagagaacgacgcacaggtcctctcacctgccacagtcctctccaagccagcgatctgcccgcgcccccccgagcgcagcgcagatgggcgccttccccgcctccgctcctccccttcccttcccttccctacggcacacagagaaaagccctcgtcctccgcaaactacaaccggcggcgtcgcccctcgcagtcggcccctactcggtgtccagctccaagtgagggccggagggggctgggcgggggcggccgacctaccccgagcggagtactacccggtactttatgtaacactcagattcgggactgagtggggggcgacgaagaagggccagaggaacggcgttgcccgggaccgaggcaccgggtccgcgggaaccccggcccacagccgccctcctcctgcagccccgtctcggcgccctatagccccaggcgccggcacatccctccatctcgcgccgtaatctgcaccccctcctagaggacgcggcttggacccgccgccccctcccccgcagcacccgcctcatcacttcactacaaagagcgctttggtcgcgcagccttgcagcgagacctctcgcgcctccttcctcctccgtgtcccgggctttgcacacaaggaccttggcgaatcaaaggcgctccagaccttttgttcctgcccctgccgagggccgccgctgcggagccggccgcttcctccggtccacggcaggaccggcccggctccgcggcgcgcccggacccgccgggaaggaggcggccgcccccgcccatccatcacccggccgtaccttggtatttcgcgtcgatctcccgcatcagcgagacatttctctgcaagtcgaaaggcagggactcgatggagtccaggtagtcctccacatagttcaccaggtggagctgctccccgttggcaggactcaacatggttcaccccggaggtccccggcgactcggcgcggctttccgcttcctccaccccccgcccccctcaaaaaatagcactgcaaaatgcaaagccctcgctctcccggcgcccccccgccggctcctgcttcggcccggcggctacatctgccgagcccgtccgccgcctccgggtccgcggggaccccagcgcctgagggcgcgggccgcggtggcggtggctcccgggcgcacgccccggccggcggcgcaggccccctctcaggcggcggggctggcgccgggggccgcgcgtacgagcgcgcacacaccggcgggagagggcccagcgccgcggccgccgctgcccactcgcccactgggctgggtagaagagaggagcggagcgggcagcgggaaggggcgcgctccgctggccgccgagccgcacttgtccaacgtggaaaacccaaataccagtttcaaacacttgggaaacattcagccccgctgcgcagcgcgcatgcgccccggccccctcccccggcaacggccccgccccccgccgcattcacgcccctcaccgtcccaggccctgggggctgcgggctccaggccggccctcgcgggggcgtggccttgcctgtcactttttccagaggcgagggtcgcggaggggacagcgtcagggccgctggggtgtggacggcgggcgaggcgcaaactttactaggagtttttggcacttggaggcagagcctgttgggcggcacagcacgcccgctgggaaacgcaggggagcggcctgcttcgctgaaaacccgaccaggacctaacgggccgcgggacagaaacctccgagaccatggtacacagcaactaccgcaactcgctcctcagcccctgactcttcgtccccgccccacagagcagtataagtagggcccgaaacagaactggcaaccgcagtagccaatctacttgccaacatcactttgacagcccaatcacgatgaagaggaggcggggagaccgtgagtaatgccccccggactcttactactagaaacccaagtcctccgggaggcggaaggaaggggagggccgggcacgggcggaagtggcggcgcatgcgcactggcaccctctcggtgtcctttgagctgcggccgcagagtgcgcgggagacctacccattccgcggccggaccaccactcccagcagcctaggcggctcccgcgcctgcgccatccgtcaccgccctccctttgtgtcgtctcccggtactcagtttggaacggcttggagacaaaggggcctgagagggaagctgcttcctagtgccgagccccagaagaggtggataggcccgaggggcgccttccctaggccttatctcttcccgccctgtgtcatggacaccgttctcggaggccgctccccacacttggaaaggccgcccacagtatgcagacacccggtcggccggcgtcctgaggccattcagctccccggaccgccctcccccgcgtcgcccctctaccctcccaaagctcccggattttgggctttctgagaagcctggacgccacgcgagcccgttgcctaggcgaccggccccgcgcgccggcccccccccttccggccaaagggcccgcccctcctgggcgtggcctcgtgcctttgtgcacttcccgcctggctctctggttccggggcggcctcggcttcggcctccgccccgctgcggccgccgcgggtcccctccggggtggccccgagagctgtgttcgccacgcttggctgcctgcttttctctgattttcttccgccttggaccctgctctatttgcattgtctttttttcagcaagtcggagaacggtgccttgtcagttttcacctttctcactggactttctcttttccggagagccgggttggtggtgctgcctgtgtattccacgaactaagccctgtccccagcccttgcagtgtttctgtatcaactccacgccagcgcggttctccatttttcttagcctcttaattaggacagggtcggatttcagcttttatccaccgggtttatcctgttgcaaagcagagtacacagttttagacacaaaataattgcagttgaaatggatacacattctggtggtaagatttggaaacgtggtatttgatggaaccctgttgtaacatctaaaactctttggattttttaaaaacgtattctgtgtaatccagtaaaaatttggattcgtccagtatttatagagtagattattaaccgcagtggtgctcattccagggccctgccgggtattttgtgctatggatgtgagtacggcaaagagactgaattaagctgttttgtatttggaatcggattgttcacgttgcaacgttgctgcaatgataaatggatggatactctttacactttgaagtggatttaatcttcacttttaagccccttcatctcacctacacagcaggagagctttggctttgatatttggggaaatggctgttattttacttacagatcacgctattctagtcttggcctagttaaaagcaaatgagtactttagtttctacaagatttattggccactacttggtctgcacaaaagactataacacttggccggacgcggtggctcacgcctgtaatcctaccactttgggaggccgaggcgggcgaattgcctgagatcaggagttcggga

SEQ ID NO: 1795 - DNA, 6000 bp, Homo sapiens
caggagacgttcctctggttttttgttgttgtttttagtttgctttggtgttttattaaaaagcaaaggtttaagtagagacaaacaagtgtgtacctagagtagtttctcaatatcctggagtccaactctgcaattctgtttcaagctaactgtagtctaatgtaatctattgtctaatttaataaggttaaaatgttagaattaggagaccctatagcctacatcaatgctaaccactcatgttacctaactactctaaattctcctgaatattatcacttcttgcctgccttatgttattttgtaactttccagtgctgtgtgtatatttatctccctgagtatcttaaattgtacattattttgaacttctcactgtgccctgcactaaattcagaaaaggacttgggttttgtttgttttgttttgctgtggctggaaaaaaaaaatttagaagaaataaaagggcttgttgaatgttgatgaattaatcccttacgaaagggattaattgtgcaggtgggaagaaatctgggtagtaaaatacctgataaagctgattcagatattagatgtgccagtaaataaagcaaattaacaaaaagctcagttgcaatctgtgagaacacacgaattcaaggaaataactggagcagagattctgaaagcagcttagtaacactgaagatcaaatctgcacatgaatctggacatgcggtatatttgaattgttcatagaacatcacaacttttaaattaacaatagtatcttctgtcttcagaaaattcatgtaatgtttttagcccctcactggcagtgattctattatgttttcttttttttttttgaggcagtcttgctctgtcacccaggctggagtgcagtggcctgatctgggttcactgcagcctctgcctcctggttcaagcaatcctcctgcttcagcctccacagtagctgagattacaagtgcacaccaccgtgcccagctaatttttgcatttttatttttatttttatgtatttatttttgagacagagtctcactctatcacccaggctggagtgcagtggcacgatctcggctcactgcaacctccacctcccagattcaagtgattcttctgcctcagcctcccgagtagctgggattacaggtgcgtgccaccacgctcagctaatttttgtatttttagtagagatggggtttcatcatgttggccaggctggtctgggactctggaactcctgacctcaagtgatccagccacctcagcctcccaaagcggtgggaataccggcctaagccaccacacctggccaattctcttttctcttttttcttttttttttttttgagatggagtttcactcttgttgcccaggctggagtgcaatggcgtgatctcctgggttcaagcgattctcctgcctctttctcacgtctcccgggttcaagcaattctcctgcttgtctcctgagtagctgggattacaggcatgtgccaccatgcccagctaattttgtatttttagtacagatggggtttctccatgttagtcaggctggtcttgaactcccgaccccaggtgatccgcccacctcggtctctgaaagtgctgggattacaggcatgagccaccgtgcccggcagctaattctgttttcttaaggcttttgcggatcatcaaaacaaggagaaacatagctcattacctaatgatggttagaaatgtgatctttttgcatattgaatatctgcaggttgaatattaaggtaaagtaaaatagactgctaatgctcttcattactatacctcccagcctacatctttctcctgtgctgggtgcttcctgccctcgaacatcagactccaagttcttcagttttgggactcagactggctctccttgctcctcagcttgcggacagtctattgtgggaccttgtgattatgtaagttagtacttaataaacatatatatgtatatacattatatatatctatatctccatcctattagttctgtccctctagagaaccctgactaatacaccatatatacataaaaagaggatccatttaattgaagtcacctccctctccaatctaggtcagaacgaggaagtgtgttaaagttaatgattccaaaatatcactaatgccatttctcagtccttaatgacaacaataacaaaatcaagttctcagtattacattttctttcaaggcaaaatcttgtaaatcagaagtagagttgattacggtagcatatggtttaggggttttcaagtttaagatgaatgagtttgcatttattttttaagcactttgaaacttaaacaattctatgcttggccaggcgcggtggttcacgcctgtaatcccagcactttgggaggccaagacaggcggatcacctgaggtcaggagttcgagaccagcctgggccaacatgacaaaactccgtctctactaaaaatacaaaaattagttgggcatggcgtccggcacccgtaatcccagctactcaggaggctgaggcaggagaatcgcttgaacccgggaggcggaggttgcagtgagctgagatcacgccactgcactccagtctgggtgacaagagcaagactccgtctcaaaaaaagaaaaagaattatatgttcatctcttatatctgactctcataggtttgagcattttcagttagactggaaatataattttagaaaaaagtttaattttaaatgtttctttttaatccatttgaaatttctgttctacggaaaagttttaacatccatttttgcaacacgccacaggaaacaaaactgaaagagacaagattcttcaacgtatcttcaaaattaagcacctttcttcaatgacatttaaaattcgttatcaaaggtaattatgttttattgcttgatcttctaagtttgttccaaaaaagataaaatcttttttgactttttatcccaaggggtgggctaaaagttttatggaatgtaaagctccaaaaaacttttcactactgtatccccagcgcacggaccagtagttggcacatggtagacactcgtcaatattccttgttgaatgcttaagatgcctttttggtttatgtgtatgtgaagagagtacataactagaggaacaaaatcattactcagattgtactgtgttgtgatttttttttttaaaaagaaaacctaggttaaactccatcttatctttgtaaagggtaaattacttccaattttattcttgagttcagataaacactattcattctagagccaatgaatgctaggaatagaagaaccggtctatttcttactattgtacttttaaattacttatatgctttttgagggaaaggcgtaattttccttattcaactttgtactccctctatactctgtattcgacataatgtttgtttccacataatgttatcttgtcgtagtctttttttctctttttttccggagatagtcttgctctgtcgcccaggctggagtgcagtggcacaatctcggctcactgcaacctcccctcctaggttcaagtgattctgtctcagcctccccaatagctgggactacaggcacgcgccaccatgccctgctaattttttgtatttttagtagagacagggtttcaccatgttgcccaagctggtcccgaactcctgatctcaggcaattcgcccgcctcggcctcccaaagtggtaggattacaggcgtgagccaccgcgtccggccaagtgttatagtcttttgtgcagaccaagtagtggccaataaatcttgtagaaactaaagtactcatttgcttttaactaggccaagactagaatagcgtgatctgtaagtaaaataacagccatttccccaaatatcaaagccaaagctctcctgctgtgtaggtgagatgaaggggcttaaaagtgaagattaaatccacttcaaagtgtaaagagtatccatccatttatcattgcagcaacgttgcaacgtgaacaatccgattccaaatacaaaacagcttaattcagtctctttgccgtactcacatccatagcacaaaatacccggcagggccctggaatgagcaccactgcggttaataatctactctataaatactggacgaatccaaatttttactggattacacagaatacgtttttaaaaaatccaaagagttttagatgttacaacagggttccatcaaataccacgtttccaaatcttaccaccagaatgtgtatccatttcaactgcaattattttgtgtctaaaactgtgtactctgctttgcaacaggataaacccggtggataaaagctgaaatccgaccctgtcctaattaagaggctaagaaaaatggagaaccgcgctggcgtggagttgatacagaaacactgcaagggctggggacagggcttagttcgtggaatacacaggcagcaccaccaacccggctctccggaaaagagaaagtccagtgagaaaggtgaaaactgacaaggcaccgttctccgacttgctgaaaaaaagacaatgcaaatagagcagggtccaaggcggaagaaaatcagagaaaagcaggcagccaagcgtggcgaacacagctctcggggccaccccggaggggacccgcggcggccgcagcggggcggaggccgaagccgaggccgccccggaaccagagagccaggcgggaagtgcacaaaggcacgaggccacgcccaggaggggcgggccctttggccggaagggggggggccggcgcgcggggccggtcgcctaggcaacgggctcgcgtggcgtccaggcttctcagaaagcccaaaatccgggagctttgggagggtagaggggcgacgcgggggagggcggtccggggagctgaatggcctcaggacgccggccgaccgggtgtctgcatactgtgggcggcctttccaagtgtggggagcggcctccgagaacggtgtccatgacacagggcgggaagagataaggcctagggaaggcgcccctcgggcctatccacctcttctggggctcggcactaggaagcagcttccctctcaggcccctttgtctccaagccgttccaaactgagtaccgggagacgacacaaagggagggcggtgacggatggcgcaggcgcgggagccgcctaggctgctgggagtggtggtccggccgcggaatgggtaggtctcccgcgcactctgcggccgcagctcaaaggacaccgagagggtgccagtgcgcatgcgccgccacttccgcccgtgcccggccctccccttccttccgcctcccggaggacttgggtttctagtagtaagagtccggggggcattactcacggtctccccgcctcctcttcatcgtgattgggctgtcaaagtgatgttggcaagtagattggctactgcggttgccagttctgtttcgggccctacttatactgctctgtggggcggggacgaagagtcaggggctgaggagcgagttgcggtagttgctgtgtaccatggtctcggaggtttctgtcccgcggcccgttaggtcctggtcgggttttcagcgaagcaggccgctcccctgcgtttcccagcgggcgtgctgtgccgcccaacaggctctgcctccaagtgccaaaaactcctagtaaagtttgcgcctcgcccgccgtccacaccccagcggccctgacgctgtcccctccgcgaccctcgcctctggaaaaagtgacaggcaaggccacgcccccgcgagggccggcctggagcccgcagcccccagggcctgggacggtgaggggcgtgaatgcggcggggggcggggccgttgccgggggagggggccggggcgcatgcgcgctgcgcagcggggctgaatgtttcccaagtgtttgaaactggtatttgggttttccacgttggacaagtgcggctcggcggcc

SEQ ID NO: 1796 - DNA, 6000 bp, Homo sapiens
gagtgcagtggcacgatctcggctcactgcaacctccacctcccagattcaagtgattcttctgcctcagcctcccgagtagctgggattacaggtgcgtgccaccacgctcagctaatttttgtatttttagtagagatggggtttcatcatgttggccaggctggtctgggactctggaactcctgacctcaagtgatccagccacctcagcctcccaaagcggtgggaataccggcctaagccaccacacctggccaattctcttttctcttttttcttttttttttttttgagatggagtttcactcttgttgcccaggctggagtgcaatggcgtgatctcctgggttcaagcgattctcctgcctctttctcacgtctcccgggttcaagcaattctcctgcttgtctcctgagtagctgggattacaggcatgtgccaccatgcccagctaattttgtatttttagtacagatggggtttctccatgttagtcaggctggtcttgaactcccgaccccaggtgatccgcccacctcggtctctgaaagtgctgggattacaggcatgagccaccgtgcccggcagctaattctgttttcttaaggcttttgcggatcatcaaaacaaggagaaacatagctcattacctaatgatggttagaaatgtgatctttttgcatattgaatatctgcaggttgaatattaaggtaaagtaaaatagactgctaatgctcttcattactatacctcccagcctacatctttctcctgtgctgggtgcttcctgccctcgaacatcagactccaagttcttcagttttgggactcagactggctctccttgctcctcagcttgcggacagtctattgtgggaccttgtgattatgtaagttagtacttaataaacatatatatgtatatacattatatatatctatatctccatcctattagttctgtccctctagagaaccctgactaatacaccatatatacataaaaagaggatccatttaattgaagtcacctccctctccaatctaggtcagaacgaggaagtgtgttaaagttaatgattccaaaatatcactaatgccatttctcagtccttaatgacaacaataacaaaatcaagttctcagtattacattttctttcaaggcaaaatcttgtaaatcagaagtagagttgattacggtagcatatggtttaggggttttcaagtttaagatgaatgagtttgcatttattttttaagcactttgaaacttaaacaattctatgcttggccaggcgcggtggttcacgcctgtaatcccagcactttgggaggccaagacaggcggatcacctgaggtcaggagttcgagaccagcctgggccaacatgacaaaactccgtctctactaaaaatacaaaaattagttgggcatggcgtccggcacccgtaatcccagctactcaggaggctgaggcaggagaatcgcttgaacccgggaggcggaggttgcagtgagctgagatcacgccactgcactccagtctgggtgacaagagcaagactccgtctcaaaaaaagaaaaagaattatatgttcatctcttatatctgactctcataggtttgagcattttcagttagactggaaatataattttagaaaaaagtttaattttaaatgtttctttttaatccatttgaaatttctgttctacggaaaagttttaacatccatttttgcaacacgccacaggaaacaaaactgaaagagacaagattcttcaacgtatcttcaaaattaagcacctttcttcaatgacatttaaaattcgttatcaaaggtaattatgttttattgcttgatcttctaagtttgttccaaaaaagataaaatcttttttgactttttatcccaaggggtgggctaaaagttttatggaatgtaaagctccaaaaaacttttcactactgtatccccagcgcacggaccagtagttggcacatggtagacactcgtcaatattccttgttgaatgcttaagatgcctttttggtttatgtgtatgtgaagagagtacataactagaggaacaaaatcattactcagattgtactgtgttgtgatttttttttttaaaaagaaaacctaggttaaactccatcttatctttgtaaagggtaaattacttccaattttattcttgagttcagataaacactattcattctagagccaatgaatgctaggaatagaagaaccggtctatttcttactattgtacttttaaattacttatatgctttttgagggaaaggcgtaattttccttattcaactttgtactccctctatactctgtattcgacataatgtttgtttccacataatgttatcttgtcgtagtctttttttctctttttttccggagatagtcttgctctgtcgcccaggctggagtgcagtggcacaatctcggctcactgcaacctcccctcctaggttcaagtgattctgtctcagcctccccaatagctgggactacaggcacgcgccaccatgccctgctaattttttgtatttttagtagagacagggtttcaccatgttgcccaagctggtcccgaactcctgatctcaggcaattcgcccgcctcggcctcccaaagtggtaggattacaggcgtgagccaccgcgtccggccaagtgttatagtcttttgtgcagaccaagtagtggccaataaatcttgtagaaactaaagtactcatttgcttttaactaggccaagactagaatagcgtgatctgtaagtaaaataacagccatttccccaaatatcaaagccaaagctctcctgctgtgtaggtgagatgaaggggcttaaaagtgaagattaaatccacttcaaagtgtaaagagtatccatccatttatcattgcagcaacgttgcaacgtgaacaatccgattccaaatacaaaacagcttaattcagtctctttgccgtactcacatccatagcacaaaatacccggcagggccctggaatgagcaccactgcggttaataatctactctataaatactggacgaatccaaatttttactggattacacagaatacgtttttaaaaaatccaaagagttttagatgttacaacagggttccatcaaataccacgtttccaaatcttaccaccagaatgtgtatccatttcaactgcaattattttgtgtctaaaactgtgtactctgctttgcaacaggataaacccggtggataaaagctgaaatccgaccctgtcctaattaagaggctaagaaaaatggagaaccgcgctggcgtggagttgatacagaaacactgcaagggctggggacagggcttagttcgtggaatacacaggcagcaccaccaacccggctctccggaaaagagaaagtccagtgagaaaggtgaaaactgacaaggcaccgttctccgacttgctgaaaaaaagacaatgcaaatagagcagggtccaaggcggaagaaaatcagagaaaagcaggcagccaagcgtggcgaacacagctctcggggccaccccggaggggacccgcggcggccgcagcggggcggaggccgaagccgaggccgccccggaaccagagagccaggcgggaagtgcacaaaggcacgaggccacgcccaggaggggcgggccctttggccggaagggggggggccggcgcgcggggccggtcgcctaggcaacgggctcgcgtggcgtccaggcttctcagaaagcccaaaatccgggagctttgggagggtagaggggcgacgcgggggagggcggtccggggagctgaatggcctcaggacgccggccgaccgggtgtctgcatactgtgggcggcctttccaagtgtggggagcggcctccgagaacggtgtccatgacacagggcgggaagagataaggcctagggaaggcgcccctcgggcctatccacctcttctggggctcggcactaggaagcagcttccctctcaggcccctttgtctccaagccgttccaaactgagtaccgggagacgacacaaagggagggcggtgacggatggcgcaggcgcgggagccgcctaggctgctgggagtggtggtccggccgcggaatgggtaggtctcccgcgcactctgcggccgcagctcaaaggacaccgagagggtgccagtgcgcatgcgccgccacttccgcccgtgcccggccctccccttccttccgcctcccggaggacttgggtttctagtagtaagagtccggggggcattactcacggtctccccgcctcctcttcatcgtgattgggctgtcaaagtgatgttggcaagtagattggctactgcggttgccagttctgtttcgggccctacttatactgctctgtggggcggggacgaagagtcaggggctgaggagcgagttgcggtagttgctgtgtaccatggtctcggaggtttctgtcccgcggcccgttaggtcctggtcgggttttcagcgaagcaggccgctcccctgcgtttcccagcgggcgtgctgtgccgcccaacaggctctgcctccaagtgccaaaaactcctagtaaagtttgcgcctcgcccgccgtccacaccccagcggccctgacgctgtcccctccgcgaccctcgcctctggaaaaagtgacaggcaaggccacgcccccgcgagggccggcctggagcccgcagcccccagggcctgggacggtgaggggcgtgaatgcggcggggggcggggccgttgccgggggagggggccggggcgcatgcgcgctgcgcagcggggctgaatgtttcccaagtgtttgaaactggtatttgggttttccacgttggacaagtgcggctcggcggccagcggagcgcgccccttcccgctgcccgctccgctcctctcttctacccagcccagtgggcgagtgggcagcggcggccgcggcgctgggccctctcccgccggtgtgtgcgcgctcgtacgcgcggcccccggcgccagccccgccgcctgagagggggcctgcgccgccggccggggcgtgcgcccgggagccaccgccaccgcggcccgcgccctcaggcgctggggtccccgcggacccggaggcggcggacgggctcggcagatgtagccgccgggccgaagcaggagccggcgggggggcgccgggagagcgagggctttgcattttgcagtgctattttttgaggggggcggggggtggaggaagcggaaagccgcgccgagtcgccggggacctccggggtgaaccatgttgagtcctgccaacggggagcagctccacctggtgaactatgtggaggactacctggactccatcgagtccctgcctttcgacttgcagagaaatgtctcgctgatgcgggagatcgacgcgaaataccaaggtacggccgggtgatggatgggcgggggcggccgcctccttcccggcgggtccgggcgcgccgcggagccgggccggtcctgccgtggaccggaggaagcggccggctccgcagcggcggccctcggcaggggcaggaacaaaaggtctggagcgcctttgattcgccaaggtccttgtgtgcaaagcccgggacacggaggaggaaggaggcgcgagaggtctcgctgcaaggctgcgcgaccaaagcgctctttgtagtgaagtgatgaggcgggtgctgcgggggagggggcggcgggtccaagccgcgtcctctaggagggggtgcagattacggcgcgagatggagggatgtgccggcgcctggggctatagggcgccgagacggggctgcaggaggagggcggctgtgggccggggttcccgcggacccggtgcctcggtcccgggcaacgccgttcctctggcccttcttcgtcgccccccactcagtcccgaatctgagtgttacataa

SEQ ID NO: 1797 - DNA, 6000 bp, Homo sapiens
atccagaaaacctagctttgctttattattattacgacttgttattattttggagacaaggtccgtctctgtcgcccaggctggagtgcagtggtgcaatctcggctcactgcagcctcgacctcccaggttcaagggaccctcccacctcagcctcctgagtagctgggactacagaagcaccactgtgatgggctattattattattttttaactgcagtgaatgcactagccttgctttaaagcgaagctggtaggttttacttttgcatctactgcttaaacaaaaacatcttcacatctgttaaagtcaatggactttaaaatgttatcaaaaacaaaagaaaacctcttcagtatttaaatgtaaaccttcctgggcatgttagaggacagtgtatatgattttaaagtgtaatttggcaagtgtaattaggcaatttctcaagaaacaaaagctattaaaaaatctagttgaagtaaacagccttgctaaaaaggctacttaaatacacagaaattccagagttctttttcctcaaacagtaaccattaaattaaacagtaccagattattctcctaaaacctttttgcagtctctttaaacaaggcaacaatactacctttttttgttgttgttgaaacggagtttcactcttgttgcccaggctggagtgcaatggcgcgatctcagctcactgcaacctgcctcccaggttcaagcgattctcctgcctcagcctcccgagtagctgggattacaggcatgtaataccacgcccggctaattctgtattttcagtagagacagggtgtctccatgttggacaggctggtctcccaactctcgacctcaggtgatccgcccgcctcggtctcccatggtgctgggattacaggagtgagccaccgtgcctggccaacaatactacttgtaaactaggggaggggctgagagtgggagggattgtctaaaatgttacccccttcctttccagatcttatctccaaatagttataagacatatacctaacactagagtaaacataagaactcaggccaacgctgaagcttctctaaatggtaatattttccagagtatattctcaaactaaagacagctttgaagactcctagaggaacaatgcaggctgcctgccaccaggaggaaagccctagtctcatatagtaattaattataaaaataaatagctgtgttcaacgtatccaagtaataccaatttattcaacttatttatcataatgttaaaatatgtgtaccatttatttttaaatggatttagggttacaaaatggtatcacttcttttcatcagtaatcaaagttctaaagacaatattgtcatttcacagaaaactgtatcatataaatttaaaatttaataacacagaagttattttacatcacaagcaagcttccatccaggtgaagcctaatttgtgggcaagagaaacagatatcccatcgcaaaattaccaagaagtatttctgttacctaatatttctttgatactccaagcaaagtattttatcaacaaagccactaagtacaaatatttataaacaggaacaacaccactgctaaataggaagccatccttccagacactctgctttttcaatgccagcaactcagcttcagacactactgccttttttccaaacatattccacaccaacattaccatggaaagcagcagcacatgcaatttacagattaaatggggttgtagcaacatttaaattggtttgtccaattattttaaatgtattttaattttacatacgggttgcactgaagttctttatgaagcgaacttcccagggggtgggtgggtatttttatgataatgtttgaaaaataattcaagcaacctcaaacaccattttaaatcgacaaactaattataatccaagtttatgaattaacatacaactgatgcctactaagcaaaagacgtttgacttcctacagagtaggtctgtggaagtctttcagaactacgcggcagagctcagcatttacaccgaagtccaaggagctgtgacccttgcgacagattcgctcgcttctcggcgctcccagctgcgccgctccagtactcccgggggggcaggactgtgatctttcctgaagccaaaaagttcatcaccctaggtgaacatgaagcaagcagcaagccaggctctccccagcaacgacaggaggacaaagtggctccatgaactttgctgtctggacagctggaaccctgcaccccgccccgcgctacttttttctatcgtcgaacgatcaaagtggtctcagcccctgccttccttccgtccggagccccagggtcaccccacggggcccgtccggcccgaggacagcaccttccagaaaagtttctgcgccgagggtccccctcgtggacgcagccccagtcactcacgtttccacggccacgcgcggccccaccctcgggtcagcagagatgcggcctgaaactgtctccgagccggccccgcgggtcgcgggaggcggtccgaactgcagccccggccccgagcccacaggcccgggatcactgctactgctataaatccgcgcccgaaagtggccgggctgagcggggagaggggcaggggcgacacccgccaggcctccagccaatggggaggaggccagcgggagactcgccccgcaccccgagagccgccgcctatgggaatcgccgatttggagggcggaggccaggaggagaaccaaccacaccgcagggcggaagagcacggcccgccccagcagcgagaagaaccaatccaaggctggaggccgagcgacccgaagacgttcaaatcaactcgtccaccctccaccccgctcctccccgaaaaagaaaaaagaagacagcggaaacacagacccataccagttattgcgctaggcccgccttcatccgcctcagcgaccaatcgttccgcaggggaatgataaggacattccacgaaggacatcacagccaactactggggggctgaggcgggacgttccataatatgctaatgaagttcctataaaattcgctgcgaagctacgtctcggatagaacgcgcaggggcgccttcccggcagaggcgtctagtactttcggggatagcggtcaatttttttttttgcccccacccaactcttccgtttccctactgcgcagccttgtaaacattagtaaactccgagtggtgatccacattcaaaacagagcccccaaagccttgactgacctcgcaggaaagtttccccaacagccaacaattcccggcggacacgaactcgccacctctctctgacacccggggcggccaggtctgcagagaacgacgcacaggtcctctcacctgccacagtcctctccaagccagcgatctgcccgcgcccccccgagcgcagcgcagatgggcgccttccccgcctccgctcctccccttcccttcccttccctacggcacacagagaaaagccctcgtcctccgcaaactacaaccggcggcgtcgcccctcgcagtcggcccctactcggtgtccagctccaagtgagggccggagggggctgggcgggggcggccgacctaccccgagcggagtactacccggtactttatgtaacactcagattcgggactgagtggggggcgacgaagaagggccagaggaacggcgttgcccgggaccgaggcaccgggtccgcgggaaccccggcccacagccgccctcctcctgcagccccgtctcggcgccctatagccccaggcgccggcacatccctccatctcgcgccgtaatctgcaccccctcctagaggacgcggcttggacccgccgccccctcccccgcagcacccgcctcatcacttcactacaaagagcgctttggtcgcgcagccttgcagcgagacctctcgcgcctccttcctcctccgtgtcccgggctttgcacacaaggaccttggcgaatcaaaggcgctccagaccttttgttcctgcccctgccgagggccgccgctgcggagccggccgcttcctccggtccacggcaggaccggcccggctccgcggcgcgcccggacccgccgggaaggaggcggccgcccccgcccatccatcacccggccgtaccttggtatttcgcgtcgatctcccgcatcagcgagacatttctctgcaagtcgaaaggcagggactcgatggagtccaggtagtcctccacatagttcaccaggtggagctgctccccgttggcaggactcaacatggttcaccccggaggtccccggcgactcggcgcggctttccgcttcctccaccccccgcccccctcaaaaaatagcactgcaaaatgcaaagccctcgctctcccggcgcccccccgccggctcctgcttcggcccggcggctacatctgccgagcccgtccgccgcctccgggtccgcggggaccccagcgcctgagggcgcgggccgcggtggcggtggctcccgggcgcacgccccggccggcggcgcaggccccctctcaggcggcggggctggcgccgggggccgcgcgtacgagcgcgcacacaccggcgggagagggcccagcgccgcggccgccgctgcccactcgcccactgggctgggtagaagagaggagcggagcgggcagcgggaaggggcgcgctccgctggccgccgagccgcacttgtccaacgtggaaaacccaaataccagtttcaaacacttgggaaacattcagccccgctgcgcagcgcgcatgcgccccggccccctcccccggcaacggccccgccccccgccgcattcacgcccctcaccgtcccaggccctgggggctgcgggctccaggccggccctcgcgggggcgtggccttgcctgtcactttttccagaggcgagggtcgcggaggggacagcgtcagggccgctggggtgtggacggcgggcgaggcgcaaactttactaggagtttttggcacttggaggcagagcctgttgggcggcacagcacgcccgctgggaaacgcaggggagcggcctgcttcgctgaaaacccgaccaggacctaacgggccgcgggacagaaacctccgagaccatggtacacagcaactaccgcaactcgctcctcagcccctgactcttcgtccccgccccacagagcagtataagtagggcccgaaacagaactggcaaccgcagtagccaatctacttgccaacatcactttgacagcccaatcacgatgaagaggaggcggggagaccgtgagtaatgccccccggactcttactactagaaacccaagtcctccgggaggcggaaggaaggggagggccgggcacgggcggaagtggcggcgcatgcgcactggcaccctctcggtgtcctttgagctgcggccgcagagtgcgcgggagacctacccattccgcggccggaccaccactcccagcagcctaggcggctcccgcgcctgcgccatccgtcaccgccctccctttgtgtcgtctcccggtactcagtttggaacggcttggagacaaaggggcctgagagggaagctgcttcctagtgccgagccccagaagaggtggataggcccgaggggcgccttccctaggccttatctcttcccgccctgtgtcatggacaccgttctcggaggccgctccccacacttggaaaggccgcccacagtatgcagacacccggtcggccggcgtcctgaggccattcagctccccggaccgccctcccccgcgtcgcccctctaccctcccaaagctcccggattttgggctttctgagaagcctggacgccacgcgagcccgttgcctaggcgaccggccccgcgcgccggcccccccccttccggccaaagggcccgcccctcctgggcgtggcctcgtgcctttgtgcacttcccgcctgg

SEQ ID NO: 1798 - DNA, 6000 bp, Homo sapiens
gcatatggtttaggggttttcaagtttaagatgaatgagtttgcatttattttttaagcactttgaaacttaaacaattctatgcttggccaggcgcggtggttcacgcctgtaatcccagcactttgggaggccaagacaggcggatcacctgaggtcaggagttcgagaccagcctgggccaacatgacaaaactccgtctctactaaaaatacaaaaattagttgggcatggcgtccggcacccgtaatcccagctactcaggaggctgaggcaggagaatcgcttgaacccgggaggcggaggttgcagtgagctgagatcacgccactgcactccagtctgggtgacaagagcaagactccgtctcaaaaaaagaaaaagaattatatgttcatctcttatatctgactctcataggtttgagcattttcagttagactggaaatataattttagaaaaaagtttaattttaaatgtttctttttaatccatttgaaatttctgttctacggaaaagttttaacatccatttttgcaacacgccacaggaaacaaaactgaaagagacaagattcttcaacgtatcttcaaaattaagcacctttcttcaatgacatttaaaattcgttatcaaaggtaattatgttttattgcttgatcttctaagtttgttccaaaaaagataaaatcttttttgactttttatcccaaggggtgggctaaaagttttatggaatgtaaagctccaaaaaacttttcactactgtatccccagcgcacggaccagtagttggcacatggtagacactcgtcaatattccttgttgaatgcttaagatgcctttttggtttatgtgtatgtgaagagagtacataactagaggaacaaaatcattactcagattgtactgtgttgtgatttttttttttaaaaagaaaacctaggttaaactccatcttatctttgtaaagggtaaattacttccaattttattcttgagttcagataaacactattcattctagagccaatgaatgctaggaatagaagaaccggtctatttcttactattgtacttttaaattacttatatgctttttgagggaaaggcgtaattttccttattcaactttgtactccctctatactctgtattcgacataatgtttgtttccacataatgttatcttgtcgtagtctttttttctctttttttccggagatagtcttgctctgtcgcccaggctggagtgcagtggcacaatctcggctcactgcaacctcccctcctaggttcaagtgattctgtctcagcctccccaatagctgggactacaggcacgcgccaccatgccctgctaattttttgtatttttagtagagacagggtttcaccatgttgcccaagctggtcccgaactcctgatctcaggcaattcgcccgcctcggcctcccaaagtggtaggattacaggcgtgagccaccgcgtccggccaagtgttatagtcttttgtgcagaccaagtagtggccaataaatcttgtagaaactaaagtactcatttgcttttaactaggccaagactagaatagcgtgatctgtaagtaaaataacagccatttccccaaatatcaaagccaaagctctcctgctgtgtaggtgagatgaaggggcttaaaagtgaagattaaatccacttcaaagtgtaaagagtatccatccatttatcattgcagcaacgttgcaacgtgaacaatccgattccaaatacaaaacagcttaattcagtctctttgccgtactcacatccatagcacaaaatacccggcagggccctggaatgagcaccactgcggttaataatctactctataaatactggacgaatccaaatttttactggattacacagaatacgtttttaaaaaatccaaagagttttagatgttacaacagggttccatcaaataccacgtttccaaatcttaccaccagaatgtgtatccatttcaactgcaattattttgtgtctaaaactgtgtactctgctttgcaacaggataaacccggtggataaaagctgaaatccgaccctgtcctaattaagaggctaagaaaaatggagaaccgcgctggcgtggagttgatacagaaacactgcaagggctggggacagggcttagttcgtggaatacacaggcagcaccaccaacccggctctccggaaaagagaaagtccagtgagaaaggtgaaaactgacaaggcaccgttctccgacttgctgaaaaaaagacaatgcaaatagagcagggtccaaggcggaagaaaatcagagaaaagcaggcagccaagcgtggcgaacacagctctcggggccaccccggaggggacccgcggcggccgcagcggggcggaggccgaagccgaggccgccccggaaccagagagccaggcgggaagtgcacaaaggcacgaggccacgcccaggaggggcgggccctttggccggaagggggggggccggcgcgcggggccggtcgcctaggcaacgggctcgcgtggcgtccaggcttctcagaaagcccaaaatccgggagctttgggagggtagaggggcgacgcgggggagggcggtccggggagctgaatggcctcaggacgccggccgaccgggtgtctgcatactgtgggcggcctttccaagtgtggggagcggcctccgagaacggtgtccatgacacagggcgggaagagataaggcctagggaaggcgcccctcgggcctatccacctcttctggggctcggcactaggaagcagcttccctctcaggcccctttgtctccaagccgttccaaactgagtaccgggagacgacacaaagggagggcggtgacggatggcgcaggcgcgggagccgcctaggctgctgggagtggtggtccggccgcggaatgggtaggtctcccgcgcactctgcggccgcagctcaaaggacaccgagagggtgccagtgcgcatgcgccgccacttccgcccgtgcccggccctccccttccttccgcctcccggaggacttgggtttctagtagtaagagtccggggggcattactcacggtctccccgcctcctcttcatcgtgattgggctgtcaaagtgatgttggcaagtagattggctactgcggttgccagttctgtttcgggccctacttatactgctctgtggggcggggacgaagagtcaggggctgaggagcgagttgcggtagttgctgtgtaccatggtctcggaggtttctgtcccgcggcccgttaggtcctggtcgggttttcagcgaagcaggccgctcccctgcgtttcccagcgggcgtgctgtgccgcccaacaggctctgcctccaagtgccaaaaactcctagtaaagtttgcgcctcgcccgccgtccacaccccagcggccctgacgctgtcccctccgcgaccctcgcctctggaaaaagtgacaggcaaggccacgcccccgcgagggccggcctggagcccgcagcccccagggcctgggacggtgaggggcgtgaatgcggcggggggcggggccgttgccgggggagggggccggggcgcatgcgcgctgcgcagcggggctgaatgtttcccaagtgtttgaaactggtatttgggttttccacgttggacaagtgcggctcggcggccagcggagcgcgccccttcccgctgcccgctccgctcctctcttctacccagcccagtgggcgagtgggcagcggcggccgcggcgctgggccctctcccgccggtgtgtgcgcgctcgtacgcgcggcccccggcgccagccccgccgcctgagagggggcctgcgccgccggccggggcgtgcgcccgggagccaccgccaccgcggcccgcgccctcaggcgctggggtccccgcggacccggaggcggcggacgggctcggcagatgtagccgccgggccgaagcaggagccggcgggggggcgccgggagagcgagggctttgcattttgcagtgctattttttgaggggggcggggggtggaggaagcggaaagccgcgccgagtcgccggggacctccggggtgaaccatgttgagtcctgccaacggggagcagctccacctggtgaactatgtggaggactacctggactccatcgagtccctgcctttcgacttgcagagaaatgtctcgctgatgcgggagatcgacgcgaaataccaaggtacggccgggtgatggatgggcgggggcggccgcctccttcccggcgggtccgggcgcgccgcggagccgggccggtcctgccgtggaccggaggaagcggccggctccgcagcggcggccctcggcaggggcaggaacaaaaggtctggagcgcctttgattcgccaaggtccttgtgtgcaaagcccgggacacggaggaggaaggaggcgcgagaggtctcgctgcaaggctgcgcgaccaaagcgctctttgtagtgaagtgatgaggcgggtgctgcgggggagggggcggcgggtccaagccgcgtcctctaggagggggtgcagattacggcgcgagatggagggatgtgccggcgcctggggctatagggcgccgagacggggctgcaggaggagggcggctgtgggccggggttcccgcggacccggtgcctcggtcccgggcaacgccgttcctctggcccttcttcgtcgccccccactcagtcccgaatctgagtgttacataaagtaccgggtagtactccgctcggggtaggtcggccgcccccgcccagccccctccggccctcacttggagctggacaccgagtaggggccgactgcgaggggcgacgccgccggttgtagtttgcggaggacgagggcttttctctgtgtgccgtagggaagggaagggaaggggaggagcggaggcggggaaggcgcccatctgcgctgcgctcgggggggcgcgggcagatcgctggcttggagaggactgtggcaggtgagaggacctgtgcgtcgttctctgcagacctggccgccccgggtgtcagagagaggtggcgagttcgtgtccgccgggaattgttggctgttggggaaactttcctgcgaggtcagtcaaggctttgggggctctgttttgaatgtggatcaccactcggagtttactaatgtttacaaggctgcgcagtagggaaacggaagagttgggtgggggcaaaaaaaaaaattgaccgctatccccgaaagtactagacgcctctgccgggaaggcgcccctgcgcgttctatccgagacgtagcttcgcagcgaattttataggaacttcattagcatattatggaacgtcccgcctcagccccccagtagttggctgtgatgtccttcgtggaatgtccttatcattcccctgcggaacgattggtcgctgaggcggatgaaggcgggcctagcgcaataactggtatgggtctgtgtttccgctgtcttcttttttctttttcggggaggagcggggtggagggtggacgagttgatttgaacgtcttcgggtcgctcggcctccagccttggattggttcttctcgctgctggggcgggccgtgctcttccgccctgcggtgtggttggttctcctcctggcctccgccctccaaatcggcgattcccataggcggcggctctcggggtgcggggcgagtctcccgctggcctcctccccattggctggaggcctggcgggtgtcgcccctgcccctctccccgctcagcccggccactttcgggcgcggatttatagcagtagcagtgatcccgggcctgtgggctcggggccggggctgcagttcggaccgcctcccgcgacccgcggggccggctcggagacagtttcaggccgcatctctgctgacccgagggtggggccgcgcgtggccgtggaaacgtg

SEQ ID NO: 1799 - DNA, 6000 bp, Homo sapiens
gtatgtgaagagagtacataactagaggaacaaaatcattactcagattgtactgtgttgtgatttttttttttaaaaagaaaacctaggttaaactccatcttatctttgtaaagggtaaattacttccaattttattcttgagttcagataaacactattcattctagagccaatgaatgctaggaatagaagaaccggtctatttcttactattgtacttttaaattacttatatgctttttgagggaaaggcgtaattttccttattcaactttgtactccctctatactctgtattcgacataatgtttgtttccacataatgttatcttgtcgtagtctttttttctctttttttccggagatagtcttgctctgtcgcccaggctggagtgcagtggcacaatctcggctcactgcaacctcccctcctaggttcaagtgattctgtctcagcctccccaatagctgggactacaggcacgcgccaccatgccctgctaattttttgtatttttagtagagacagggtttcaccatgttgcccaagctggtcccgaactcctgatctcaggcaattcgcccgcctcggcctcccaaagtggtaggattacaggcgtgagccaccgcgtccggccaagtgttatagtcttttgtgcagaccaagtagtggccaataaatcttgtagaaactaaagtactcatttgcttttaactaggccaagactagaatagcgtgatctgtaagtaaaataacagccatttccccaaatatcaaagccaaagctctcctgctgtgtaggtgagatgaaggggcttaaaagtgaagattaaatccacttcaaagtgtaaagagtatccatccatttatcattgcagcaacgttgcaacgtgaacaatccgattccaaatacaaaacagcttaattcagtctctttgccgtactcacatccatagcacaaaatacccggcagggccctggaatgagcaccactgcggttaataatctactctataaatactggacgaatccaaatttttactggattacacagaatacgtttttaaaaaatccaaagagttttagatgttacaacagggttccatcaaataccacgtttccaaatcttaccaccagaatgtgtatccatttcaactgcaattattttgtgtctaaaactgtgtactctgctttgcaacaggataaacccggtggataaaagctgaaatccgaccctgtcctaattaagaggctaagaaaaatggagaaccgcgctggcgtggagttgatacagaaacactgcaagggctggggacagggcttagttcgtggaatacacaggcagcaccaccaacccggctctccggaaaagagaaagtccagtgagaaaggtgaaaactgacaaggcaccgttctccgacttgctgaaaaaaagacaatgcaaatagagcagggtccaaggcggaagaaaatcagagaaaagcaggcagccaagcgtggcgaacacagctctcggggccaccccggaggggacccgcggcggccgcagcggggcggaggccgaagccgaggccgccccggaaccagagagccaggcgggaagtgcacaaaggcacgaggccacgcccaggaggggcgggccctttggccggaagggggggggccggcgcgcggggccggtcgcctaggcaacgggctcgcgtggcgtccaggcttctcagaaagcccaaaatccgggagctttgggagggtagaggggcgacgcgggggagggcggtccggggagctgaatggcctcaggacgccggccgaccgggtgtctgcatactgtgggcggcctttccaagtgtggggagcggcctccgagaacggtgtccatgacacagggcgggaagagataaggcctagggaaggcgcccctcgggcctatccacctcttctggggctcggcactaggaagcagcttccctctcaggcccctttgtctccaagccgttccaaactgagtaccgggagacgacacaaagggagggcggtgacggatggcgcaggcgcgggagccgcctaggctgctgggagtggtggtccggccgcggaatgggtaggtctcccgcgcactctgcggccgcagctcaaaggacaccgagagggtgccagtgcgcatgcgccgccacttccgcccgtgcccggccctccccttccttccgcctcccggaggacttgggtttctagtagtaagagtccggggggcattactcacggtctccccgcctcctcttcatcgtgattgggctgtcaaagtgatgttggcaagtagattggctactgcggttgccagttctgtttcgggccctacttatactgctctgtggggcggggacgaagagtcaggggctgaggagcgagttgcggtagttgctgtgtaccatggtctcggaggtttctgtcccgcggcccgttaggtcctggtcgggttttcagcgaagcaggccgctcccctgcgtttcccagcgggcgtgctgtgccgcccaacaggctctgcctccaagtgccaaaaactcctagtaaagtttgcgcctcgcccgccgtccacaccccagcggccctgacgctgtcccctccgcgaccctcgcctctggaaaaagtgacaggcaaggccacgcccccgcgagggccggcctggagcccgcagcccccagggcctgggacggtgaggggcgtgaatgcggcggggggcggggccgttgccgggggagggggccggggcgcatgcgcgctgcgcagcggggctgaatgtttcccaagtgtttgaaactggtatttgggttttccacgttggacaagtgcggctcggcggccagcggagcgcgccccttcccgctgcccgctccgctcctctcttctacccagcccagtgggcgagtgggcagcggcggccgcggcgctgggccctctcccgccggtgtgtgcgcgctcgtacgcgcggcccccggcgccagccccgccgcctgagagggggcctgcgccgccggccggggcgtgcgcccgggagccaccgccaccgcggcccgcgccctcaggcgctggggtccccgcggacccggaggcggcggacgggctcggcagatgtagccgccgggccgaagcaggagccggcgggggggcgccgggagagcgagggctttgcattttgcagtgctattttttgaggggggcggggggtggaggaagcggaaagccgcgccgagtcgccggggacctccggggtgaaccatgttgagtcctgccaacggggagcagctccacctggtgaactatgtggaggactacctggactccatcgagtccctgcctttcgacttgcagagaaatgtctcgctgatgcgggagatcgacgcgaaataccaaggtacggccgggtgatggatgggcgggggcggccgcctccttcccggcgggtccgggcgcgccgcggagccgggccggtcctgccgtggaccggaggaagcggccggctccgcagcggcggccctcggcaggggcaggaacaaaaggtctggagcgcctttgattcgccaaggtccttgtgtgcaaagcccgggacacggaggaggaaggaggcgcgagaggtctcgctgcaaggctgcgcgaccaaagcgctctttgtagtgaagtgatgaggcgggtgctgcgggggagggggcggcgggtccaagccgcgtcctctaggagggggtgcagattacggcgcgagatggagggatgtgccggcgcctggggctatagggcgccgagacggggctgcaggaggagggcggctgtgggccggggttcccgcggacccggtgcctcggtcccgggcaacgccgttcctctggcccttcttcgtcgccccccactcagtcccgaatctgagtgttacataaagtaccgggtagtactccgctcggggtaggtcggccgcccccgcccagccccctccggccctcacttggagctggacaccgagtaggggccgactgcgaggggcgacgccgccggttgtagtttgcggaggacgagggcttttctctgtgtgccgtagggaagggaagggaaggggaggagcggaggcggggaaggcgcccatctgcgctgcgctcgggggggcgcgggcagatcgctggcttggagaggactgtggcaggtgagaggacctgtgcgtcgttctctgcagacctggccgccccgggtgtcagagagaggtggcgagttcgtgtccgccgggaattgttggctgttggggaaactttcctgcgaggtcagtcaaggctttgggggctctgttttgaatgtggatcaccactcggagtttactaatgtttacaaggctgcgcagtagggaaacggaagagttgggtgggggcaaaaaaaaaaattgaccgctatccccgaaagtactagacgcctctgccgggaaggcgcccctgcgcgttctatccgagacgtagcttcgcagcgaattttataggaacttcattagcatattatggaacgtcccgcctcagccccccagtagttggctgtgatgtccttcgtggaatgtccttatcattcccctgcggaacgattggtcgctgaggcggatgaaggcgggcctagcgcaataactggtatgggtctgtgtttccgctgtcttcttttttctttttcggggaggagcggggtggagggtggacgagttgatttgaacgtcttcgggtcgctcggcctccagccttggattggttcttctcgctgctggggcgggccgtgctcttccgccctgcggtgtggttggttctcctcctggcctccgccctccaaatcggcgattcccataggcggcggctctcggggtgcggggcgagtctcccgctggcctcctccccattggctggaggcctggcgggtgtcgcccctgcccctctccccgctcagcccggccactttcgggcgcggatttatagcagtagcagtgatcccgggcctgtgggctcggggccggggctgcagttcggaccgcctcccgcgacccgcggggccggctcggagacagtttcaggccgcatctctgctgacccgagggtggggccgcgcgtggccgtggaaacgtgagtgactggggctgcgtccacgagggggaccctcggcgcagaaacttttctggaaggtgctgtcctcgggccggacgggccccgtggggtgaccctggggctccggacggaaggaaggcaggggctgagaccactttgatcgttcgacgatagaaaaaagtagcgcggggcggggtgcagggttccagctgtccagacagcaaagttcatggagccactttgtcctcctgtcgttgctggggagagcctggcttgctgcttgcttcatgttcacctagggtgatgaactttttggcttcaggaaagatcacagtcctgcccccccgggagtactggagcggcgcagctgggagcgccgagaagcgagcgaatctgtcgcaagggtcacagctccttggacttcggtgtaaatgctgagctctgccgcgtagttctgaaagacttccacagacctactctgtaggaagtcaaacgtcttttgcttagtaggcatcagttgtatgttaattcataaacttggattataattagtttgtcgatttaaaatggtgtttgaggttgcttgaattatttttcaaacattatcataaaaatacccacccaccccctgggaagttcgcttcataaagaacttcagtgcaacccgtatgtaaaattaaaatacatttaaaataattggacaaaccaatttaaatgttgctacaaccccatttaatctgtaaattgcatgtgctgctgctttccatggtaatgttggtgtggaatatgtttggaaaaaaggcagtagtgtctgaagctgagttgctggcattgaaaaagcagagtgtctggaaggatggcttcctatttagcagtggtgtt

SEQ ID NO: 1800 - DNA, 6000 bp, Homo sapiens
aggtgttgcaaagtaattccgcctttttaagtaaaaataatgaggcagcagatatcagacagccaaatctccaggaaaagagtagtaagaagctttagctgtaaggtatcatattttattaaaccaaagacctctgagagttcaggtgggactcgtttctagtcaagacacagtacaagaactgtattaactttctgcctgaaataaccacaaaatcaggcaaaatatacgaagcaacagttttcgaagcactgagtactgggctatgaaagacagtgaatctcagaaagatgggagacaaacaggccccaactgctcagcttcctgtgtgaagagcttccaggttgtggtgtgggggccctgagtagctgggactacaggcatgcaacaccccactaggctaatttttaaattttttgtagagatggggtttcaccatgttgcctaggctggtctcgaactcctgggctcaagcgatcaggccacctcagccccccaaagtgctgggattacaggtgtgagccactgagcccagactctcaatactgttaagaatttaattctcctacattgatctgtagattctatataccgtcaatcaaaatcttagcacactttcttatacaaattggccgattctaaaattcacatggaaacacaagggaccaagaatagccagaaacctgtgcaaatgtatgaagctggggggccaacacaccctgatttcacaactcactcctcctactcctacgtggtttttgacaaaggagcaaaggcaattcagtaggggaaaagagactgaaaaactggacatttgcagggaaaacactgactctagacttttctttgtatttttttgaaatggagtctcactctgttgctcaggctggagtacagtggcacaacctcggctcactgcaacctccgcctcccgggttcaagcgattctccggcctcagcctcccaagtagctgggattacaggtgcctgccaccacgcccggctaattttttgtacttttagtagagatggggtttcaccatgttggccaggctggtctcaaaatcctgacgctcaggcgatctacccaccttggcctcccaaagtgctgggattacaggcatgagccactgcacccgactctgactctagatttgtatttcacaatatatacaaaaattcactctacatagatcgtagacctagatgtaaaacctaaaactctaaaatgtctggaagaaagtataagagaaaactttgtgacctcagattaagcaagatttcttggatactaaaagcacaatccatagaagaacaaactgatacatgtgacttgaaaacttaaaacaattactcttcaaatggcacagttaagagaatcaaaagacaagttgaagactaggcagaaagtatttgcaaggcgaatatctgatacaggacttgtatccagaatacataataaactcaaatactcaataataagaaaataaccaacccaataaaaatgagcaaaatatttaaatagacacttcgtcaacgaagatacatagaatggcaagtaaatacaaagatgcttagcatcagagggaaatgcaaactaaaactacaatgacactccaccacacacccacaagcacagctaaagttacagactgaggacaccacacgctggtggcggagtggaactggagctcccatacactgctgggagagacgcacacgctggtggcggagtggaaccggagctcccatacactgctgggagagacgcaaaaggggcagtcacttgcaaaaacaagaaattccgtacaaagttaaacatacattttccatatgaccctgagaacttacttctagataaagaagtaagcagaactcacctgagaggagtaagaatatatgtccaaacaaagggttattcacaaatgtttacagcagctttatttaaaacaacccaaggccaggcgcggtggcttatgctggtaaacccagcactttgagagaccgaggtgggtggatcacctgaggtcaggagtttgagaccagcctgcccaacatggcgaaaccccgactctactaaaaatacaaaaattagccaggcgtggtggcaggtgcctgtaatcccagcgactcgggaggctgaggcaggagaatcgcttgaacctgcgaggtggaggttgcagtgagccaagatcgtgccatggcactccagcctgggccacaagagtgaaactccgtctcaaagaacaaacaaacaaaaaaccccaaacatggacacccaaatgtccattaactggtgaatggataaaacaactgtggtatacccattctactaggtaataaattacaatcacactgcgttgtgcatgaatctcaaaagcactgtcctaagtgaaagccagatacaaaagactatgaaatacatgactgcatttagataaggttctagaaatcgcaaaatatagtaacagaaagcaaatgggggaccgccaagggctaggagtcaggggagagggctgactgcaaaagtggtcatggcaatttcgggggtggtagcaatattctaccattctaccaagaaagattccatcttgaccgtggtgccggttacgtaactgcatgcatctgttaaaacttcctgaagtgcacattatatgtagactctatctcaaagctggtaagaaaacatcatccacttacacttcagacaaagaatggatgtatgtacaccaaactgtcaacagtagttttctttgggtggtaggagtataggtgattgaagtcttcttttttgtattttttataatttttacaatgcagtcacttgcatatccagaaaaaaagtttttttaattcaagccttttaatagaaataattgtatgacacatcgtgacctaaaatatagatattagactactgaatgaatgttactttacaaaaagaagacaccagaaaaaaagtcgcttataaataaaatatccaagtatggtaaaatgtacttttttgttacttcagaaacggaacaccatcactttgaattaaatgctaccaaatctgtttgaataccttaaaggcaaccactaatcacaaaacacaacagagaacaaaaccactttttctgaattttgaattttttcaaaatctgtttgaatatcttaaaggcaaccattaatcacaaaacacaacagagaaaagaccctcttattactgtggcaagtgacacagtcatgagttttacatataacgagaaaataatttgccgtatacttgcaaaatatgagtcacgtggctcctagaaacacacctccttctcttccgtaatgggataactttaaatatggttctaagcagcttaagcctgaaaacaaaaattccaccacggcaataaacaaaaccacttgttgcctctggggctcccggccctgcagtggaggcaaacgccctgcctttccgctccccggcgagagcctgcgaggcacccggagcggccgcccggccgcgtctgcgtcacgcggggcaggagcggcgtccccagccccggccgccgcctcacctggtagagctcctcgaggttgtacctgatggaggtgctgctctgcacggcccgcaccgcctcgtgcagcttccgccacgtgtcctgcgtgtagttgtcgggcagccgaggtctgtctgcagggcggagggagagcgggcggctcagggcgcgccgcgaagcgccccgcgtagccacccccgacccggccggcgccccggcgcccccgctcccggggcccgcacggatctcggggccttccccccaagtcgggcggggtctcgtggggtccccgcccggggcgcctggccctcgacccggccgccgcacccacctcggaagttcttgatgaccagcttcttggagccgcccgcgccccccggcttggcgggcgcggcggccagggccgcgggcttggtgaggccgttggtgcggcccacgagcgccgagaagctgcccttccgcggggcctcgtccgccatggctgggccggaaccgccgcgccccgccccgagcgccgccgcccgccgagctccgctccgcccgccccggtccgcgcggcctccgccccgtcctcctcgcgcgccccgccccgccccgcccgcgtgcccgagcccaaccgccgccgcgcccggctactcctgagggcttaggaacgcgcgccgggaatccctcctgagggatcggactccccctaagagattcggacaccccctcctggctcgagggcgcgcgccgggactcccgtcctgagggatcgggaccctcacccccggctccggggggcgcaccgagaccctgcccccagggctccgggcaccccctcctggctcggggatgcgtgccgcgggcacccctcctgaggggatcgggagccgggacaccctcctgagggccccggggcgcgcgcctcctgagggctcggcacccccaccccgggcgtgagaccacctcgagggctcaggggtgcgcgccgggacgtgccctaactcctgcaggctcgggagcgcgcggcggaggcaccttatgagagctcgggagcgcgcgccatgtccctccccctccccctcctcgggcgcgcgcgccccgaggccctggcccagccaggcgcggagggtcctccgcggcctggttttcacaaggggcagacgaagggtcagcgcagtgaaaggcagtttagccgtggggctgtcctcgccactggaccccaaacccctcagcccgggcgggcccgaacacacaatcagagccgctggcgtcccggctgagaggacggggccccggcagaaagaccccgggccccctcagcccgagcgcgtcgccgagccggtccccaggttctccctccggaaccaacctgcgcacccgcggcggggccgggggcgccaggacccagacggaccgagggccggaagtgacgccagctggcccgcttgaggcgtagggggtggcgctctccgttcggcggcgctcccatggcgcacattaccattaaccagtacctgcagcaggtgggtcctagccggggagcgcgcggcggcgtggttggccctcggcgtgttccgtgtgtcccctcctgccttggaccctcaggccttttcctttcccgcctcgccacccttcttccgttcgggtccccggcgggcagccgcgcgagccgaacagcggcggccgggactcgggaaggcggcccgagttctcccctgcagggccgccgtgggggccgggcggtgtccgtggatcgcggagtcgtcgcggtgtaagtagacgcggcggtcccaggtcgctgccctcacttgctggcacgtgtggccgcgctcccaggcggtccgaagggcctgcgggccacgccgagggcccgctgtgggcggtgctgtgtcggatggacgctgtttcccagcaggatgcgggatgaattcggggactccaggaggcgatggaggagtaagcgcgaggctgtggccgtgctgcaggccgggctcgtgcccctcgtcctcgctgtcgtttaacgcccttcactctccgagcacaatgcacacttcatatcgctcggtacatgcgtctgacagatgttgttcaacagcttgtaagtagcagaagcacagttaaaagatggacacttgtaaagattcaacgcatattctttccactaaactatgcctgtcttcagaaccagcactgtggtaacagggataggaaatatagggaatggatttttaaaatatttgaaggaaacattaccaagacgtggtgaataagaatgggtgggctgagggacacggaggagttaagaatgattcccaggcttgtaatctgggaaaaagatgaatagagtggatttggagggagaaataaagttttgggcatgttgagtttgaggtgtctgttgacaactgggtaaagatacgtacttgatagctgaaaagtctgacatgattgggcccagcagttgcttggttaattgaga

SEQ ID NO: 1801 - DNA, 6000 bp, Homo sapiens
aagactggggatgtgaagaggaaaagcagggatggcaacggacggtacttgcaagccctaaaggtgcgactggcgccgcagtggacacaggacccctagcagcccagccacctggccaactcttaacagctcatgctgcagagccttcagccctcaatgggaccacacaaccagactccaagtgagcaccttctgagcggcacccccaggcctggctcaccaggggatgctccctggctctggccccaggaagacttccttgtggttgctgcatgcccctcacgccctccagtctggtccacaggaggcaccatctactcttggaactcataactcttttaaaaattcaaaatcattacaggtcatgaacctctgaagtcacttctgaatagtcaaactttccaattccataaactcttgaaagacaatatgaagaactactgaagattaaggagtaaagtatctaactcaaagctgattccctaaataaagatgttcactacacctgtaaaaaagagaggtgttcttggcaaaaggaacataatgaagaaaatctttgggacaagaaagatcatggggtgccacaagaagataccactccgcacccagcaggatggccataataaaaagaatggaaaaaaacaagcattgacaagaaagtgaagaaattgcaaccctcatacattgctggtgaaaatgtaaaatgatgcagctagctgctttggcatttctttaacaagttaaacacagaattaccatatgactcagcaattccactcttaggtatatgccaaaaagaatacaaaacctgcgcaagaatgttcacagcagcagcacaacagccaaaaagaggaaacaactgaagtggtccatcaactgatgaatggataaacaaaatactccatacaatggaatatcattagccataaaaaagaacgacacactgacacatgttccaacacagatgaaccctgaaaacatgatgcaagggaaagacacacaaaagccacatactgaaatcaccagagtcagcaaatccatacagacagagagcacattagcggttgacaagcgctcgggagggaggaccagggagtgactgcttaatgcttatgacatttccatttggggtgacaaaaaattctggataatggtgatggttgtgcaatattgtgaatgtacttaattgtgtactttaaaatggttaaatggtatattttaagttatgagtacttcggtggggcaatggtgcattcagcataagtgaaataaaccttcagactggtgatgccaagttaacaggtaaacatggaccagatgatgtgctaaagcatttggaactttccctggaggaaacagagagtcaatgaagttttagtaacagaggcagatgctcaactcttcttcaataaaataccagaactatcatttactaagtaaatgcatttactgtgaattcatggtctttttaattctcacaacttatgtgaagcctgtttagagatggagagtcacagaagttagataacttgtcatggtcccagaattagtaaaaatgccaggatttgggctgaagtcttattgtctttaaagtctatggtctctttgctgtgtctcacttggaaagggcaaagtaaaggaaaccatcaaccagtacctgcagcagggcgtcctggctggggagcatgtggcaacagataaagaagggatggatctgagagacttcggagatacatccaattaggtaaaggactatttgctgagactaaaggaggagtcaatgatttcccccaacttcctagctttgatgaatgtgcaaatgatggttttattcccaaagagatacagtgacattggcacttatgttcctatacaacaaatcaaacatgtgttaccatgtataaccggttgccattctgtatcgaagaggcacctattttcttaaaatattcaagaatctgttaatacataaaacttaggtaacatgccagttcaaccagaaatatttttatccatcagaattaggaggaagcggactttttgctgtctcaccccagtggctacactgccctttgcggagatgtaggcatgcacatctccatagaagtccatcctgggcccagcccctgtctactctctctacttgttccctgggtcaccccttcccttctcagtctttcccatcatgtgactacgaaggagtctcaggtttgtatctttaacccaaatctgtctgtttaaacttcagtttacacacatagagtagaagctcgcttatcagtctcactttaactgacttgaattggaaaaatgactctctccaatccctccctgaaatacacgagctgatgcccaaggtatgatgacgactttcagcaagtaggcttcactctaatacatcgcaagcttttgccagctaagttgtatgtgttctcatatccagatgtgtttgttctcaaatctatttttgctacccgaacctgttatggtagttatgtacttttaagctcatcaatgaaatatgaatgcaaaaggaaacagttgtttctctataagctaagttgtatgtttttaaaaggctcacttgagtttgttaaaaaaataattaggtatgggggaaaaattgtaaaagattaagaaaattctaaagataatcgtatcaaattggttcttaaatgcctatatccttgtttaactttaaataaactgatattggaaaatgttaagtctgctaagattaggccaaaacagacacagcctaaagaaaaggccctgggcttacatcaaaagattggcaagtatagaacttgaggtaagtggtgtaaaaaaaaaattggcaagtgaatgtatactttcatgttttaagttaaaaacatacatccatttcttcgtgattcctgttttaaccagttttctcaattaaccaagcaactgctgggcccaatcatgtcagacttttcagctatcaagtacgtatctttacccagttgtcaacagacacctcaaactcaacatgcccaaaactttatttctccctccaaatccactctattcatctttttcccagattacaagcctgggaatcattcttaactcctccgtgtccctcagcccacccattcttattcaccacgtcttggtaatgtttccttcaaatattttaaaaatccattccctatatttcctatccctgttaccacagtgctggttctgaagacaggcatagtttagtggaaagaatatgcgttgaatctttacaagtgtccatcttttaactgtgcttctgctacttacaagctgttgaacaacatctgtcagacgcatgtaccgagcgatatgaagtgtgcattgtgctcggagagtgaagggcgttaaacgacagcgaggacgaggggcacgagcccggcctgcagcacggccacagcctcgcgcttactcctccatcgcctcctggagtccccgaattcatcccgcatcctgctgggaaacagcgtccatccgacacagcaccgcccacagcgggccctcggcgtggcccgcaggcccttcggaccgcctgggagcgcggccacacgtgccagcaagtgagggcagcgacctgggaccgccgcgtctacttacaccgcgacgactccgcgatccacggacaccgcccggcccccacggcggccctgcaggggagaactcgggccgccttcccgagtcccggccgccgctgttcggctcgcgcggctgcccgccggggacccgaacggaagaagggtggcgaggcgggaaaggaaaaggcctgagggtccaaggcaggaggggacacacggaacacgccgagggccaaccacgccgccgcgcgctccccggctaggacccacctgctgcaggtactggttaatggtaatgtgcgccatgggagcgccgccgaacggagagcgccaccccctacgcctcaagcgggccagctggcgtcacttccggccctcggtccgtctgggtcctggcgcccccggccccgccgcgggtgcgcaggttggttccggagggagaacctggggaccggctcggcgacgcgctcgggctgagggggcccggggtctttctgccggggccccgtcctctcagccgggacgccagcggctctgattgtgtgttcgggcccgcccgggctgaggggtttggggtccagtggcgaggacagccccacggctaaactgcctttcactgcgctgacccttcgtctgccccttgtgaaaaccaggccgcggaggaccctccgcgcctggctgggccagggcctcggggcgcgcgcgcccgaggagggggagggggagggacatggcgcgcgctcccgagctctcataaggtgcctccgccgcgcgctcccgagcctgcaggagttagggcacgtcccggcgcgcacccctgagccctcgaggtggtctcacgcccggggtgggggtgccgagccctcaggaggcgcgcgccccggggccctcaggagggtgtcccggctcccgatcccctcaggaggggtgcccgcggcacgcatccccgagccaggagggggtgcccggagccctgggggcagggtctcggtgcgccccccggagccgggggtgagggtcccgatccctcaggacgggagtcccggcgcgcgccctcgagccaggagggggtgtccgaatctcttagggggagtccgatccctcaggagggattcccggcgcgcgttcctaagccctcaggagtagccgggcgcggcggcggttgggctcgggcacgcgggcggggcggggcggggcgcgcgaggaggacggggcggaggccgcgcggaccggggcgggcggagcggagctcggcgggcggcggcgctcggggcggggcgcggcggttccggcccagccatggcggacgaggccccgcggaagggcagcttctcggcgctcgtgggccgcaccaacggcctcaccaagcccgcggccctggccgccgcgcccgccaagccggggggcgcgggcggctccaagaagctggtcatcaagaacttccgaggtgggtgcggcggccgggtcgagggccaggcgccccgggcggggaccccacgagaccccgcccgacttggggggaaggccccgagatccgtgcgggccccgggagcgggggcgccggggcgccggccgggtcgggggtggctacgcggggcgcttcgcggcgcgccctgagccgcccgctctccctccgccctgcagacagacctcggctgcccgacaactacacgcaggacacgtggcggaagctgcacgaggcggtgcgggccgtgcagagcagcacctccatcaggtacaacctcgaggagctctaccaggtgaggcggcggccggggctggggacgccgctcctgccccgcgtgacgcagacgcggccgggcggccgctccgggtgcctcgcaggctctcgccggggagcggaaaggcagggcgtttgcctccactgcagggccgggagccccagaggcaacaagtggttttgtttattgccgtggtggaatttttgttttcaggcttaagctgcttagaaccatatttaaagttatcccattacggaagagaaggaggtgtgtttctaggagccacgtgactcatattttgcaagtatacggcaaattattttctcgttatatgtaaaactcatgactgtgtcacttgccacagtaataagagggtcttttctctgttgtgttttgtgattaatggttgcctttaagatattcaaacagattttgaaaaaattcaaaattcagaaaaagtggttttgttctctgttgtgttttgtgattagtggttgcctttaaggtattcaaacagatttggtagcatttaattcaaagtgatggtgttccgtttctgaagtaacaaaaaagtacattttaccatacttggatattttatttataagcgactttttttctggtgtcttctttttgtaaagtaacattcattcagtagt

SEQ ID NO: 1802 - DNA, 6000 bp, Homo sapiens
ccagctggtctcgaaaagagaccttgtctctcaaagtgctgagattacaggcgtgagccactgcacccggcctgctgcgtcgtttctgagctagcaccttgattagcactgatcctgcagtggcctgctttcagctcatgctggccttggtttgtttgcatcaggacccttggttcttcatcttctgactgatgtcctatctcagatgtctttctccaaccgatcctcctcacctctctgaaacatgagtctcttcatcaatcggaagaaactgccaattgtctcccaatatctgttctccacgttattcttttgtagatctttaaatgcttaggcagtcatatggcccagggtaatgactctatttccagcatcttctaggtcaatgtggccatgagctaagttctggataatgggacaaactgctaagagcattttccaaaactgatctgtttctgtttgtgcacacacacacacacacactcagacacacctgtgtactcagctggtcatagtctctctcaattgtcaccttctccatgaagtgttgccaactgtgtgcacggagaaatcattgttctgtgcttccataccccccttcccaatcgtgaatatgagcttgtcccaccaggtcacatccattataattgcaggtgcatctgtctctccagtttgactctgggcagtctcttattaatctgcgtaatatcagcacccagagttgtgtctggcacttagtaggagctcagaaatgcttgcggagggaggaatgcagggaaggcaagggtttcgaaactgtggtttcgtcttcttattaacaaactatatttttatccacgtatttctcagttaaaggaacgtgcccatcacagaggctaagatcacttatccacagtgatgtggtgccccatcatctcagcattggtgtcagtggatgctaagatccttctgtgaatccgtaagaggagtgggcaggcagcacaaaaatgcccaaaggcactcaattgcatgtgaggccacatttctcaaacaaaattactctgtaggctcctggtgctggcttcaccttgggctgaggacaaatgggtgctatggggaaaggagatgacgccaggagaacacagatctttcaacctgaaatcatgggactccacaggacatcacctgacatcatcttagccagagcgaagcaagccgcagggcaggcacacttcaggagaatctcggagtcaatggccaaggtaccaaggggtctctcatcacaaaagccagaaaagaatccagatcaaagcaagggaacatgtctaaggagtaggcaaaattggttgattcgggtaaattcaacttttataaatctggtgatatgatcctctagaatttgtcagatccaaggggtgattttgaaagaactgtggtttcagactataaatgaatgcgacagtctttaagacagaaataatattatagcatgctaatgtggcaggatcacaactgactttccttccaagagggagaacttgggatttgaccgggaattttaaaaaggagcaataacgcagtaggagagagacaaaaaatgtctttgtgtctgggggtggtggggggacttaggagtgttgatctgtgagagcaaaggagagccacacgggacagacctggaggttgggaaagcgcacagattttcctgtgttttatgatacactcaaatacacagagcaaagttttctagagatgcctttattgacattttactaaagatcaagaaaatgccatttacgcatatccaggaatattattttttaactttccccataaattccatgagtccctgcctcctgcttgtcctcccactgaaggcctcttgccatagtgatggaagaaggcagaaaataggagatggttggagaaaagaccaatgtcatcgaggagggaaacaaaagacaatctggatatgtaatcagcagatttagaattaaaacagggttagaaaattctctctctctgaaagagaggacagtttaatgggggtgtggaattggtggggagagtttgcaccatgcctggagactctggagcagacacacacacagcttttgcgagatgaagacttttcctgggaaggacacgttcacttctagtaaaacacagcacaggccatttccatgtaatatttgggacggtagctgaatctggtgcccacatgcacaaaacaagacagtatctggccccaaccatagggctgaacccagcctctggcatgtggtgcaagtcaacacctgaacgagtgcatcattcaaagaaccctatctcctaaacagcccaggctccagagatacagggaggccaaaggcttagataaattccgagggttatgggcttatttaggaagtttgcatttcagcaacccaatcgagagactgcaaggcaaggcagtggctaaaaatatttggatcatcaaccaaaattttagagggaattctgttaacttttgttaagagaaacgagggctttctgtggaacatgtggctatggagaggaaaaagggagtaactttttgcccttttcctaagccacacagagcaccgtgagcattcattgccgcagtgcctcgtgcgcgttcggagtatctcagtacagtgatttttgtgcagaaacttctttgaataatattagttatcagccatataaacattgttgaattatcagaatcctgaatttgtggggaagacgtttaagaccccaattttggaccctacgtgtgtatcctcctaactggagcccccaggtctcagggagaagtccccagaggctgggagggtgtcactgttgccatcagggctcaaatactgacatttaggaacacataaagaatccctgtgaaacagaaggaacggacctaggaagatagggccatttgaggaacatcagtgttctctaagtatctatttgtgtgaaccagctcgcagaaagtgagcgtttctggtagtcttcaaagaagaaacgggtgctaacttgtaagcagtttaagccaagtgaccagagctttagggggtgcggcgttgcctgaggggcaggagtggccaaaatcagcataaaacgtgcaaagtgggctgtcatgtaataatacaccgcacaggcagagaggcctttggtcagctcctcaagtcctctgtagatgttccttaccctcggcgcgcaccagcctctgccgcctgctgtggccctgaacttcggactcttctctggcctagcccgcccttggctggggtgctcgggcctggccctagcggcggggccctccagggtggattaagtctccaagactccgggaccaccaggctcaccatgcaatgaaactgtttctggagttttcctgtccctgctttccctcccgagtcccgggccaggctgcgtccggtgggcaccgaggacgcccagaattgttgggaatctgggcggaggcccgtcgtgggcttggaggccaccgggtccagcagaggcagaggcctctgtgccacgcacgcacacacacctgctctcctccgtgtgtccacatacacacgtctatgcacacacctgctctccatacatgcacagccccacacacagtcggccctttatgtgcacacacactcgtgcacacaagcggccccctctcctccgtgcatacaggcgcacacacagctggctctcctctttgagcacacacactcaagcacacacccggccccgctcttccaagtgcacacacactcctgcacacactagtccctgctcccccccccacactcgcgcacacagccggcactctctgctccctgcacacaaacacacatcctgacatacccggccccctacctgctgccccatgtgcacacacactagtgcacacaccagtccccgctccctcacatgcacacacactagtgcacacaccagtccccgctccctcacatgcacacacactagtgcacacaccagtccccgctccctcacatgcacacacacgagtgcacacaccagtccccgctccctcacatgcacacactagtgcacacaccagtccccgctccctcacatgcacacactagtgcacacaccagtccccgctccctcacatgcacacactagtgcacacaccagtccccgctccctcacatgcacacacacgagtgcacacaccagtccccgctccctcacatgcacacacacgagtgcacacaccagtccccgctccctcacatgcacacacacgagtgcacacaccagtccccgctccctcacatgcacacacacgagtgcacacaccagtccccgctccctcacatgcacacacacgagtgcacacaccagtccccgctccctcacatgcacacacactagtgcacacaccagtccccgctccctcacgtgcacatgcactagtgcacacactagtccctgctcccccacgtgcacacacactcttgcacacagccggccccgctcccccacgtgcacacaccagctcccgctcccccacatgcacacacactcgtgcacatagccggccccgctcccccatgtgcacacacactcttgcacacagccggccacctctctctccggacacacacagtcagaggcgcgcacaaacacagtcccttggccgccgagcgcacgccgcgcgcgcgcactgcccgtcccggcgcaggccccagctacatctccgcacgcgcacgcgcacacacggacacgcgcgcacagcccctccccgctctcccagggcgcgcagcactggcgggaggagcgggagaccgaggagcagcagaagaggaggaggagggcgccgaaggcgcgaaaaggcgcgcaggcgcgctgcgcggagcgggcccgccgccgcccacgtcaccgcgccgcgcgcacgtcacgccggcccgacgctcggccagggtgagccccgcgtcccggcgccactcggcccagggcagggaccccgccacggccgggaccgcccggcccggccccagcccgcgcctctccgcgccgccccgcgctccgcaccgcgccctctccgcgtccccgcccgcgcggccggaccgggcagccaggtgcgggtgggcaggggatgccgcgggagccgcgggcgggagccgggggtgcgggcgggacccccggccaccccatcccttgccccggccgcgtgtaggcgccgcgcggccccgacccgcgccctcccgcgccctgcgcgctcctgtgcctcggggaccccgcgcgctcggcgctggtaggggctccccaggtgaccgcggggcgggggtcccgggcccggccctcccggccgacagcagcgtccgcgccccacgctggaggtggggccggggccggggccggggctggggccagggtcggccggagcgcgcagggcgggggaggggaggccgccccacggcggcccgcggggacccggttccggcgcgcgcgggaggcgcctcgtgcggaggcggcccgaggcctagtgacaggcgcgcggcgcggaccccggaagcccacctgtcagagttaccggtcagccgggcgggcgccgccggggtctggggtggacgccgcgagcctgcacgttgcgccgggaccccggggctgtgcccaggtgggtggtggggcacccccctgcagcggcgggagggaggcgctgcgccctggctcctggggctcggccccaccctcggccgctgggcgggccgtcggggacctgggggtagtggtggtgaccctgcgggcccgcgggccacttttccgcagggggcatttccgtctggcgaggcgactgaaaatcctgagtgtgggagtcggtttggccagctccgctctcaggatggagggtgcctttgggaaggaaggtccgcgtttcctttgagatgtgttattttttaaacttcgtttttcattcttacttatttcttgtttttccttacttttttttttttttttaccagaaaaatcatttttcttctctgggaa

SEQ ID NO: 1803 - DNA, 6000 bp, Homo sapiens
aggatatcaaggtgtcagcagcgctgtgctcctggagcatctaggtgagaatcccgtccctggcctttcccagcttcaggaggccacctgcactcccagctcactgttcttccttctttccttcctccatcttcaaagccagcggcgtagcgtcttccagtctctttgactctgaccccccggcctccctctttcacttgtaagaactcttgtgattacatcatacccacccacataacccatcttaacttaatcaccccttgcaaagtccattttgtcgtgtgaggtaatacacaatatttatgagccctatcagtttaaccaattagtaagtgtggtagaggaaatacaacgatggaaggtttaacctgaggaaagaaaaatagctcagagcagtctgaactatttgaaggatgcaaaatgtatcaggacatgagtgtgggactaacttcagtcactctgctccccatgccacaggggcaattgtttaaggcattttgttcctgactgctgtgtcacccattattttcatgtttctggagtctgtgagacaaagaaaaatgtatagtcaatcaatagcttacgttgttttaatgtaaatttttgataaacaactcaggaactgccctttctttcctccttaaaccccccgcccccaaccaggtacctgctgctggttgggtgcatactcagggaaattcaaatctgtgctcccaggtggtcatcctcagggcttgtgctcaaataaactccatgctaactcgtattttctgaatctttctatctaaggttgacaaacctaaggggcatcattctaaaatcagtaaacatgattttgctgtaggctattacaggtatagaagggaagaaaagcacaagaaatctaaccaaatatagagactccaggtcattctattagaatgtgatgtggtttggatctgtgtccccaccaaagctcatgtggaattataatccctgctgctggaggtggggctggtgggaggtggttggatcgtgggggtggagtgcccattgctgctggcggtggggctggtgggaggtggttggatcgtgtgggtggagtgcccattgctgctggaggtggggctggtgggaggtggttggatcgtgcgggtggagtgcccattgctgctggcggtggggctggtgggaggtggttggatcgtgggggtggagtgcccattgctgctggaggtggggctggtgggaggtggttggatcgtgggggtggagtgcccattgctgctggaggtggggctggtgggaggtggttggatcgtgggggtggagtgcccattgctgctggcggtggggctggtgggaggtggttggatcgtgcgggtggagtgcccattgctgctggaggtggggctggtgggaggtggttggatcgtgcgggtggagtgctcgtgaagggtttagcaccatcctctacttgggactgtatagtgagtgagttcttgtgaggcctggttgttgaaaagtgtgtggcacctgccccctctctccctttctcttgttctggccaggtaagttgtgtctgcttccccttcgcctttcgccatgattgtaagtttcctgagacctgcacagaagcagaagcagctatgcttcctgtacagcctgcagaacagtaaaccaattaaacctcttttcttataaattacccagtctcaggtgtttctttttatcttttttttttttgagacggagtttcactcttgttgcccaggctggagtgcagtggtgcaatcttggctcactgcaacctccgcctctggggttcaagtgactctcctgcctcagcctcccgagtagctgggactacgggcatctgccaccatacccggctaattttttgtagttttagtagagatggggtttcagtatgttgcccaggctggtcttgatctcctgacctcacatgatccagctgcctcggactcccaaagtgctgggattaaaggaatgagccaccgggcctggcctcaggtgtttctttacaggaatgtgagaacaggctaatacagaaaattggtactgaaaagtggggcattcgtatgaagatacctgaaaatgcggaaataactttggaactgggtaatgggcagaggttggaaaaatgtggggggctcagaagaagacaagaagatgggggaaaatttggaacttcctagagacttttaaattgttgtgacccaaatgctgatagtgatatggagagatgggcaggctgataaggtctcagatagagatgagaaacttactaggaactgaagcaaaggtcacttttgctgtgcattagcaaagaacctggcagcattgtgcccctgctctagggatctctggaactttgaacttgagagtgatgagttagggtatctggcagaggactcctgaaagtgatttctgttaaatctcgccctggcaatattaattacaaatttaccttccaggtacaaaacaaggacaagatgagattagtcactcttctgcctaccctgatatgggctacataactctttcctctactccctcttgtcagatgtttgcctcatcttatgtaaattgttggtttactgagcactaatcagagcatcactgtggacccctccctttttttcctcctgcttgccgtctcctcctaaacacccagtccccataaccctatttggatggcacagttgatgcttctgtggcttgcgtttttcccgggcccatcatcagacttctactgatggagacatttgcctcagtcactcatttttggttaactaggaatctcattaaatggatagaagtcgttgaaaatatggcttaaaacacacctcaccacatgcctgccccaagttaatgagcagagttgattactgcctgcttgcagaagtgggaaaggaggaggaaaaggaaatatacagggggacaaatttttaaacacaacttcaaaatattacccagtcatatatgtatacacacacatagaaaattacacggcagattacttacagtagcgtgagagaatttttgagtgggtgggattctttacagcaagtttttttttttttgcttctttgaattttttttactcttttaggtttttatatttataaaagttatatttactttttaaaagtgtcaaccttaatattgagattcagaaatatgattacatatagtgtgtatttgagcacagagcctgagaatggccacctggacaaatggggtcagcctttccaagtggagctcaggtctctcttaccaggcggagacagaagctccagcaggatcaccacagttctcatatgagaccaggggcacacgccgcagcggttccattggttagggatctctgtatttgaaggaagattgcgttataactccatgaggaggggtagtgatctgagggggtcttatctccggtgccatttggtctttattgtttacagggaaaaaggcagaagttacagctgggtgtggcatgacctaggccgcgtagccacattcccctcaaggctcaggtaattcaaagttccaacagcttcaagtttaaattattttaagtttgaatgatttaatttcacaaaaggtaatatatgcacattgactgaaattcaaaagcacaaaaagatatccaaggaagtacctctcccacttctaccatctctcatcttccagcactccttccagaggccttgcgctatgccggttttctcatttttccttcctgggacagtttagggatttttctacctatcattaaattcgtattttactcaaatgcaggcatacgataaacacgatcctatacttgctttttcccacatactatatcttgaagatcgttcaatgtccatgcaaagctgactgttcttttgaacagccagcgagtattccattacgtgagcgtatcatgacctatttactcagttccatacttcatgggtgtttaaattgtctgcaatcttttgctattacaaacgaaaccacaggtcattttgcacacatgcaaaaatgcaaatccatggtatatttcccaaaataaaaatcattaggtttaacagcacgaacacctttaaatttggaagatattccaattcgttcatcctagagagtataccaataccactcacaaaacttgagggtgcctgcttcccgacattcctgctagcagtgtcatcaacctttgtgatctttgttaacatatgaaaagtggtactctaattttaatttttattatgaattaagttggactttctttcgtatgttaaagtctatttgcatttctttccctgtgaactgttttttgcctgtctttctcctgagccattggtctcttcccactgacttattacatatatgtaaagggaatattggctctacattataaggaaattcgaattttgtgataggtttcaaatttttccctaggttgtctttgacttcatttgctgtttgtgcacacaattttttttttttgtaatgagagtgcgttgctcttatttttaaaatgttgactacattctggggaaagaaggctcagcagccacctgcttttttgcccgggtgggtggtccggccccgagccctcctgactctctcgccaatgcccagaggcgccgcagcgattccagggaggccgcgctctcgccccaaggcaaccagaagcccacgtgccaggagaggcatcggaaccaacaactcgggtccgttttcccgcgccagatgggattcgtttgctgtggacttccggggcggggcctgcctggagcggaagagcctgggcagtgcacggggcctgggtggggggtgcgggtgtgggtggggacctgcggccttcgagtccgcggccttcgagtcctggggcggcggcggcggctgcaggcacgggcacgggcacggggcggggtgcttagggtgcaggaggcgcgcgcctagcggcggagtgtggcgtgaggccgggcccgcgccgccatgaacctagagcggctgcggaagcgcgtccggcagtacctcgaccaggtgggcggccccgactcggggtgcggggcccaggcctcgccgggtctttttccgcgcggcgtggggctggggtgactgttgtcggggctcttggtggggaaggactgggccggccctgggccttcatctggggccagcagcgctgtctccgcctcgcccagaagggagcggtccctgcagctgggaggggcacagcccggggagtggaggcccccgagcgcacggggcgcctcagtcgggtctgagcctcgttctgcacctggcgcggaggaggtgcccaggaaacactgactactcagtgcaagttgaaggacaatttttggaggaaagttgcagggctagctaataaaacatttttgagaggtttagttgtaatttttactgggctgaatttaagtgaataaagatgtgaagaagcctgttgtctcaaatcaatactttaaaaattctcgttaactatgtctgtgttctctgcactacctttgaatagcagagagcgtttaaggcaagaagtgtcttcgagaatcagcagcatcagttttatctatattgttgtttattttttgttgaaatgcttgctctttcaggaaattggaaagaaagggaaagaaaagccatggtaatgcagagttttcggaattgggtgctaactgacgtggccaaatgtttgcagtccatttggagggctgtgtttttatttaccatgagtcagttgaattcagtgttttctgatcactttttcttcggtacggagacgtagtgaggaatatgacaggcccggtttccagccagagacaccggtattgagcatatttataactatcccgttggcattcctcctgcctcgggctagcagcagtggtcctggcttgtctccaggggaactgaggcagagactgtagaagactgaggactgaggagcagaacagggtctaaagctagccgtaggtcactgtgggt

SEQ ID NO: 1804 - DNA, 6000 bp, Homo sapiens
cccacctactcgggaggctgcagcaggaggatcagttgagctcgggagcctgaggctacagtaagccatgttggcaccactgcactccagcctcggcaacagagtaggacgctctcttgaaaaaaaaaaaaattatttctagagtataagctccctgaggacaaagtctgtgtctcatacatcattatacacccaggatctagcacaaaatcgcactcaaatatcaccaaataatcatgctggaatcaataaaactcacaggccatacgcagggggaaggttcaatgacctctatagtactagcgatggggaggatagtgttaactttaatgtggcaaggaataaagaatgagcaagtgtgttttgtcaagggaaagaggcaggcacttgagattaactgaatggatgtattgaatttgaggtagaaaaactaaacggaagttagaaatacaagggacatctggacgccaaaaatctagtagtggttaagaacatggcctctacaggcagtctaagtttaaatcccagttctactgcctcctagttgcatagattacttaacctttgggcctcgatatgccagtgtcagaaaaaataaaaaaaagacaccaattatacctgtatcaacctcactgagttgttttgagaattaaatgaatactgaatgaattaaatgaatactgaaatactgaagcactgaaataacaattaggaaagagtaaataaatgctaggtattattaagatggtacatggtagctaaaaatctgattctgaatatacagtgagaacataaaatagaaccagaaccccacataataacaactgggaacaaaagaaagaaaacatatgaagaaaagtgataagtggatgacaggaaaaacagagcggaagcaaaagaaaacagttttgaaggatttgttaacaacagagtgttggttaagtacatacggtttataaggccaaaggatttggcaatttgaaggtcaatcatgaacagaaaacatagtgttctacgaagtgtttagaagggaggagagaagaaagcgaaaaggcagactacagagtggggttaatgggtagtggaggagcataaagagaattctagatcagtggtccctaaacttcatttcaagggcttcaaaaagaaacagggaatctgacacaaggtagtggactcccttaatactatcaataaaatttttttaactattatcaccatcatctgaaaaaggaaatgcctaacagtaaaaatgtatgaaggctaaaaatcccagaacaaagggaacacctttatgaaaaatcactgtcggccgggcgcggtggttcacgcctgtaatcccagcactttgggaggccaaggtgtgcagatcacgaggtcaggagatcaagaccatcctggctaacacggtgaaaccccatttctactaaaaatacaaaaaaattagctgggcgtggtggcaggcacctgtagtcccagctactggggaggctgaggcaggagaatgccgtgaacctgggaggcagagcttgcagtgagccaagatggtgccactgcactccagcctgggcgacagtagagcgagactccatctcaaaaaaaaaaaaaaagaacataaactctttgactacattttcttgtattagctatgtcatatttttacacttggcaaacaagcattttgtatatacccaaaatccacttactacatacaaactataaagaaaaatataaggacacattagcaatatatataaactatgccttgcagcagcatcacaggcgctcaataaaactttattgaaatgtactcaagtggtgtgggccacgcaatactagatgaagaattacaagtcagattccactctataaaaaagagctaagacagtataacataatggttacaagagtggtaacatgactacaggctttggaatcagacagacttgggttcaaatctcagctgcaatactttatggctaggtgaccttggcaaaatgatttaacctacctaaatttgtctcctcacctgtaaaacaggaatactcacctcatgaggttatagtgctgattaaatggcagtttctaacttttagaagtcgtaacatgatagatgttgctgcttaaagatccttaagttagtaggagatattttgcttagacttacttgatttcttcatttttaaggggggaatctcctgaattttccattttcagggttttcaaaagctggtctggaatagtaatttgcaaatcctagtgtcttttccatgacaagattttaatgaatctactatgaaattacaaaaaagaaaagtgtagtgtagtaatttttctctttaacaggcactactgtgaagaaagaatcacttgtagaactctaaaaaatatgcaggcctcttatcctctggagatctggattgatctagggcttgaagaaaatggactgtctgtggaattttggtaattcatgttatataaaagttaagaaaccactgtcctatgaccttactaacaatgctttacctgagtctaaggtaaggaagaatcagagacagaagagctttaagatgtgatcctttagtttggttccaagtttctaagacagacctttactctaaattctttttacagagaacagaatcatactgtaaagttccttttaatatctttcccaaagccagggaaaatattattccccattaaaattttacatcaatatggggtattccttaagctcttcacgttctctattgaaactattcaataattaacactttaaaaatctgtgtacatgacagtgcactggagactgtacataataatatgtaagttgtcttatttctagattgtctttcttaaaaataggtttaagtttacagtaaaaatccactgatgcttcactacaccctcccacaaatatgtattcaacacatacattttaaaatacgcatctcacaagcaatctcagtagactgaaggcacctaaagcaaactagaaaccttattaagttaacccaataaaacattttaaatatataactcaaaaaaaaaaaaaccaacgccatcatgaacattttattccaaaagaatcagtatgaaataaaaaagagtctagaaacactgtaggacttcttcaaaacaaggaaacaaacaaaaacttaggatggctaataacagtactgtaccaatagaattgaaagcaagcaagcaagcaaaaggaatctaccttaaaacactgctgctgctgttaaggagacctagaagggaaagcaaatgctagagcaggcaataaaggcttctttaatatatagtataggttttactaatttgggcacaagatatctttcttctcagctgcttacattagtgaagtttatgggtgaaaaatgcaattgctaacttgaagagtgttgaaatccaaacttgcatacaacagtacaaaggtctaagaaaccatagcagggactggtgaagtattatttagtgagcttaggccttactgcatttgtcaatccaaattttaaaaacaaatgccttacttactttactcacacagaaaattaagtttgcagtatgtagtagaaagctgtataccaacagaattctataaattttaagtatgttaaagcagactgtacacaacttaaaccagttttgacttcagcttttttaaagttatgtaattttaaagcccaatattatatcaaaacacaattgtaaagcactgaaatgactaacaagtgttacttttttttaagacttcatacagtgtcaaaatacccaagtattttttacttttgaaaagtttaacttcacccactttgtggagtcatataaaagtttactagttcagaaccaaactaaagagatgcatatttgaggacaccctttctagttaatccaatcctcctcctttcagcactacatttgcctaacgattcaccataggcatatgacatatatgacagcaaatactgcttaccccctaaatacacaacagtctgaagaacaggtgcaatactatttagacacacgctttttccttctaagcctaaatttgccctggaaaggtatttaaaaataaacacaaatacccaagaaagttaaataaccctttcaaaaagatgcagcaattttgagatccaggacatgagctgttaactaccaacagcttccaaatgtgcagcctatcaaaggttcacattatgaggatcgagtcaagctcaactatgaagggttccgagaacatctcactttgcttctcctgcaagagtaagtaacatgatataactacgtttcacttcaagggaatattaaatctcttcagtcgtttcataaatacagcatcgatcgtctggtttggtttttttatagataaagaaacggatgggggaaaggagatctagtggagagtactgtaaaaagaaaaattcagtgctgaaagcgttgatgagtcactaagtaaggaataactacagagaatccaagtgagtaaggcagcatctcaggtgagaaagtacttaaagttgacgatgggaaataaaacttcacaggtcagtcccaagtcactgtgcaccctagcagcccaggaaagaagcgtggctgtcaaggggcaagcgcgtaccaagtctgagggagggggccagatacgccaaatcggaaaggggggtggtccggaaaaggggggtaagatgcctatcctagtccctctcttcgggctcttcatctcaagaggaacaaacaagagcaaactcagtgttgagaggccccaaaccggactctcccacagagaggtgctcggtcccaagccccggaggcccgggaaggccgcctccggaggagcccccgcagacgccatactaaaagccaaaatggctgccccgaggaggcccgcaccgcgtagccagtgaaggttggggagcaagcttatgcgggaaagagggagggggactccaggaaaagccgttgagaggaccatcacaacctgagcagcacaggtaggttccgctcggcctcccaaggcgccggctccggctgagtggagtccccagccccaccccccggccgggaacccagccgccgcagctcccgcacaccgaccccaacgaggtacctgcagttcggcccgttccacctcccagtgcgcccgctccatctcgaaccgagcccactcgtgctggatgtagtgcagtatccccgggatagtgtactgctgcggccgggacagctcggggcctgccgcgggacccgctccctcggaggccggaggacccccgccgcccgccgctccgttccccccgggcgaaaggcccaggttccccccaggtccctgctgctgccggggaggggccgccatccccgggccgccaccaccgcctccggcaagctcgtccattgtgtgtggggccccggccggggcgcagggcgagacgccgacagctgggggaagggccggagagggtggccccgcgctggctgcggggcggaggccggccgggagaggggcggggaaggggtcgttgctgtgtgcctgccgtgggtcagagcagggagctgccggctgccgccattacaatccctcctccatctgcccgtctcactcactcactttaggggaagggggggcctcggcgggaggggtggggggagagttgggaaggggataggcggagggccgtcactagcgcacagcatgctgggtagcgaacgcagcctcacgcttaatcgccaaatagagtccggcctcaccctacgccggcgcactgagaacgcagcccgggtcgccgttagagggcggggaaagagctcgggctccgcccctaggcccgccctcagacccgatccggtgtctggccgcagctaccggacacctgggctccgactctgacttttggaagcgaggcggccttaggcttcctggttatcagtttccttttagcaggccgtccccgggcgctgtttccttcccaggggtctctcacccgtgtcccggctttc

SEQ ID NO: 1805 - DNA, 6000 bp, Homo sapiens
actgctgtattagtccgttttcatactgctacaaagaactttcctgagactgggtaatttataaaggaaagaggtttaatggactcacagttctgcatggctggggaggcctcaggaaaattacaatcatggcagaaggggaagcaagtacatcttacatgaagggcaggagagacaggagaaattgaagggagaagagccctttataaaaccatcagatctcctgagaactcactatcacgagaacagcatgggggaaaccgtccccatgatccaataacctccctcccttgacacgtggggattacaattggagatgagatttgggtcggaacacagagccaaaccatatcaattgcattactgatatttataaaaccatgattaaaatgaacgtagtcacattccgttggaattctttaaataggcagcacacttgaagtttcaagaaaggtagtttcaagacggatcaggacaaaatattgaggaagccagagtggttggtgctaagtatttgcctaaaattagactagaaactctgtgaaggcagagattacgtgtctgggtcacagtggatcagcagggagcagtagagcacctgaaaaatcgtagccaatcagtacttcttaaaaaataaaaaaaacgggctgggctcagtggcttatgcctgtaatcttaccactttgggacgccaaggaaggaggactgcttgaggccaggagttagagatcaaccctggcaatacagtgagactcccatctctacaaaaaattaaaaacaaaaaatagcctggagtgatgttgtgtacaggtagtcttagctactcaggaggttgagctgggaggatagattgagcccaggagtttaagatcagcctgggcaacatagtgagattccctctgtacaaaaaatagaaaggaataaagcaaaaattgagtactcactatgtgtaagtattgcttttggagtgtttagtatcagtgttactgatcagtacacagatggtgtaaatatagtgtaaaaactattagataaggccctgtgcagtggctcacacctgtaaccccagcactttgctaggagttcaagaccagcctgtgcaacatggcgaaaacccatctctacaaaaaatacaaaaatatttgctgggcatggtggcacatgcctgtggtcccatcccagctacttaggaggctgaggtgggaggatcgcttgagctggggaggctgaagctggagtgagccaagattgtgccactgcactccagcctgggtgacagagtgagatccagtctcaaaaaagaaaaaaaaaaagattaaagaaaaaaagagataagcatgggagggaggctactacaatagaatagtgagtcaaaagaattcagggatatggaggcttcttggacaaaataatgcttgagctgagtattttcttttttttttttgtgggggaagggttttgtttgtcttaagacagggttttgctctgttgcccagactggagtgcagtggcataatgatgcaattatggctcactgcagcctggacctcctgggctcaggtgatcctcccatctcagcctccagagtagctgggactacagactcacgtggccactctggctaatttttgtatttttggtagggacagggttttgccatgttgcccaggttggtctcgaattcctaggcttaagccatcctctcacctctgtctccgaaagtgttgggattacaggcatgagccactgtgcctgatctgagctgagttttgaagataggcaatggggcacagcatgtgttaaattactgtggaatgaaatagcattatacatttgaggaaccaaaaacagtggcagtttggctgaagagaagaatgaggtggcatgatagtgttatggtagattagactgtaggatggatctagatcaatttatatgcttatgttaaaatttgggctttatactaaatttagaaatcactaaactatgttaaacagaggaatgacagaatcatacctttgttttaggaagatcaatcaggcagcagtgatagtgcaaagtgggggtagaatggaggtgggaaggtttaaactaaagtataaagagagacaatagaatccacaggaaagatattactgagaatgaaattggtttgtgggggctgactgaaaggtagtagaatgactgctaggcttcaagtttggatgtagtgtcacttaataaggtagataatagaagtagagattttgtttttgttttgagggtaggtgaggagacaaaaaggataagaaatccagtctttccttaagctcaagttaccagttataagtgtgcatgttagtcttcttttgatgctatcatcaggtcaaccattctcacaaatggtttttgttgttgttgttgtttttgggatggaatctcactctctctttcacccaggctacagtgtagtggcatgatgtcggctcactgccccctctgcctccagagaagctgggattacaggcaagcgccaccacgcccagctaatttttgtactttttggtagagacggggttttgccatgttggccaggctggtctccaactcctgagctcaagtgatctgcccgcttcggcctcccaaagtgctgggattataggtgtgagccaccgcacctggccacaaatgtctctgtgtgtgtgtgtgtgtgtgtgtatgtgtgtgtatgtctttgaggcagcataatttttctgagctttttatgtgctatgacgccccctaaaaaggaattggatgaataaacaggttgtatgttggtaactctaagataaatagtactttaataatttgaagaaatatgtaatcttaacactttgtgaagccaaggtgggtggaccacttgagccaggagttggagactagcctgggcatcatgacaaaaccccgtctctacaaaaaatacaaaaattagctgggcttggtggatgcacacctggagtcccagctatcaggaggctaaagtgggaggaccacctcagccagggagctccaggttgcaacaagcagagctcacaccactgcattccagcccaggcaacagagtgagaccctgtctcaaaaaaaaaaaataaataaaataataatttgaagaaatggtccttaacattatagtactgcaatctaagatctcatttcatatagaaataaaacatggcagcatgagtaacaggtccaatctgctttccattaaactgtaataacagtaaagcagatgtgataaaataagatgcattacttaatctcttttgaaattacttcctgattggttggtagtgcatactccatagtacaagttttattggcttttgcagtaaagaaaaaaaattttaaaaagtaacaaattttcaatgcaattttcctgcatcgctattaatataattactgaacctaatttccttatgttgttaattatttttgtcttatttttcaaacaaatgcttcttagctatattaatttttagaaacacactagtgcattaggatattttctaggaaactaagcacataaaagtacccactattgtacttaaaatattagccttgtctcttatgtatatgttacattcctcaaactttttaaattttttgccgacacggagtctcgctttgtcgcccaggctggagtgcagtggtgcgatctcggctctctgcaacctcagcctcctgggctcaagcaattctcgtgcctcagcctccccaggagctgggactacaggtgtgcgccaccatgcccggctaatttttgtatttttagtagaaatggggtttcacaatgttggccaagctggtctcgaactcctggcctcaagtgatcgcccacctcggcttcccaaagtgctgggattacaggcttgagcagccgcgcccggccatattcacttaaacatttaatgacccaggagaacattcatctaggattttaagttgtactcacagtgcttttattttctgtttcgatcaaaatagtctattgatgacaatatttgtgagcccattcatttctaccgtatcaaattgttagtctagccagtctccttcaaacttctctccctctacccatcatcgtcaagatctaaaggaattcactacctcttcttctcccaagaaaaaaaaaatcgctcctccccctctcccaacccccccacaacccattccagaaaaggaaagaagaggggacgcaaagtggaataagttacgacgggcgaccgagcgcatagaaatgggaccaaagcccaggctcaagacagagacgaggaatcagtaaccacagccggaggatcttggctatttgccagcagagaactgactggttctaagaaaccagaggcagagcgagtgacaggaagggaaagagggcccacccttgggactgcctgaaacactcaaagaatgaaaaagaaacgtcaggaatccgagacgggatgcggtcggccagagcgaccagccaggttaacaaccagctcagaaagccgggacacgggtgagagacccctgggaaggaaacagcgcccggggacggcctgctaaaaggaaactgataaccaggaagcctaaggccgcctcgcttccaaaagtcagagtcggagcccaggtgtccggtagctgcggccagacaccggatcgggtctgagggcgggcctaggggcggagcccgagctctttccccgccctctaacggcgacccgggctgcgttctcagtgcgccggcgtagggtgaggccggactctatttggcgattaagcgtgaggctgcgttcgctacccagcatgctgtgcgctagtgacggccctccgcctatccccttcccaactctccccccacccctcccgccgaggcccccccttcccctaaagtgagtgagtgagacgggcagatggaggagggattgtaatggcggcagccggcagctccctgctctgacccacggcaggcacacagcaacgaccccttccccgcccctctcccggccggcctccgccccgcagccagcgcggggccaccctctccggcccttcccccagctgtcggcgtctcgccctgcgccccggccggggccccacacacaatggacgagcttgccggaggcggtggtggcggcccggggatggcggcccctccccggcagcagcagggacctggggggaacctgggcctttcgcccggggggaacggagcggcgggcggcgggggtcctccggcctccgagggagcgggtcccgcggcaggccccgagctgtcccggccgcagcagtacactatcccggggatactgcactacatccagcacgagtgggctcggttcgagatggagcgggcgcactgggaggtggaacgggccgaactgcaggtacctcgttggggtcggtgtgcgggagctgcggcggctgggttcccggccggggggtggggctggggactccactcagccggagccggcgccttgggaggccgagcggaacctacctgtgctgctcaggttgtgatggtcctctcaacggcttttcctggagtccccctccctctttcccgcataagcttgctccccaaccttcactggctacgcggtgcgggcctcctcggggcagccattttggcttttagtatggcgtctgcgggggctcctccggaggcggccttcccgggcctccggggcttgggaccgagcacctctctgtgggagagtccggtttggggcctctcaacactgagtttgctcttgtttgttcctcttgagatgaagagcccgaagagagggactaggataggcatcttaccccccttttccggaccacccccctttccgatttggcgtatctggccccctccctcagacttggtacgcgcttgccccttgacagccacgcttctttcctgggctgctagggtgcacagtgacttgggactgacctgtgaagttttatttcccatcgtcaactttaagtactttctcacctgag

SEQ ID NO: 1806 - DNA, 6000 bp, Homo sapiens
aaagtgataagtggatgacaggaaaaacagagcggaagcaaaagaaaacagttttgaaggatttgttaacaacagagtgttggttaagtacatacggtttataaggccaaaggatttggcaatttgaaggtcaatcatgaacagaaaacatagtgttctacgaagtgtttagaagggaggagagaagaaagcgaaaaggcagactacagagtggggttaatgggtagtggaggagcataaagagaattctagatcagtggtccctaaacttcatttcaagggcttcaaaaagaaacagggaatctgacacaaggtagtggactcccttaatactatcaataaaatttttttaactattatcaccatcatctgaaaaaggaaatgcctaacagtaaaaatgtatgaaggctaaaaatcccagaacaaagggaacacctttatgaaaaatcactgtcggccgggcgcggtggttcacgcctgtaatcccagcactttgggaggccaaggtgtgcagatcacgaggtcaggagatcaagaccatcctggctaacacggtgaaaccccatttctactaaaaatacaaaaaaattagctgggcgtggtggcaggcacctgtagtcccagctactggggaggctgaggcaggagaatgccgtgaacctgggaggcagagcttgcagtgagccaagatggtgccactgcactccagcctgggcgacagtagagcgagactccatctcaaaaaaaaaaaaaaagaacataaactctttgactacattttcttgtattagctatgtcatatttttacacttggcaaacaagcattttgtatatacccaaaatccacttactacatacaaactataaagaaaaatataaggacacattagcaatatatataaactatgccttgcagcagcatcacaggcgctcaataaaactttattgaaatgtactcaagtggtgtgggccacgcaatactagatgaagaattacaagtcagattccactctataaaaaagagctaagacagtataacataatggttacaagagtggtaacatgactacaggctttggaatcagacagacttgggttcaaatctcagctgcaatactttatggctaggtgaccttggcaaaatgatttaacctacctaaatttgtctcctcacctgtaaaacaggaatactcacctcatgaggttatagtgctgattaaatggcagtttctaacttttagaagtcgtaacatgatagatgttgctgcttaaagatccttaagttagtaggagatattttgcttagacttacttgatttcttcatttttaaggggggaatctcctgaattttccattttcagggttttcaaaagctggtctggaatagtaatttgcaaatcctagtgtcttttccatgacaagattttaatgaatctactatgaaattacaaaaaagaaaagtgtagtgtagtaatttttctctttaacaggcactactgtgaagaaagaatcacttgtagaactctaaaaaatatgcaggcctcttatcctctggagatctggattgatctagggcttgaagaaaatggactgtctgtggaattttggtaattcatgttatataaaagttaagaaaccactgtcctatgaccttactaacaatgctttacctgagtctaaggtaaggaagaatcagagacagaagagctttaagatgtgatcctttagtttggttccaagtttctaagacagacctttactctaaattctttttacagagaacagaatcatactgtaaagttccttttaatatctttcccaaagccagggaaaatattattccccattaaaattttacatcaatatggggtattccttaagctcttcacgttctctattgaaactattcaataattaacactttaaaaatctgtgtacatgacagtgcactggagactgtacataataatatgtaagttgtcttatttctagattgtctttcttaaaaataggtttaagtttacagtaaaaatccactgatgcttcactacaccctcccacaaatatgtattcaacacatacattttaaaatacgcatctcacaagcaatctcagtagactgaaggcacctaaagcaaactagaaaccttattaagttaacccaataaaacattttaaatatataactcaaaaaaaaaaaaaccaacgccatcatgaacattttattccaaaagaatcagtatgaaataaaaaagagtctagaaacactgtaggacttcttcaaaacaaggaaacaaacaaaaacttaggatggctaataacagtactgtaccaatagaattgaaagcaagcaagcaagcaaaaggaatctaccttaaaacactgctgctgctgttaaggagacctagaagggaaagcaaatgctagagcaggcaataaaggcttctttaatatatagtataggttttactaatttgggcacaagatatctttcttctcagctgcttacattagtgaagtttatgggtgaaaaatgcaattgctaacttgaagagtgttgaaatccaaacttgcatacaacagtacaaaggtctaagaaaccatagcagggactggtgaagtattatttagtgagcttaggccttactgcatttgtcaatccaaattttaaaaacaaatgccttacttactttactcacacagaaaattaagtttgcagtatgtagtagaaagctgtataccaacagaattctataaattttaagtatgttaaagcagactgtacacaacttaaaccagttttgacttcagcttttttaaagttatgtaattttaaagcccaatattatatcaaaacacaattgtaaagcactgaaatgactaacaagtgttacttttttttaagacttcatacagtgtcaaaatacccaagtattttttacttttgaaaagtttaacttcacccactttgtggagtcatataaaagtttactagttcagaaccaaactaaagagatgcatatttgaggacaccctttctagttaatccaatcctcctcctttcagcactacatttgcctaacgattcaccataggcatatgacatatatgacagcaaatactgcttaccccctaaatacacaacagtctgaagaacaggtgcaatactatttagacacacgctttttccttctaagcctaaatttgccctggaaaggtatttaaaaataaacacaaatacccaagaaagttaaataaccctttcaaaaagatgcagcaattttgagatccaggacatgagctgttaactaccaacagcttccaaatgtgcagcctatcaaaggttcacattatgaggatcgagtcaagctcaactatgaagggttccgagaacatctcactttgcttctcctgcaagagtaagtaacatgatataactacgtttcacttcaagggaatattaaatctcttcagtcgtttcataaatacagcatcgatcgtctggtttggtttttttatagataaagaaacggatgggggaaaggagatctagtggagagtactgtaaaaagaaaaattcagtgctgaaagcgttgatgagtcactaagtaaggaataactacagagaatccaagtgagtaaggcagcatctcaggtgagaaagtacttaaagttgacgatgggaaataaaacttcacaggtcagtcccaagtcactgtgcaccctagcagcccaggaaagaagcgtggctgtcaaggggcaagcgcgtaccaagtctgagggagggggccagatacgccaaatcggaaaggggggtggtccggaaaaggggggtaagatgcctatcctagtccctctcttcgggctcttcatctcaagaggaacaaacaagagcaaactcagtgttgagaggccccaaaccggactctcccacagagaggtgctcggtcccaagccccggaggcccgggaaggccgcctccggaggagcccccgcagacgccatactaaaagccaaaatggctgccccgaggaggcccgcaccgcgtagccagtgaaggttggggagcaagcttatgcgggaaagagggagggggactccaggaaaagccgttgagaggaccatcacaacctgagcagcacaggtaggttccgctcggcctcccaaggcgccggctccggctgagtggagtccccagccccaccccccggccgggaacccagccgccgcagctcccgcacaccgaccccaacgaggtacctgcagttcggcccgttccacctcccagtgcgcccgctccatctcgaaccgagcccactcgtgctggatgtagtgcagtatccccgggatagtgtactgctgcggccgggacagctcggggcctgccgcgggacccgctccctcggaggccggaggacccccgccgcccgccgctccgttccccccgggcgaaaggcccaggttccccccaggtccctgctgctgccggggaggggccgccatccccgggccgccaccaccgcctccggcaagctcgtccattgtgtgtggggccccggccggggcgcagggcgagacgccgacagctgggggaagggccggagagggtggccccgcgctggctgcggggcggaggccggccgggagaggggcggggaaggggtcgttgctgtgtgcctgccgtgggtcagagcagggagctgccggctgccgccattacaatccctcctccatctgcccgtctcactcactcactttaggggaagggggggcctcggcgggaggggtggggggagagttgggaaggggataggcggagggccgtcactagcgcacagcatgctgggtagcgaacgcagcctcacgcttaatcgccaaatagagtccggcctcaccctacgccggcgcactgagaacgcagcccgggtcgccgttagagggcggggaaagagctcgggctccgcccctaggcccgccctcagacccgatccggtgtctggccgcagctaccggacacctgggctccgactctgacttttggaagcgaggcggccttaggcttcctggttatcagtttccttttagcaggccgtccccgggcgctgtttccttcccaggggtctctcacccgtgtcccggctttctgagctggttgttaacctggctggtcgctctggccgaccgcatcccgtctcggattcctgacgtttctttttcattctttgagtgtttcaggcagtcccaagggtgggccctctttcccttcctgtcactcgctctgcctctggtttcttagaaccagtcagttctctgctggcaaatagccaagatcctccggctgtggttactgattcctcgtctctgtcttgagcctgggctttggtcccatttctatgcgctcggtcgcccgtcgtaacttattccactttgcgtcccctcttctttccttttctggaatgggttgtgggggggttgggagagggggaggagcgattttttttttcttgggagaagaagaggtagtgaattcctttagatcttgacgatgatgggtagagggagagaagtttgaaggagactggctagactaacaatttgatacggtagaaatgaatgggctcacaaatattgtcatcaatagactattttgatcgaaacagaaaataaaagcactgtgagtacaacttaaaatcctagatgaatgttctcctgggtcattaaatgtttaagtgaatatggccgggcgcggctgctcaagcctgtaatcccagcactttgggaagccgaggtgggcgatcacttgaggccaggagttcgagaccagcttggccaacattgtgaaaccccatttctactaaaaatacaaaaattagccgggcatggtggcgcacacctgtagtcccagctcctggggaggctgaggcacgagaattgcttgagcccaggaggctgaggttgcagagagccgagatcgcaccactgcactccagcctgggcga

SEQ ID NO: 1807 - DNA, 6000 bp, Homo sapiens
tggagagagcccacacttcggggctaccaaatcctagggccgaactaaagtctgacgggagctctaaccaaagccaaccagctgagatgcgatccggccgctgggcgggggcgaaaaaaacaacttccggtcccctctaccccggcattcggccagctctatgatcactgagttcctctctcccaagcccggagaggccagcgcccagatatgaggaaggttcccctctcaccacgatgtcgggggcagagcaagataaaataagacctaaagctcccgcctggcccgggcgcggtggctcacgcctgtaatcccagcactttgggtggcggaggcgggtggatcacatgaggtcggaagttcgaaccagcctgagaaaccccgtctctactataagtacaaaattagcggggcctggtggtgcatgcctgtaatcccagctactcgggagtctgaggcaggagaatcgcttgaactcgggaggcggaggttgcggtgagctgagatcgcgccactgcactccagcctgggcaacaagagtgaaactccgtctcaaaaaaaaaaaaaaaaaaagagctcccgcggccacctccttgttaattagcaatagaagttaaaaaaattcttttggcttcatcaaaagcatccacttcctgccatatgttcttcaaatatgaaaagttgtagaaagagtttaaaatatacgttttcacagtgcaaattttttaaatattgaaaagttatcccaattcctattgaattaagcccgggtatacaaaaagaattagagccattttgaccaccaggaattttcctgttagtggggtgcaagggacaagggaagtggagcaaacgaaaaacaagatacacttgaaccggaaaatacagactaatcagaggattaggtgaaaagtgctatagaattcagaaaagcgatgtcactgcaggatggagttgctaataatctacagcagtgtgagacaactgtaggaattgtcccactgcatgtgcaaataaatacacatgctacatcatagtatgtacatcttaaatttggcaaattcaaccgtaagcatgttgcttagcctgtgattagttcttccattggtaattcacaaaacaaaatttttccccaattgtccctgttgttttcccccaaattaacataccgcaaggtggctcatgcctgtaaaatccagcactttgggaggccgaggcacggggggtgggggggatcacgaggtcatgagttttgagagcagcctggccaacatggtgaaaacccgtctccactaaaaatacaaaaattagccgggcgtggtgacaggtgcctgtaatcccagctactcggggggctgaggcaggagaatcacttgaacctgggaggcagaggttgcagcgagcagaaattgtgccactgcactccagcctgggcgacagagcaagacttcgtctcaaaaaacgaaacacacacacaaactcttcatgccctttcacaggaatttaagatcatgttccaaaattttaattgtggtaggttttttttttaagcatgtcccttctaatgtttgaatcagtttattccattcatcacgtaaatccagcataaaagctccacttaagcctttgaaaacactaaattgtgtaattttgaagagtattttgccatggtaatcttaatttttccagcactaaattttcagttatgcgaaatcaggtcctttatgtctagatgacattcttgccctcatcactaccatcaagaaaaaggagtccaagtccaccacacaagtcaaaaagtaagtaaatggccaatttatcaaagttgacttctccaaccacaataacatgaggcttttaaagtacgtttctggatagaaaggaaacttatttaatgaggacctactaactattgaacacagcatcctacttatccttctccataaagttaaattgccaaggctcctaggaatagatcctatggaagcaaggacagtgagtgtggtgtgtgtgtgtgtgtgttttgagacagagttttgctcttgttgcccaggctggagtgcaatggcactatctcagctcactgcaaccccgcctcccgggttcaagtgattctcctgcctcagcttcccgagtaggtgggattacaggcatgcaccaccaagcccagctcattttgtatttttagtagagacggggtttctccatgttggtcaggctgatctcgaactcgtgacctcaggtgatccgcctgcctcggcctcccaaagtgctgggattacagacttgagccactgtgcccagctgtgtgtgttttgttttgtttgagacagagtctcactgttgcccaggccagagtgcagtggcatgatcttggctcactgcatgcaacctccacctcccgggctcaagcaattctgcctcagccttccaagcagctgacactacaggcacttgccaccatgcaggactaattttgtatttttagtagagacagggtttcatcatgttggccaggctggtcttgaactcccaatctcaagtgatccgcccaccaaggcctcccaaaatcctgggattaccgggccgaccatacatgcaaacattcttacacttgctgaatacgctctactattatcacactctcatgcctcaggtactgcctaaggttgtacacagacctgtaataagatcaatgaggctaagtatgctcacaatcagaattagataattgtcaatcttcatccccattattcatctctacatttttttctcctatagtacttcccgctttctaacatgctatactatttatttatttatttatttatttttgagacagagtctcactgctgcccaggctagagtgcagtggtgtgatgacagctcactgcagtctcaaactcctggactcaaacaatcatcccgcctcagcctctccagtacaatttttaaaatttttatttttagagacaggatcgttgctatgttgcccaggctggtcttaactcctgggctgtagcgattctcccacctcagtctcccaagtatctgggattacaggcacaatccactggacttgctcagagatctttattgtacactgatatacccaagtgcctagaatagcacctggcacatagtgggccctcagtatttgttgaactaatgaatgatcattgctcctttggaagcctacaaaccccacagaagcaggaatcacaactatcttgttctaggctttattttcaaaccctagcttactgctgatacacaatggaagctctaaaagattgctggattaaagtggtagcttgagttaattaatacactgggcccactaattctttgtacaaggaagatagatgcctggctgagattatttaaagcattgtttctgtgggaaagtgttttgtttttttgtttgtttgggacggagtctcactctgtcgcacaggctagagtgcagtggtgcaatctcggctcactgcaacctccgcatcccgggctcccgagtagctgggattacaggcgtacaccaccactcccagctaatttttgtatttttagtaaaggcggggtttccccatgttggccaggctggtctccaactcctggcctcaagtgatccacctgcctcagcctccctaagtgctgggattacgggcgtgagccactgtgcctggcctgtgaaaaaatgttttctgagcttcaatttgtatatatatttatagaacaaaactagttcctacattggcagtgcaggtagggcagaaccagaagcgggacaacacacacagacaccactaacaacagggccgctcccttaggtctggtcttaaccagctctaggccaggtgaagaggctaactcaaccatgactgcgtgtctgtctcgccattgctttcttttctctagtatagatgctcagcgtctaatcagagactgattctcaactggcgtgaccaaaggacagttatattatctccagtctcaatttccttatcagtaataacaggcattttatccacactttcagtttgtgagaaataaggcatgtagacggtttcacagagggtcgggaacaagatcaacccctaacaaacgttagccattatgactaatgacttttactagttttcatttttgtcttccctcttctcactttaacctaatcaggctgggcgtggtggctcacgcctgtaatcccagcaccctgggaggtcgaggcaggcgaatcacctgaggtcaggagttcgagaccagcctgcccaacatggtggaatccggtctctaataatacaaaaattagccaggcgtgttggcgcgcgcctgtagtcccaggtactcaggaggctgaggcaggagaatcgcttgaacccgggaggaggaggttgcagtgagccgagatggtgccactgcactccagcctggacgacagagcgagactccgtgtgaaaaaaaaaaaattaacctaatagaggaaagcacgcgcccaccccctctctgagcatgcgcaccaacagaatagccgcgccctttcctaattaaatcattaaccaaggtgagggtaaggaagaaaaggaggcttggctaagtcccactctgatgtgatcacgttaaaacggtgtaaggcacattacatcataggttaaaaggcctagaaaactccgcgctccccttgccagaactgcagactcgcgagcctaagtctccgagaactcagggattgtgaaacccgccccgactctgcgctagcagcgggatccaggcacccgcagctaactggggagggagatgactgcctggctgacttttcattggctcagagtcacaaaggctgcaggttcttcccccttccggtcgctgagtggttgaggccggaagacaacgctcatcgtcattggctgagcccggctgtcagtcctttcgcgcctcggcggcgcggcatagcccggctcggcctgtaaagcagtctcaagcctgccgcagggagaagatggcggtcgccgtgagaactttgcaggaacagctggaaaaggccaaagagagtcttaagaacgtggatgagaacattcgcaagctcaccgggcgggatccgaatgacgtgaggtaagggcctaacgggaactcggaactcggagctcggagaggcagccctcaggtcggggtgaattgggggcggggagggcggccagccttaagaagactggaacctcgaggcctgttcgcggggcggcgggtaaaaccctgttgtcgccgaggtggagaggccccaggtcccctccgtagagcgctggtctcaggtccctgaggaaggagagcgaggcctgggtgcgccggcatgctttcttggcctgtgagaagacccggactgctgattcccgctctcggccctgcaggcccggaactgcagcacaaagccccttcccgctccggcggacacccggcccgttgctggccccgagaccctgccgggacgcaacaagccgccttaccccagcttcctgtccacgtgcagcctcctcggggatggcgggatggggacctgatccaggcttgttaatgtgtgggggcatcgaggtgaatataatttctgtgacacaggtcctggagaaacgaggaagttaaatgaaatagtacttcctgtcctgtttcagacatttagatttatttgaaactatctttttggaacttttgtgattttttctccttatgatccacatctctgaaagtatttgggtgcgactgtgtgtgtctacatatgattttgcactgatttgtaaatcttttacaggcccatccaagccagattgctggccctttctggtcctggtggaggtagaggacgtggtagtttattactgaggtaagatttcctttggactttactcatgctgaaactactggtactttactaaatatgttggtttgaacaaaacctgtgataaaatcaataacccagtgtttgtcgtctttgttttgtttaatgttgtaata

SEQ ID NO: 1808 - DNA, 6000 bp, Homo sapiens
caagatcaacccctaacaaacgttagccattatgactaatgacttttactagttttcatttttgtcttccctcttctcactttaacctaatcaggctgggcgtggtggctcacgcctgtaatcccagcaccctgggaggtcgaggcaggcgaatcacctgaggtcaggagttcgagaccagcctgcccaacatggtggaatccggtctctaataatacaaaaattagccaggcgtgttggcgcgcgcctgtagtcccaggtactcaggaggctgaggcaggagaatcgcttgaacccgggaggaggaggttgcagtgagccgagatggtgccactgcactccagcctggacgacagagcgagactccgtgtgaaaaaaaaaaaattaacctaatagaggaaagcacgcgcccaccccctctctgagcatgcgcaccaacagaatagccgcgccctttcctaattaaatcattaaccaaggtgagggtaaggaagaaaaggaggcttggctaagtcccactctgatgtgatcacgttaaaacggtgtaaggcacattacatcataggttaaaaggcctagaaaactccgcgctccccttgccagaactgcagactcgcgagcctaagtctccgagaactcagggattgtgaaacccgccccgactctgcgctagcagcgggatccaggcacccgcagctaactggggagggagatgactgcctggctgacttttcattggctcagagtcacaaaggctgcaggttcttcccccttccggtcgctgagtggttgaggccggaagacaacgctcatcgtcattggctgagcccggctgtcagtcctttcgcgcctcggcggcgcggcatagcccggctcggcctgtaaagcagtctcaagcctgccgcagggagaagatggcggtcgccgtgagaactttgcaggaacagctggaaaaggccaaagagagtcttaagaacgtggatgagaacattcgcaagctcaccgggcgggatccgaatgacgtgaggtaagggcctaacgggaactcggaactcggagctcggagaggcagccctcaggtcggggtgaattgggggcggggagggcggccagccttaagaagactggaacctcgaggcctgttcgcggggcggcgggtaaaaccctgttgtcgccgaggtggagaggccccaggtcccctccgtagagcgctggtctcaggtccctgaggaaggagagcgaggcctgggtgcgccggcatgctttcttggcctgtgagaagacccggactgctgattcccgctctcggccctgcaggcccggaactgcagcacaaagccccttcccgctccggcggacacccggcccgttgctggccccgagaccctgccgggacgcaacaagccgccttaccccagcttcctgtccacgtgcagcctcctcggggatggcgggatggggacctgatccaggcttgttaatgtgtgggggcatcgaggtgaatataatttctgtgacacaggtcctggagaaacgaggaagttaaatgaaatagtacttcctgtcctgtttcagacatttagatttatttgaaactatctttttggaacttttgtgattttttctccttatgatccacatctctgaaagtatttgggtgcgactgtgtgtgtctacatatgattttgcactgatttgtaaatcttttacaggcccatccaagccagattgctggccctttctggtcctggtggaggtagaggacgtggtagtttattactgaggtaagatttcctttggactttactcatgctgaaactactggtactttactaaatatgttggtttgaacaaaacctgtgataaaatcaataacccagtgtttgtcgtctttgttttgtttaatgttgtaatagactagatttctgtataaatatagttatcctgaaaaactggaggttgaagaatatattaagtttaccaattttgagtgaacttaattcttataaagtaacactataaaagcattttggaatgaatgcccgtttaaggctactttagttggaaagatttttgaaagtttaaccatattctcttgtcaaatggaaataccatttatcttgtatttcaagtgttttatgttgaacattttaaatttcaggcgtggattctcagatagtggaggaggacccccagccaaacagagagaccttgaaggggcagtcagtaggtaggtttaaaaaaagattcctgaaggcttctttagtttctgaggtaccacacaaatataaatgtttattaacaataattctgtttcagcaatattaaaattgagtggtatgccactccctgccccccccaagttctgttggtatttgactgaacagttgactatcagttccctcaaaacgcagttctgcactcatgataacctaaattttatccaaataaaggtcatgtgaagagtaaaattggaaaaattgtcaattagtaccattttttctgacttgtacttgaaaaacttaaccagtttgaaatacttagaaaatacaggagagcaaaattggtttgggcgttagttcacacattgtagtatcctttctctgctggaggaaagaataaaatgggatggagacttgatagaacaaagcttctggaaacgagtcctagaagagagggcatttgcccttggtgtgcagttacataaatacctcagtggtcatttaaattaatttttggccaggcacagtggctcatccctgtaatcccagcactttgggaagccaagaccagcagatcacttgagcccaggagttggagaacagcctagatacatggtgaaatcccatccctacaaaaagtacaaaaaagttacccaggcatgctggctcacgcctgtagtcccagctgcttgggaggatgaggcaggaggatcacttgagcctgggaggtcgaggctgcagtgaaccgtggtggcaccactgcacttcagcctgggtggtatagtgaaaccctgtctcaaaaaaattaatattttctatgacaggctgggcggggagcgtcggaccagaagagaatcacgccaggaaagcgacccggaggatgatgatgttaaaaaggtattgagattgaaagaacttaaatgaatgtagtaccttcactttactacatttaaaagcacaccactcatatgctagttaaattactgagattttctttttctgcagccagcattgcagtcttcagttgtagctacctccaaagagcgcacacgtagagaccttatccaggatcaaaatatggatgaaaagggaaagcaaaggtatttccctgggggaaaaaaactctagtgaaataatgcagttataaggaaaatcaagggattgttcaagcatcctgtagtatttcttagaaaatgatgggtttaaatgaaatggatcctgttgacagtaaattttcttattctgttctttaggaaccggcgaatatttggcttgttgatgggtacccttcaaaaatttaaacaagaatccactgttgctactgaaagggtatttatccaagttttgttttgcatcatatatttaagttatcaaagtagtagattaatgttttttttaaaaaatccttaaagctcttttaagacctaactgtaaacctgaaacaaagccaagtaaaaacttggtttaacttcttatagaacagctttacttaaacattgtgttggaatataacagttgttgatatcatagctaatagccttgaaatttagatatgtgaaaaaaaaaagcctcaagtctccatttccttaaagacaaattacagtcagtaccaagtgctaagttctagttagttggtatcctgaattgaaaatgtgaagcggccaggtgcagtggctcatgcctgtaatcccagcactttgggaggctgaggcaggtggatcacctgaggtcagaagtttttcgagaccagcctggccaacatggtgaaaccctgtctttactaaaaatacaaaattagccgcctgtggtggcatgcgcctgtaatccccagctatttgggaggcggaggcaagagaatcacttgaaccctggaggtgaggttgcaatgagccaagatcacactattgtaccccagcctgggcaacaggcgcaaaactccatctcaaaaaaagaaaaaatgtgaagcatatgcagataccttttttttttctttttctttttttttgtagagatggggttttatcatgttgcccaggctggtctgagctcaaagcaatccacccacctcagcctcccagagtgctgggatgacaggtgtgagccactgtgcccggcctgcagatacctttacatagtgaaaaaaaaaaaaaaaaaaaaaattttttttgagatggagtttggctcttcttgctcaggctggagtgtagtggcgtgatctcagctcactgcaacctccgcctctggggttcaagtgatttctcctgcttcggcctcccaagtagctgggattataggtgcgtgcaaccacgccctgttaatttttttgtgtttttagtagagatggtggtgttggcttctgacttcagatgatctacctgcctctaatgtttcacgtaattagtatgtgtaataactttttatcataattgaactgaaatcatatataccttttgttgtaactatttcaacacgtaagtattaaagcaggctacttaacttttagcaaaagcggcgccaggaaattgaacaaaaacttgaagttcaggcagaagaagagagaaagcaggttgaaaatgaaaggagagaactgtttgaagagaggcgtgctaaacagacagaactgcggcttttggaacagaaagttgagcttgcgcagctggtgagtggtaatttggaattctaagattggtaatcctttgtgtttacaaaagcactgaccctttaccttttctttagcaagaagaatggaatgaacataatgccaaaataattaaatatataagaactaagacaaagccccatttgttttatattcctggaagaatgtgtccagctacccaaaaactaatagaagagtcacagagaaaaatgaacggtaagtatgcgaagaggtccattgaattgttcatagtgggtaaggtaatatgttcatatgcacacgtttgttttctaaaataattatgattcagtgattggtttgctgtgtttgctttttttttttaaataagataataagatattctaggccgggcgtggtggctcacgcctgtaatcccagcactttgggaggctgaggcaggcagatcatgaggtcaggagatcgagaccatcccggctaacatggtgaaaccccgtctctagtctctactaaaaatacaaaaaaaattagctgggcatggtggtgggcacctgtaattccagctacttggcaggctgaggcaggagaatcacttgaacctgggaggcagaagttgcagtgagccgagattacgccactgaactccagcctgggcaacagagctagactccatctcaaaaaaaaaaaaaaagatacattctgagatgctggtgagtttgtagtataggaatatttgtatcatgatggagtttaatgtgaaagttatagacagtgcttatgcatctgtattccttaagcatttgtgtaaaattacttttttttgcatgctattattgttctgataaaatgctaataagacaaatgtgaaaaccaactcagtttctagatggaaaacacatggaaggatagacactgctaagatgatgatttatctctttgggatcagaaaaattaatatatatgattttatgccaaaactggttctgttttacagaagttttatttttcatcagacataaagattgatctgttttcttcatcagttagaaaatgtgtagttctgtctgccacaatttctagtatgtagatttcccatggatctttgcttttataattttatgtcagtttgtggttacttaa

SEQ ID NO: 1809 - DNA, 6000 bp, Homo sapiens
aaattggaaaaattgtcaattagtaccattttttctgacttgtacttgaaaaacttaaccagtttgaaatacttagaaaatacaggagagcaaaattggtttgggcgttagttcacacattgtagtatcctttctctgctggaggaaagaataaaatgggatggagacttgatagaacaaagcttctggaaacgagtcctagaagagagggcatttgcccttggtgtgcagttacataaatacctcagtggtcatttaaattaatttttggccaggcacagtggctcatccctgtaatcccagcactttgggaagccaagaccagcagatcacttgagcccaggagttggagaacagcctagatacatggtgaaatcccatccctacaaaaagtacaaaaaagttacccaggcatgctggctcacgcctgtagtcccagctgcttgggaggatgaggcaggaggatcacttgagcctgggaggtcgaggctgcagtgaaccgtggtggcaccactgcacttcagcctgggtggtatagtgaaaccctgtctcaaaaaaattaatattttctatgacaggctgggcggggagcgtcggaccagaagagaatcacgccaggaaagcgacccggaggatgatgatgttaaaaaggtattgagattgaaagaacttaaatgaatgtagtaccttcactttactacatttaaaagcacaccactcatatgctagttaaattactgagattttctttttctgcagccagcattgcagtcttcagttgtagctacctccaaagagcgcacacgtagagaccttatccaggatcaaaatatggatgaaaagggaaagcaaaggtatttccctgggggaaaaaaactctagtgaaataatgcagttataaggaaaatcaagggattgttcaagcatcctgtagtatttcttagaaaatgatgggtttaaatgaaatggatcctgttgacagtaaattttcttattctgttctttaggaaccggcgaatatttggcttgttgatgggtacccttcaaaaatttaaacaagaatccactgttgctactgaaagggtatttatccaagttttgttttgcatcatatatttaagttatcaaagtagtagattaatgttttttttaaaaaatccttaaagctcttttaagacctaactgtaaacctgaaacaaagccaagtaaaaacttggtttaacttcttatagaacagctttacttaaacattgtgttggaatataacagttgttgatatcatagctaatagccttgaaatttagatatgtgaaaaaaaaaagcctcaagtctccatttccttaaagacaaattacagtcagtaccaagtgctaagttctagttagttggtatcctgaattgaaaatgtgaagcggccaggtgcagtggctcatgcctgtaatcccagcactttgggaggctgaggcaggtggatcacctgaggtcagaagtttttcgagaccagcctggccaacatggtgaaaccctgtctttactaaaaatacaaaattagccgcctgtggtggcatgcgcctgtaatccccagctatttgggaggcggaggcaagagaatcacttgaaccctggaggtgaggttgcaatgagccaagatcacactattgtaccccagcctgggcaacaggcgcaaaactccatctcaaaaaaagaaaaaatgtgaagcatatgcagataccttttttttttctttttctttttttttgtagagatggggttttatcatgttgcccaggctggtctgagctcaaagcaatccacccacctcagcctcccagagtgctgggatgacaggtgtgagccactgtgcccggcctgcagatacctttacatagtgaaaaaaaaaaaaaaaaaaaaaattttttttgagatggagtttggctcttcttgctcaggctggagtgtagtggcgtgatctcagctcactgcaacctccgcctctggggttcaagtgatttctcctgcttcggcctcccaagtagctgggattataggtgcgtgcaaccacgccctgttaatttttttgtgtttttagtagagatggtggtgttggcttctgacttcagatgatctacctgcctctaatgtttcacgtaattagtatgtgtaataactttttatcataattgaactgaaatcatatataccttttgttgtaactatttcaacacgtaagtattaaagcaggctacttaacttttagcaaaagcggcgccaggaaattgaacaaaaacttgaagttcaggcagaagaagagagaaagcaggttgaaaatgaaaggagagaactgtttgaagagaggcgtgctaaacagacagaactgcggcttttggaacagaaagttgagcttgcgcagctggtgagtggtaatttggaattctaagattggtaatcctttgtgtttacaaaagcactgaccctttaccttttctttagcaagaagaatggaatgaacataatgccaaaataattaaatatataagaactaagacaaagccccatttgttttatattcctggaagaatgtgtccagctacccaaaaactaatagaagagtcacagagaaaaatgaacggtaagtatgcgaagaggtccattgaattgttcatagtgggtaaggtaatatgttcatatgcacacgtttgttttctaaaataattatgattcagtgattggtttgctgtgtttgctttttttttttaaataagataataagatattctaggccgggcgtggtggctcacgcctgtaatcccagcactttgggaggctgaggcaggcagatcatgaggtcaggagatcgagaccatcccggctaacatggtgaaaccccgtctctagtctctactaaaaatacaaaaaaaattagctgggcatggtggtgggcacctgtaattccagctacttggcaggctgaggcaggagaatcacttgaacctgggaggcagaagttgcagtgagccgagattacgccactgaactccagcctgggcaacagagctagactccatctcaaaaaaaaaaaaaaagatacattctgagatgctggtgagtttgtagtataggaatatttgtatcatgatggagtttaatgtgaaagttatagacagtgcttatgcatctgtattccttaagcatttgtgtaaaattacttttttttgcatgctattattgttctgataaaatgctaataagacaaatgtgaaaaccaactcagtttctagatggaaaacacatggaaggatagacactgctaagatgatgatttatctctttgggatcagaaaaattaatatatatgattttatgccaaaactggttctgttttacagaagttttatttttcatcagacataaagattgatctgttttcttcatcagttagaaaatgtgtagttctgtctgccacaatttctagtatgtagatttcccatggatctttgcttttataattttatgtcagtttgtggttacttaattgccataatcttttgtcataactttacaaaaacaaattcagatgaagcttaatgacaatttgtgaccagttataaaattatggctttgaattttcttaatcggtaaattttacacatgtaaatttttattctttagctttatttgaaggtagacgcatcgaatttgcagaacaaataaataaaatggaggctaggcctagaagacaatcaatgaaggaaaaagagcatcaggtggtgcgtaatgaagaacagaaggcggaacaagaagagggtaaggtggctcagcgagaggaagagttggaggagacaggtaatcagcacaatgatgtagaaatagaggaagcaggagaggaagaggaaaaggaaatagcgattgttcatagtgatgcagagaaagaacaggaggaggaagaacaaaaacaggaaatggaggttaagatggaggaggaaactgaggtaagggaaagtgagaagcagcaggatagtcagcctgaagaagttatggatgtgctagagatggttgagaatgtcaaacatgtaattgctgaccaggaggtaatggaaactaatcgagttgaaagtgtagaaccttcagaaaatgaagctagcaaagaattggaaccagaaatggaatttgaaattgagccagataaagaatgtaaaaccctttctcctgggaaagagaatgtcagtgctttagacatggaaaaggagtctgaggaaaaagaagaaaaagaatctgagccccaacctgagcctgtggctcaacctcagcctcagtctcagccccagcttcagcttcaatcccagtcccaaccagtactccagtcccagcctccctctcagcctgaggatttgtcattagctgttttacagccaacaccccaagttactcaggagcaagggcatttactacctgagaggaaggattttcctgtagagtctgtaaaactcactgaggtaccagtagagccagtcttgacagtacatccagagagcaagagcaaaaccaaaactaggagcagaagtagaggtcgagctagaaataaaacaagcaagagtagaagtcgaagcagtagcagtagcagttctagtagcagttcaaccagtagcagcagtggaagtagttccagcagtggaagtagtagcagtcgcagtagttccagtagcagctccagtacaagtggcagcagcagcagagatagtagcagtagcactagtagtagtagtgagagtagaagtcggagtaggggccggggacataatagagatagaaagcacagaaggagcgtggatcggaagagaagggatacttcaggactagaaagaagtcacaaatcttcaaaaggtggtagtagtagagatacaaaaggatcaaaggataagaattcccggtccgacagaaagaggtctatatcagagagtagtcgatcaggcaaaagatcttcaagaagtgaaagagaccgaaaatcagacaggaaagacaaaaggcgttaatggaagaagccaggctttcttagccattctttgcagcagaagatttcttgataaaaaaggattacctttccttgtaaagaggatgctgccttaagaattgcatgttgtaaaaaatctttttggaaaatacagactgtttgtttaccagacattcttgtactttttgcataattttgtaagagttatttatcaaaattatgtgaggttccaaaatatgtaaaaatgataataataaaaaaagattaacatcccttgtcatcttttttaaatatcctatactcttcagtaagaatctgtatattttaataggcaaatctttaagtctgttcccttctaattctgtatcatacattgcttttgtagaaataaatgtgtgtttatttcattatttttgggatgtcctcgttgacacttgtataataaatatcctctttatcattttcagcttttaacactagatactgcacgtgattagaatgtttttgaaggtttcctcgtttttatttgccttggacagtttttagttgtcagagtcagagctttgcagctttgagggggaacagttctctttaaaatcatttgctattttctattctcccttgttattttaatctaagcattttcccccgtttctcatattttaaccatatgttcggtagataactaaacagtatgatctggttggcattttcttcctgatgatgggagcgtcattcttttgtcttcatggttacttgtgtgatataacatacatctgttaaagaaaatcacttctttctaggggagggaggtagaaaagtatctttcaaacttggtttttgagtttgtgtcttgtcttaactttgtgttggctctaacttaaacatgctgatatgtgttttcaagaattttgtttaaggaagtattgtatggaagtccacaaaatgaaggaagttcatctaggttttaatatgtaagcaagataacacac

SEQ ID NO: 1810 - DNA, 6000 bp, Homo sapiens
tggtgctggagctgcacacacatgaagttgctgagctaccatgagaagggagcatatagacaagatgagtcttcccggtagcctaaaaaaaaggaggaaggtgctacactgtgcatcattttaagtgctctgcgccagctctcaatgtcctacacattaactcaataatcctgacaaccaccacaatgcattaggtagtattagcaaaatggttaggagaaaagattctggagtcaaaccacctgcattccaatactgacttcacacttcactagctgggtgtccttaggctagctacttatcctctccaactcaatgagagtcatctgaaagctcaggatgatatttaatgcctatctcctggggttattgtgaggctcatgggtcaaatattcatagcataatgcctgccacaaagtaagcactcattaaataatgttgttatataggcaatagtaattatcttgcacaagatcaaacaccagtaagtaggtagaaatcctggtcttctgactccaaattccaggctttttctgtgaccatatgttaccctactgaatgtttatttttccttaaatgattaaaataccatagtacggtttgtgctgttctaagaacactgaagtattctcgctaattatacaaactgcaaagaaaagatcactattagcagaatataatgctgtttcactttgcactggcttgagaaaaagcccccacataacagaccatttctgagattcccaagagctatactttccaggagttatatacttctttgataccaaaaccagtgtcgcacctgccaagggaaaggactgtcagtttgactagtctagaggccacgttaccttctctcttttgtgctaagtggtgacagccgactgttcatctcccttttaaagttgttctctaatattttatttcaaattcctccaaacaaaacaacttgcagctgcaagtcatgctagctttctggttcactgcctacttgggcataaataaccagtacactggctcctactttaactaccactaggcctggcacagttccaggctctttgggtactgacgttgtggagtccataaagttaattttccagacaaacttgatttaacctggtatgaacttcagacgatgcagctctggggaaattcacactgactttctcacttcatttcaaaatattttttttaattgtcaaaaagaaacattcatgaacatagaccatattctttctgggtcataaaacaaaataaaacatttcaaagaatttaagtcatataaactgagttctctgaaaataatggaattaaactagaaatcaataacagatatctttaaaaatcaccaaatagttggaaattaacacactacaaaaataacccatgagtcaaaaaggaagtcacaaggaaaatatttttgggccaggcatggtggctcacatctataatcccagcactttgggagccaatgcgggagcatcatttgaggtcaggagttcaagaccagcctggccaacatgatgaaaccctgtctgtactaaaaatacaaaaattagctgggcatgatggtgcatgcctgtagttccagctacttgggaggctgaggtgggagaatcgcttgaacctgggaggcggaggttgcagtgagccgagatcacactattgcactctagcctgggtgacagagtgagactccatctcaaaaaaaaaaaaaaaaaaaaaaatattttgaactgaatgaaaatgatgatacaacatattaagatttctgtgatgtatttaaagtggtgcttacaggaaaaattatggcattaaatgcttatattagaaggcggggtgcagtggctcatgcctgtaatcccagcactttgggaggttgaggcaggcagattatctgagctcagtagttggagaccagcctaggcaatatggtgaaaccctgtctctacaaaaaacacaaaaattagccaggcgtggtggcacacctactttggaggctgaggcaagaggatcgcctgagcctgggaggcagaggttgcagtgagccaagatcacaccactgcactccagcctggatgacagagcaagactgtctcaaaaaaaaaaacaaaaaaaattcttccaaacatttaaggaattaataataccaatttaatgtaaacatctctagaaaataaaagggaagataaacacttcccaactcattttctgagatcagcattatcctgatgccaaaattagcagatattacaagaaaactatacatcaatatctctcaaaacatgaatgtaaaaatttccaataaaatattactaatcaaatccagcaatacattaaaatgataaaatcataaataagttgggtttatcccaggaacaaaaggttggttcaacatctaaaaatcaatataattcaccgtatcaacagactacataaaaacaattaggtggtgcacacctataattctagctactcaggcctggcagaagtgggaggattgcttaggcccaggagttcaagggtacagtgagcagtgataacactactgcactccagcctgggtgacagagcgagactccctctcaattaaaaaaaaaaaagaaaagaaaggaaaaggaaatgatcacctctagatgaagaaatgcatttgataaaattcaacatccattcataattttaaaaagcaaacaaaaacactaagcaaactaggaatgaaagtgaactttctcaacctcctattaataaaaggcttctgtgttagatacatatggttgcataacaaattaccccaaaacataatagcaaacatatttcagtttctagaggtcaggaacccaagtatggcttagctgggtgcccctggctcaaggtctctcacaagattgaacttacattgtcatctggggctacaatctcatctgaaagctcactggagttggggtggtgggggagatcctctatcctcaaaaggctacatacggtctgattccattttcatgacattctggaaaaggcaaaactatagagacagaaaacagatcaatggttgccatttgcaaacaatttctgttcacagaccacctctaggccatccttgtactgggtttccagggcagccaccagccctctctcctcagctccaggctcctttctgaacccttcctgggtttacatttagtagcatgctgcttgacacgggattggcccctgtttcatagacactgtgttaattttctctcctcgggtactgcttccaggacaagtacccgcattgatgctggcactgggaacgggacggatgataaagtgtgaggcactctgcccagtggcaactgacatgatttcataatttccccaggtccatccgcttcccgccagtgtgctcagatttgagcagtaggagtccgttgggagaaagatgggggaaaggaaccaaaaacaattaaggcagactctgtaagcttccacctcccacaccagaaaagtcccacagcagaagactgccgtggaaccttccctactgtagaggaaagtgctgactttaagcaatttctgcagtcacgccttcctcttctttcctttctccctctcattcattcactgacgccgcagcactgatcagcacagacacagaagatgcctccaagggaccaaagggaataaccgcggttctgaggtgtggggactgctgttgcagggaaatgtggaccgctcaggaggggctcctagcgcaggcgtcttgctccgcagacgcggttacagctgcgctttgcacggcctgcggaagtttgcaaatctagcaggtctgctctcccggcagcaggactcggcccgcggtcaggacagctcccatggacggagggcggccctccgaggcctttccctgcagccgggagggcggccgggctgggccgggccgggggtgggaagctggggcgcggcggccccgcccaggcagacccggggcgggagccggttcccatagggatcgcgggccgagccacgccgagccgagctgggcggaagaaggcgaggcgggagccaggcccgtccctgaccgccgcggcgccgtgagtcccgggcgggcaaggaggcgcgggccgtccctggccaacacgtggcaccgctccatgctgcgcggcgcggctgaggtgcacgtccgggcgcgggagggttttcccagtcccgggggcgtggggcgcggggcgcgggttggtctcctgcggccaagcctcgccgccgcctccgcggggagccgggaggtgtcttcttgccgcagggaaatgagacccgaaattagaaccggggaagcccttagccctccccgtactccagccagctcaggtgtcttagatcggatgaacgataacgttaaaaagatagcttatcttacagctcggctcgttttaggatggcaagttacattttaacttacagggtatttaacgggcgattaaaatcgggttactggaggcagctaactctaggctgttactcctgatcgcgttgccattgccgacacgggtacactcttcattccttaacatgtgctgttctgttctaggaccgtgacaaacactcatcgttgggtggggctctagtgcagtccgttggtgccaatattttataagcgacgttttcaaactatgtgaagatcctttcttttcttttctttctttcttttttttttttttttttttttttttttgagacggaatctcgctctgtcgcccgggctggagtgcagtggcgcgatctcggctcactgcaacctgcgcctcccaggttcacgcgattctcctgcctcagtctcctgagttgctgggactacgggcgcccatcaccacacccggctaattttttgtatctttagtagagacggagtttcagtatgttggccagactggtctcgaactcctgacctcaggtgatctgcccgcctcagcctcccaaagtgctgggattacaggcgtgagccaccattctcggctgaagatccattttaagaagatttattcctctatgatggagaagtatgaaaaaattgggaaaattggagaaggatcctatggagttgttttcaaatgtagaaacagggacacgggtcagattgtggccatcaagaagtttctggaatcagaagatgaccctgtcataaagaaaattgcccttcgggaaatccgaatgctcaaggtaattgattcacttttccttttttttctttttcgagacagggtttcactctgtctcccaggctggagtgcagccatgtgatcatagctcacagcagcctggaactcctgggctcaagccatgcttctgcctcagcctcctgagtagctgggattacaggttctagccactgctccgggatccactttttctttaaagtgaatttttagggatgaaagaaataaagtgagtcatgttatgttaaaagaatgtcatgggacatggttatatcttacttcatagccttttgacttcagtgacacaaatgggatatctgtgcacaagtcactaattatataatgaactagaaagcagagacaaaagtgccaggtaaggtggcattcacttttagagatgctgtgggatatttatttttcttccccataatttctctcccacctgtagacctgggttttcaaggaccattacaatttgatagtataggaatgtaagacaattcaattttgctggcattgttgatttttaaacttctaaggtatttcctattggtatactcagtctattaagagaattaacatttacctgttttcaaactgctaggaagctcacagattctcattacacctcatatgtatttactgctgagcatcatcatgtcccgtttctaaaaagaagcgtttttcttaaagaagtgaaatgatcactttctaattttttttaacattttttagagatgggatcttgctatgttggccaggctggtctcgagttcctggccttaagtgatccttccaccttggc

SEQ ID NO: 1811 - DNA, 6000 bp, Homo sapiens
gcagaaaccctgtccctgctaaaaatacaaaaaaaataagctgggcttgatggtgcatgcctttaatcccagctactcgggaggctgaggcaggagaatcacttgaacccaggttgcggaggttgcagtgtgccgagatcacgccattgcactccagcctgggcgacaagagcaaaactccatctaaaaaaataaaaataaaaataaaaaaattattttgttgcttaagtatagatacttgtgtctaggaaaaaaaaactaagcatgtcaaaattttaataacagttaactctgggcagttggattataagtaattatattttccttttctacttttctgtaatgcctaatataaagtatctatgatttttaaaaaatgttttcattattaaagtaataacatgctaattatagaaaattcatacactagaaaaataagtgttatgtgcagttttttttctcccattcctcctctagaaacttttttctctgcatgggtatattattttttattttgttctcaaactctcttccccacaactaaaatgtttggaatagtacttctttttttttttcctatcagtcctttgattgaactctttctccatttttgttccagcaactagggagaggggccccatttcatactatttttaaaaagctatttcaaataccttgaagaacagtttggacgagtgtctcttagagtcctattttattctcttggctcttcctccatcctcttcctgttagtgaaatccctaaagtattatattataccttttgttggcataaatgagtaagcaaattttgtttgttgttttttatttgagaaggggtctcactctctcacccaggctgaagtgcagtggcacaatcacagtttcctgcatcctcaaactcccgggctcaagggatcctcctgcctcagcgtcctgagtagctgggactacaggtgcaggcttccacacccagctaattattatttttttttgtagagttggggtcttgccatcttgctcaggctggtctcaaactcctgggctcaagcgatccccctgcctcagactcccaaagttctgggattacaggtgtgagccaccacacctagcccagattttttagttggaataagataatgagtctatcccaaaatgtcttcaatattttatattcatcaattcttattgtgttttaaagctgtaaaatgtaaagctgaatttgattgtgcgtctgtgatccttacgtaatcttactgaaatgtgaacaatgatattctttcctagtttgatgttagtatttgatgtatgaaatctgtagttactcttaagccctttgttttggtttaattacagggttgtcgttttggaaagtaggccaacagaaaatcctactgcacacagcaatctctacatcttggctggacatgaaaatagttactaagcaacagaaactgatctcaaatgacaggaaaatgaatatactccattgaaaggaaaaataaggaaattcaatacaaactgcactatgatttgctttaactattatgggttatattgcaaatgatctgtactttagggtagaattcaatattttctgcagctggaaacagctagtctatctcttgccactgtgtggtggttatatcaagtttgcttaataaaagctatgagacaaatagtcctctagttccaggaaacacagtctttttttaaaaaaaacaatgtttgtaacaagggtgccatggtatttttagataactcgtgattatcttaagagaggtaaatttagtgatcattttatatcatgtcttattccttcttaatgaacataatttgttaaattctcaagcaaggttttcacttttatattggccattctgtatgtttttgtaaaacagaatatttaatccttatttattaatctcttgctggagtggtgtaatgtatctaacttttagcaaaggagggttgcagagcagcttaaattttttttataatgtataagaattttgtttatcttttaagagtagtaaagtactttgagtgtttgggggttcaacacacacatgcaattttgcttaacaaaagtattttataatacagtttcatacagaattaccttaaaagggagtcttatgttttcaactacagatagttgtaagggatcatacagaagatattgatgatagttgaaatattcttagaaggggtgtgtatgtctagctgtgtctaccatgtgtatgtattcttgacaagcagtataaaatacctgtgatttttctttacattagggataatgcataaggaattaatcttcatatatattatcatccctaatgtagcagggggaagtatttaattgcccatgatatgtattttacttatactatgccagagaggaaactataaagtaattacacatgtaatcttgggtttttcacatatgtaggtattcattttgagtaggttgaagaagaaaaaaaatatttaaatgaattgaattcctgatgggatagtatcaataagtatttaaaagccagtattctaaaaataataaagggtagggtcatttttgagtttgtttttcttttgctattgttaatattcaaaattaaagtgttacattggtacctgttgtcttaatgcatttattgagaacagcattgagatgatgaacaaggggttagcaatagcaaactctataattattttgactaattacttaagaggaaaacagtataagtatctcattcagtatttagcaattctgtaaaataagtattatctctatttttcagatgaggaagtaagggtttagcaaggttaagagatctatccaatttacacagcaagttagtagttgagcctgaccatgagtcttctgactctgttcttttcactatgcaatacgcaaacaataaaatgttatacaaatggaatataaagttatttattctttaaaaatgcacatatgatatgatttcagtaagtgtgtggctgtttattttggctatgttaagaatacgggatacagtagatgacaggggaaccatcctcaaaacaggggacatttacatgatggataagaaagccagaatcctccttttcttactgaatcctggcagccagatctttaccatcccatggtggaataccgaagagtcttctctgtgaaatctgaccaatgcaagtgaaaaggcctcattaagatcttgatgtcagacatgtcccggctaaactgcccagctagatgacactacagtgaaaatcatagttggcaatcccaccatcccacgcattatgtctagaccttgcagttagtcttttagtcctgtgctcttaaaaatgagcaaacaaccaaggattacaaataaatgaaagagaaaaaacagtctggggaaaacagaggaaacaggctatgaagggtaaggagaacatcaaaagaaaaagtattttcagaaggatgttgcaaccatgagtgagtcaagggcagggtacttttaaaaagttgggtttcaaaaaaacaaaaagagctcttagaaaataatatgacagcatagctgaataattcaactagatggcttagaatataaagttgaaatttctcaaaaaaaatttttaaatggaaaatgttgaaaaaagttaagaaaattgacagcccaggaggtctaatatgtaatctcccagagttccaaaaagaaaacagaagaaaccattagagtgtttcaataatttttccagtattaaagaatatcagagtctagattgaaagaacacagtggatgaaaaagacctttaccaaagcacatcattacgaaatttcaaggacaccggagtcaaaaagaagatctacatttccagagaaaaaggtcaggtcagataccaaggaataagactcaggatacctttatttttattttttgagacagggtcttgctctgtcacccaagctggagtgcagtggcacagtctcgactcactgcaacctccgcctcccaggctcaagccatcctcctgcctcaacctcctgataagctgggactacaggcgcccaccaccatgcccagctaaatttttttgtattttttatagggtttcaccatgttgcctaggctggtctcaaactcctgtctgcccacctcagtctcccaaagtgctgggagtgcaggcgtaagccactgcatccagacccgaatagctttaaatttcaacagaagcaatgccttcaaacttgtgaaagaaatttccaacctaaaattctgtatctgactaaatgtaacataaaagtcaaatgaagagtataaaaaaatttgcctcctatatatcctttctcaagaagctactaaaggatgtgcttcataaaaagggcataaaccaaacaaaatgacataggatgcaggaaatgggatttagcacaggagagaaatgaaagaaatccccagatgatgaggatggaatatccaaggatgaccactacaccaggcatagagagtatattgaagcatatcagaagatcctggccacatgtttttagaaagattaataaaatatccaatgtatctcagtatcttaagagtgaggcaaccagcaaactacgaggttcttcctgaaacaaagcctgagtcaagaacgtgggttagtttattttagagatcccagaaactaggagtgagggacttgtgatattgcgaaggagaaaggggaaagtcagtataaaacatggtgtattattgaggtcatttctgtgtagacagtgggagcttgattccaccaggtcctcaaagaagctatgtgatagctccctgaattgcctcctgaaagacaagtggctggagcatttaaccgtacgctgtcatttttcactcatcaagttgctgccaagggcatcatctccttgcacatggggcagtttgcacatgggcacagtaggctccttaagtgtcaaagaagaccctgagacagaaagctgaaagagtaggaaatgggtcttcagttcccatggagctgtccactgatactggctggaatcagaaggtgggtggaggagatgcttttcaaggctccagggttcaatcagaggtgacagtgattctggagaaaaaccaaccaagccaaacaaaaaactggcagttaactccaggaaagcaaaatgggcaaaaaaaaatgaccactggatgaatggcataacaatgtttgttaacaaaatattcatctaatcaaaattgcagcaactatattgggagaggacatggtattgtggaggttagaaaagttatcaaattctcattttccacagtagaaaatcagtggataatacctaaaaactgaaaatcaagggattacatcaaacaaaatctgcacagcaaaggaagcaatcaacagagtgggagaaaatatttgcaaaccatacatctcttaaggggttaacatccaaaatacatagtgaaataactcatagcaaggaaacatcccaattttaaaatggcaaggccaggttgcacggctcacacatgtaatcacaacactttggaaggccaaggcagaaggatctgttgagaccagtctgggcaacatagcgagaccccatctctacagaaaattttttaattagttgggtgaggtggtgcacacatgcaatcctagctacccaggagtctgaggcaggagaatcacttaagcccaggagttcgaggttcagtgagctgtgattgtgccactgcactgaagcctgggcaatagagcatgaagaccctgtctccaaaaaaaaaaaaaaaaaaaaaaaaaaaaaagcaaaggacctgaacctgaatagacatttctcaaaagaagacatacaaatagccaacagggccaggcgctgtggctcacgcctgtaatcccagcactttgggaggccgaggcgggtggatcatgacgtcaagagattgagactgtcctggccaacatggtgaaaccccgtctctactaaaaatacaaacaaattagctgggcgtgatgg

SEQ ID NO: 1812 - DNA, 6000 bp, Homo sapiens
gccataaaatgtaacagtgtgtgcacagtcagtgggttcttggtctcaccgacttcaagaatgaagccacggaccctcgcagtgagtattacagttcttaaagatggcgtgtccagaatttgttccttctggtatttggacatgttcagagtttcctccttgtggtggattcgtactctagttagcttcaggagtgaagctacacaccttctcggtgagtgttacaactcttacagcagcgcacctggagttattcatccctccccgtggcctcaggggcctcactgacctcagcagtgaagctgcagacctttgcggtgttacaagctctctaaggcagtgcagctggagttgtccgttccttctagcagattcacagtctcattggcttgatgagtaaagctgcagactttcacggggagtgttgcagttcataagcgcagtatagacccaaacggctagcaacaacaggatttagttgaaagaacaaaccaccggcagccccctcaccacagaaacagactccaacaagttacgtgctagctcgctcagcctgcttttattcccttctctggccctactcacatcctgctgattggtccattttacagagagctgattggtccgttttgacagggtgctaattggtgcatgtacaaaccttgagctagacacagagtgctgattggtgcatttacaatcctttagctagacacaaaagttctccaagtccccactagattagctagacacagagcactgattggtgtgtttacaaactttgagctagacacaagagtgctgattgatgtgcatttacaaacctttagctagacataaaagttctccaagtccccacccgactcagtagcccaggtggcttcccctagtggatcctgcgccctggccggaattgcccaccagtcccgtgcggcgcgccgccactgctcagcccttgggcggtggatgggaccgggctccctggagcagggagcggcgcccatcggggaggctcgggccgcccaggagcccacggagagtagggggcgggggctcgggcatggcaagctgcaggtcccgagccctgccctgcgggcaggcagctgaggcccggcgagaattcgagcgcagcgtgggcgggccggcagtgctaggagacccagcgcaccctccgcagctgtgggcccaggtgctaagctcctcactgcccagggctggcggtgccagtcggctgctccgagtgagaaatgacagcgtgctggcagtcctcacagccctcgctcgctctcggcgcctcctctgcctgggctcccactttggcggcacttgaggagctcttcagcccaccgctgcactgtgggagctcctttctgggctggccaaggctggagccggctccctcagcttgccgggtggtgtggagggagagcgggaatcggggctgcgcatggcgcttgcgggccagctggagttccgggtgggcgtgggctgggcgggccccgcactccaagcagacaggccgggcaatgaggggcttagcacccaggccagcggctgcggagggtgtactgggtcccccagcagtgccagcccaccggcgctgcactcgatttctcgccgggcattagctgccttcctgcgggcagagctcgggacctgcagcccgccatgcctgagcctcccacagcctccgtgggctcctgtgcggcccgagtctccccgatgagcgccgcctcctgctccagggcgcccagtcccatcgaccacccaaaagctgaggagtgcgggtgcacggcggcggactggcaggcagctccatctgcagccccggtgcgggatccgctgggtgaagccagctgggcttctgagtctggtggggacgtggagaacctttacgtctagctcagggattgtaaatacaccaatcagcaccctgtgtctagctcggggtttgtgagtgcaccaatcgacactctgtatctagctactctggtggggccttgcagaacctttgtgtagatattctgtatctaactaatctggtggggacgtggggaacctttgtgtctagctcagggattgtaaacgcaccaatcagcgccctgtcaaaacagaccactgggctctaccaatcagcaggatgtgagtggggccggataagagaataaaagcaggctgcccgagccaacagtggtaacccgctggggtacccttccacactggggaaaatttggtcttttgctctttgccgtaaatattgttactgctcactctttgggtccgcactgcttttacgagctgtaacactgtaacactcaccatgaaggtctgcagcttcacttgtgaagccagcgagaccatgagcccaccgggaggaatgaacaactccagactcgctaccttaagagctgtaacactcactgaaggtctgtagcttcactcctgagccagtgagaccacgaacccagaaggaaaaaactccgaacaccggaaggaacaaactccaggcgtgccaccttaagagctgtaacactcactgcgagggtccgtggcttcattcttgaagtcagtgagacgaaaaacccaccaattcaggccatacgagtgcggagcccacccagctcgcgcccacccagaactcgcgctggccctcaagggctgcgcgcagcctcggttcccgcccgcgcctccctctctctccacactgccccgcaagcagagggagccagctctggtctctgccagcacacagaggggctcccacagtgcagcggcgggccgaagggctcccgaagcgtggctagagtggacgccaaggccgaggaggcactgagagcgagtgagggctgctagcacgttgtcacctgtcgataggtgcacctaaatacgggttcattatttgaccaaaggcgggattctacgtctagacatgcatacccacctacattctcttgtacacagtaccatggccgtttctaatatgaaatggaaacctacatatcaaaacaatagctataaatacgtggtgggtgtggtctgttccttaaccctactaaggccttcatctgaggaagcagatctatattaaaagagagcagtatttcccaagtagcccttgagttcacacaaaaattttgttttctaatttggcctttgatttgattttgttttctaatttggcctgagataatcagccaatatggtcaccatattgaacagcacagatctaaaaggatttcccgagtatggaaaatctctgtgggtgtctaggatggttaattttgtgcatcagcttgactgggccatggtgcccagttatttggacaaacattattctggatgtttctgtgaaagtgtttttggatgagatttgcattaaattgggaaacgttgagtaaagcagactgccatccataatatggatgggcctcatccaatcagttgacgagctgaatacaacaaaaggctgaccctgccctgtgcaaggggtaattctgccagtagacagccttcagactttacatgcaatattggctcttctttgttctacaacagcttttggactcgaagtacagcctttcctgagtctccagcgcactggcctccccccatcagattttggactctccaagcttccacaagcacaggagccaattccttaaaataaatctgtttctatatccatatatacacatcctattcattctttatctctgggcaaccatgactagctaatacagtctctaaatcaaactgtggtaccttctttactaaggaattccttctaatagctctatacccattggctttcacaacatgaatcaggggttgaaatttctgcatatttttctcagatctgctccaggcgacttcctttcccatggctagttaaatggggactggagaaggcggagaaatactcacatttttaaaagattacagctaattatgtagacacactggcccttagacctatcttacctggcattttataatttccctttcacacaatataatttaattcatatttgggggacaggaatattgatctacactgtaacttgtctagtttctggaacgataaactaaaacttcaagcatataaaatatgtttatactctaaatttttagttttttccctagtatttgtatgtctagatataattacaaagtctatgtgatgtttttcatgtgacgatccaatacagtgcttccctgagcccttaaaaaataaaaaataaaaatacaacttaaagaaacaaaaactccctaccgtagccgctacaagggaggctaaggcgggaggattgcttgaggacaggagttcgaggccagcctgggcaacatagtaagacttccgtcacaaacacaaaaactcccaacccgggttcgagaccagcctgaccaacatggagaaaccccgtctctacaaaaaatacaaaaattagtcaggcttggtggcacatccttgtaatcccagctactcgggagggtgaggcggagactcgcttgaatccgggaggcggaggtggcggtgagccgagatcgcgccattgcactccagcctgggcaacaagagcgaactccgtctcaagaaaaaaaaaaaaatcacctcccaaccgtatggaccacgctgacatcctgccatcaagaagcaaagctttccagcgtcccccaagcgctagggccgccttctgactcttccgccccgcctccgccccctgcactctcccaactggcgggaggagggcgccctcccagccaatcaacgtcccacagggcccgcctcccgcgcgtctttcaaaggtcttctaggaaccagtcagcgattagaggccgagtcttcggccacccaaaggcggagtaagaaaccagaagcggatctgattggttgctggaagacgccgcgcccacctcacagaaggacgaaccagtgagctaagctgcggggcgcgggctcggccggggcaccggtgagtcgccggcgctgcagagggaggcggcactggtctcgacgtggggcggccagcgatgaagccggtgagtcggacgtgctggggtttggaggagcgaggcggcagggacgcaagcggtcccggggacccgatcctgggccggagggcagccctagcctggtagcagtgcgactggcgccgtaaccgttctgcgggtcggggaggtgactcgcacgggcccagcacgggcacgagagacgaaggagcagggtcggtggccgacgaaggaaagacggacattcgctgtgcacctgctgtgggctgtcacctgtcccctgcggggtctcataagcctcccagccgcccagccaaagagggccgagcctcgttgtaccgaggaaaccgagccgaagagcttgagtgtcagcgatgagtgggcgcgataccccagccccgaagggtggccgggcgctacctgcgcccacagggcctggggaaaccttgagtacgaatgccacgccgcggcttgtgggcgacaccaccgctgtcaccatgccccagggccacctggcaatgctgctcttttcccgtgacgttcagaatcacagggcctggggaagcagaaacgtccagctctgttaggattaataaacctggtgaatgggccacacaaatttgaaatatgaatcatcaaagttgctttaaagaaaaaacagatgcaggcaaggagctgaagatcccccacctaacccatatttcctactgcccggcttgacaacctactggaagcctttcctttgggtgcagttgattataatacttcagatagagccaaagcaacagaaatccatagcctagggccgggtggtgtctcgcgcctgtaatcccaacactttgggaggccaaggcgggcggatcacttgaggccaggagttggagacaagcctagccaacacggtgaaaccccgtctctactaaaaatacaaacattagctgagcgtggtagtgcacgcctgtagtcccagctactcgggaggctgagcca

SEQ ID NO: 1813 - DNA, 6000 bp, Homo sapiens
gttgtcacctgtcgataggtgcacctaaatacgggttcattatttgaccaaaggcgggattctacgtctagacatgcatacccacctacattctcttgtacacagtaccatggccgtttctaatatgaaatggaaacctacatatcaaaacaatagctataaatacgtggtgggtgtggtctgttccttaaccctactaaggccttcatctgaggaagcagatctatattaaaagagagcagtatttcccaagtagcccttgagttcacacaaaaattttgttttctaatttggcctttgatttgattttgttttctaatttggcctgagataatcagccaatatggtcaccatattgaacagcacagatctaaaaggatttcccgagtatggaaaatctctgtgggtgtctaggatggttaattttgtgcatcagcttgactgggccatggtgcccagttatttggacaaacattattctggatgtttctgtgaaagtgtttttggatgagatttgcattaaattgggaaacgttgagtaaagcagactgccatccataatatggatgggcctcatccaatcagttgacgagctgaatacaacaaaaggctgaccctgccctgtgcaaggggtaattctgccagtagacagccttcagactttacatgcaatattggctcttctttgttctacaacagcttttggactcgaagtacagcctttcctgagtctccagcgcactggcctccccccatcagattttggactctccaagcttccacaagcacaggagccaattccttaaaataaatctgtttctatatccatatatacacatcctattcattctttatctctgggcaaccatgactagctaatacagtctctaaatcaaactgtggtaccttctttactaaggaattccttctaatagctctatacccattggctttcacaacatgaatcaggggttgaaatttctgcatatttttctcagatctgctccaggcgacttcctttcccatggctagttaaatggggactggagaaggcggagaaatactcacatttttaaaagattacagctaattatgtagacacactggcccttagacctatcttacctggcattttataatttccctttcacacaatataatttaattcatatttgggggacaggaatattgatctacactgtaacttgtctagtttctggaacgataaactaaaacttcaagcatataaaatatgtttatactctaaatttttagttttttccctagtatttgtatgtctagatataattacaaagtctatgtgatgtttttcatgtgacgatccaatacagtgcttccctgagcccttaaaaaataaaaaataaaaatacaacttaaagaaacaaaaactccctaccgtagccgctacaagggaggctaaggcgggaggattgcttgaggacaggagttcgaggccagcctgggcaacatagtaagacttccgtcacaaacacaaaaactcccaacccgggttcgagaccagcctgaccaacatggagaaaccccgtctctacaaaaaatacaaaaattagtcaggcttggtggcacatccttgtaatcccagctactcgggagggtgaggcggagactcgcttgaatccgggaggcggaggtggcggtgagccgagatcgcgccattgcactccagcctgggcaacaagagcgaactccgtctcaagaaaaaaaaaaaaatcacctcccaaccgtatggaccacgctgacatcctgccatcaagaagcaaagctttccagcgtcccccaagcgctagggccgccttctgactcttccgccccgcctccgccccctgcactctcccaactggcgggaggagggcgccctcccagccaatcaacgtcccacagggcccgcctcccgcgcgtctttcaaaggtcttctaggaaccagtcagcgattagaggccgagtcttcggccacccaaaggcggagtaagaaaccagaagcggatctgattggttgctggaagacgccgcgcccacctcacagaaggacgaaccagtgagctaagctgcggggcgcgggctcggccggggcaccggtgagtcgccggcgctgcagagggaggcggcactggtctcgacgtggggcggccagcgatgaagccggtgagtcggacgtgctggggtttggaggagcgaggcggcagggacgcaagcggtcccggggacccgatcctgggccggagggcagccctagcctggtagcagtgcgactggcgccgtaaccgttctgcgggtcggggaggtgactcgcacgggcccagcacgggcacgagagacgaaggagcagggtcggtggccgacgaaggaaagacggacattcgctgtgcacctgctgtgggctgtcacctgtcccctgcggggtctcataagcctcccagccgcccagccaaagagggccgagcctcgttgtaccgaggaaaccgagccgaagagcttgagtgtcagcgatgagtgggcgcgataccccagccccgaagggtggccgggcgctacctgcgcccacagggcctggggaaaccttgagtacgaatgccacgccgcggcttgtgggcgacaccaccgctgtcaccatgccccagggccacctggcaatgctgctcttttcccgtgacgttcagaatcacagggcctggggaagcagaaacgtccagctctgttaggattaataaacctggtgaatgggccacacaaatttgaaatatgaatcatcaaagttgctttaaagaaaaaacagatgcaggcaaggagctgaagatcccccacctaacccatatttcctactgcccggcttgacaacctactggaagcctttcctttgggtgcagttgattataatacttcagatagagccaaagcaacagaaatccatagcctagggccgggtggtgtctcgcgcctgtaatcccaacactttgggaggccaaggcgggcggatcacttgaggccaggagttggagacaagcctagccaacacggtgaaaccccgtctctactaaaaatacaaacattagctgagcgtggtagtgcacgcctgtagtcccagctactcgggaggctgagccacgcaaatagcttgaacccaagaggcagaggttgcagtgagcggatatcacgccactgccctccagcctgggcgacagagcaaaaccctatctcaagataaaagaaagaaagaaaaaaaagtccgtagcctaaattagccgtcctgtgatcttctagtaccaagaccgttgtagaatatagcttcagagctagaaagagcattaggtgcttacaattgctaatccctatgttgccatgtggagggacatcagctgtccttcactcctggcctctttctccacctgtccccattgagttatctgatccccgagtttggaaggaactgaacaccagtatctcaactttttctttccttctttcttgggatctacctgcctgcctgcagaaggtgctttctggtccactctctggcacacaggagccccagactgtccatggccacctgtgactgggtggatacatttgtctaattctggggtgaacaaggggcaagcccacgtggcaacagctttaagctgcatactccatttgatatacaataataaaactccatttctttatctttcaattggtttcaactagggagtgagaaaagggtatgggttttgttctgttttgtttttgtttttctttttcttttgattccttaaaatttcaacaaggagtgtagaagtcttccatgtcaaaatgctgcaggattaagttccaactgcttagatcagcatacgaagtctatctcaatctctctagtctagtgattcataaagttggaggcaggttatttcacctacaccacccccaccaaactactaggccatgtggggatgttttttgagaaaaggggtgggcaaaactacttcatctcctctactccatctctattttgatatcacagttcctcaatacacaagcccttggcttaacttctttcctttcttttttcttcttccttttttttttttttttttggcagagtcatgccctgtcagccaggctggagtgcagtggtgtgttcctggctcactgcaacctctgcctcctgggttccagggattctcctgcctcagcctcccgagtagctgggattacaggcatgtgccaccatgcctggttaatttttgtatttttggtagagccaggttttgccatgttagccaggctggtctcaaactcctgacctcaggtgacctgcccaacttcgcctcccagagtgctgagatttacaggcataagccaccgcaccctccctttcctatcttctttaaaacctgctcttccttcaaaacccagctaaagcgtttcctctgtgaagccttctccagctacctacgtggtcactctcttctctgttccacagtgtatagttctgcttccatttcagcacttatataatacctttcttctgtaatctatgcacacatctgtctctccagccatactgaaggcaggctatttatcttatagatcttttgcatctccagtgcttggcaaatgaaggtggccaagaaatatttgtgaatgaataaatctcctcactttatagttgaggaaaatcgagatccagaaccaactgaagtggcttgtcagagagtatacagtaagtggcagaaccaagatcagaagccagatttcttggttcccaatccaactctctttccactatgcagtgctataattattaataggaaggtaaatagcagtcatttattattaatattgctgatctcgttaatattctggattgatggctgaatacattgcaaatatgaattcagtgtgtgtttagacaaggattagctatcctaaaactacaaaaaaattctttacagttatttaacataacatttcttttgaagcccagttcaatacaaacaagtgagtttgactcatcagatgaagagcctattgaagatgaacagactccaattcatatatcatggtatgttagcatttctgatcaatgatgagctaaaatcacaatctacatcataaatgtaaatttagttacatcataatcttagtagaatgtagttcacatattgaaaatgttaagggattatccccctctgattatataattctaatcattaaaggatcttctaactccatgattcatttactatctataatacagaataagacccttttttttttttggcccttctttatacattctaactccatgattcatttactctttataagaccctttttttttttttggcccttctactaacttagtagaaggaagtaagtaggaaatagaggtaggattgaaataatctcccatttagtatcaaaatctacttattcttttatgacaaaagaataatataccaaatatgagatgagatatttaatcatttctcattaaatcaaatcctaggtaatacttagaagtaatgtcacagtaatgcatctatcaacagactctgtttaagataaaagccacatcaatgcaataacaaaaagtttctacataaaatcagccttttaatcttggcaagtgacttatggttataccagattctttacaatgagcaatcaaatgctttctctcatcactgcaaatataatagtctctcttcttaagaaagcactatccctactgtcagaagagaaagagtgtcctaaaggtcttttgtcctgccatcaaatagcattactttccatttccacttaaaactcccatttaaacacaaaaattcatctaattttcaaagtcaggtggtatttagatgatgcctcctgttttcctttaaatcatcttctgacatgcagacaaggtgagcctctgtccctgagtactgcaaactgggaatatgatttcttcacattatttctttttaaccaaaa

SEQ ID NO: 1814 - DNA, 6000 bp, Homo sapiens
acagagcaagactctgtctcaaaaaaaaaaaaaaaaaaaaaagcagcttttgacttctaaaataagatgtttgaatctcaagaaacacagtcatcttgaaaaagcctgacactaccaagaaataaaggctttataaacttttaaagttcagttaacatttcaaaatcaagaccttggcaacagtaagagtggtatttaatgtatgccatacggcagggaaagtgaggctatgacataaggaaagtacctgccaagtaggagggtaggaaagtcttctgcttgtgatctgctggagtgtggagaggagaaagggctagagcaggtgcagcatcatatccacccgttctggcttccgccttgttccgtgaaaaggccataaaaagctgaaggagcagagaaaccaaagaaggaggcagacaaatccagtttgttggttttatgtgatttattagggaaacttacagacagaaatgttgtcttgggcagccgcaagacaattagatcttcgcactacaacaccccagacccagggcttatatcttgggaaaagagcatatgtgctctggaaggaatgtgtaggtggctatgggtgtcagaggagagcctatgatttctgtaacaacaagggttgttttggaggaaacttaaaatgaatagatgttcctgttagagaaacccctgcttttcaggcctctggtttaataatgcatgaacagagggactccatcttgagtgagtaactaagcactcacaaggcttataaggttaatacttctggtcgaaaatagtcacatctcaagctgaccaccacttataaatgcagagtatttataaccatacagagcatctcccaccaagccttcagaatgcccagatgtcctaagagtgcagcccactttgcttaaagataccattaactaagaggcttgggttgaaggattgattaatggtcacctgtaacaccaatagcccctacctttagtgagcacatctgcatgttccaagtttaatattgctccttttagtttcttataagtatagaggcactaaaaaagaatggaatgttccttctcctgctgaagactcctactttgtaacagagtagtttccaataaacttgcttatttcactgttctctctgactcgcctcaaaatctttcctacacgagatccaagaacctgctcttagggtctgcatcgggaccatcttttccagcgatgtttctacataaagagtaagtaatcccagcactttgagaggcagtggcaggagaatcacttgagctcagaatgttgaggctgcagtgagctgtgatcatgccactgtattccagcctgggtgaaagagcaagaccctgtctcaaaaattaaaataaaataaagacagttttgtccccacatccctccaggctggaatctcagggaagcaggtggttgtagcggaagcacccaaataggtggggtattggggctgggtgcagtggctcacgcctgtaatcccagcactttgggaggccaaggcgggcagatcactgaggtcagtagtttaagactagcctggtcaatgtggtgaaaccccgtttctactaaaaatacaaaaattagccaggcatgatggcgggtgcctgtagtcccagctactcgggaggctgaggcaggagaatctcttgaacccagaaggtggaggttgcagtgagccaagattgctccactgcacgccagcctgggcgacagaatgagactctgtctccaaaaaaaaaaaaaaaaaaaaattaaaaaacaaataggtggggtactggagaaactgaagagatcggagctggtagtccactttccctctaggaaaggaggagaggccttacatttggcttgcttcacaccaccttcaccatggtgctagagcaatggcattcagtggcagaggtagcctgattgggcatcctgagataactgctgcttctcagtagcctgcatgtgacatatgtgagaatctacatgtttacatattgccccagtaagtaacattggagatggtaagcagtctggtgagctagtggagctaaggagccatagcttatgagggttttacaaccagaggtaaatggctggaaccctggatctccgcagtgagggctggcctggtaccacaaaaagccagatgaaacccgcttccccttagtgaggacctacaggtgtcatgcagagctgaggtctcattttcctgacctccaccatcaggtcatatgaacaccttgtacaatcagatactgtcttgggaagaatcaagagaagagagaggagagactaaacattttcctaaaggagaccagcttcctaaaaggtgcaattaaacttgaagagtctaagatactttttttttttttttttttttgccggaatcttattctgtcgcccaggctggagtgcagtgacacaatttcagcccactgcaacctccacctcccgggttcaagcaattctcctgcctcagcctcctgagtagctgggattacaggtgcccgccatcatgctgggctaatttttgtatttttagtagagatggggttttgccatgttggccaggctggtctcaaactcctgacctcagttatctgcccacctcagcctctcaaagtgctgggattacagacgtgagccaccatgcccggcctaagatactttttattgataaatttaagctcacattgtcttctctttttaccccgtctaatagtagggtggggcttctttctttttcttcttttttgagacaggttcttgctttgctttttttttttttttttttgagacagcgtcttgctgtgtcacccaggctggagtgtagcggcacaatcgtggctcactgcagcctcaacctcccttgctcaagcaatccttctgcctcgcccagttaattttttaattttttgtagagacagggtcccactatgtcgctgacgctggtctcaattcctgggctcaagccatctccctgccttggtctcccaaagtgctggccttggtcttccaaagtgctggcattacaggcatgagccaccatgctgggtctagggtggggtttcaagctaaactagatcagttatagataataaagaacagtcattcttcctgttcatctgagagtcaaacttttttttaaaaaactctaatatagatactttgtgcttccaagtaatctcatggagaaaagcttatttcatttatttattaattcagtaatatgactacccgacatatactaggtaccggtggcacaaacatcaattatgtgtcattcctgtgctcagagagctgggttcctagcaggctaaatacactagtgagcaggtgctcacaccagaaataagagggctcccatacagttacatactgggtgctttgggagaggcatctccccaagggtttggaagcatccaggaaggcttgctggagaagggagcctttcagattggccaatatttttgttaagtgacaatatcaaatgatggcaaaactgtggatgaaaaactgggaatacaaattggtacatttctggagagcagtgtttttacaaaatctttaaaatgtacattttttaaaaccatagttccacctctagtaatttatcctaaggaaatactttagctgtagggatgttcattgcagtgttatttatagcaatgaaaaattctccaacagttgagggctgattaaagtatatattttcacaaatcagatatatagtaattaaaaattgtgttgtagaagcaagcttctcaaacagtgctgctccagagactacgtgctcatttgccaaggaatatgtgaggccataggacaaacttagttcatctttctcaacacgaattttactggtgatttaggagtgtgacagaggctactagttaactatcccaatgtccattctctttcctcctcagtaacaaaactcttgatttgtaccagggtgtgttgctgctcacgaataataagactacatatccccattctctgatgtggctagatgtggctttaggagtaaatgcaaaccaacgaggtgtcaatgaactgttatgaaagactttcagggaggccaccttgatggagctgactcacagggttgagacaagggagtgaccatttagctactttcagtaatttttaaaaagcttctgtgtgatttaaaaagttttttaaaaattattcttaaagtggaaacaaatacagtttcaaatgtttggctaattctaatttgaggagtacaagaagaggagaaaaggagggggatgtgggaggaagcggatgctttatttctaagagaatcttggataagcaatgctgattttcctctatgattaagtccaatctgaaaaggctgacaagtctcgtataaattgcttgtggtagagactcctttttttgtgttttcactgtgcttatggttatttcattttgtagaatccaagatgcccgccctcctcctcctcctcctccaccctctcccaaatttgcctaagatataataggcagggtttcaggatttagaaacgatgcacgtagatttcagactgcgcctctctctgacatcagaaaacctacattgcctaaggctggcacagagttggccccaaagtctacttagaatttgccggcggaacagcaatgaccactgggccacagcgcttaagacgcccgctgggtaccaatcctgggagtcgggggcggtgcgagtcgggccccccccatcccaggtctgcgtagccaatagctcgggacgggagcgggaggggcgtggcgtgtccggcagggggcgccgtgattggcacgccagctcccgctgtccgcgaggctgccctaaagtctagctcatgagaaccccaggcaagtgcggacctacaaagtttgtccgctccggggcactgtagtggcttttaccctggccgggcgggcggggctcagccgggctgggctgggctccgcggctggagccgggctctacccagagcaagaccctgatggctgcggtgtttctggtaacgctttatgaatactcgccgcttttctacatcgcggtggtctttacctgcttcatcgtgaccaccggcctggtattgggatggtaagtgtcccaggggtgagagacgaaggggcggataccgccagagtggggtcgcgacgagcagcagggggcaccggagccggagggccgcgggccggaggacgtcggggattcggtgtccccgggtgcctagaactccgactttctctgggaggaaaacaaggtggacgctgcacctgcgtcactgccctgcatcaccgtttggtccgtgtcgctggggcatcttggggtggtaccgcattggggtgttttactcagctttgtttctaggcgataaagcagccaggaagggcttgggcttgggcttggtgttgggagaaagtgcttctctagtaggcttctgtcccggattcgggcctactgtgtgtcctggatgagttagtcacctgtgctacagtgcacagactggacagtaagcgaggttaacagttgtgattctgacctgaatggagcccttagcctcagatctttcagagtaacttgtaactgaactgttaccgtttgagaatttaatggtttctgtatacattccacaccttttgaagtaatatttagtcgatagaattgtaaaatcataattttagagctggaagagaccttagaaatatgtaacaccgagggtaggacagttgcctattggagacaaggagaatggtctgttagataaccgctgagcaattcttctagcctagaggttcaatttctctcttgaggagatgctattgtatcatgtttagacaagccttgtaaataacgagttgaaaccgtgtaactagcccacaacagtttttctaggctgcagcctccaaaatccctttgagatgataatagttacaaaaagatcaaacagcagttctaagtggataacagccatggtctga

SEQ ID NO: 1815 - DNA, 6000 bp, Homo sapiens
agcattacctttaagtgatttgaatggtggttcttcattatttgataaatagaaaaagttttattttaatttctgaggatgtgcatttggcctacaacaactatatacctatttggtttttatatgtgaaacagtaccttcagattatgactcatttcttgccttatgggtcacagtaatatgactttatttggaaaataaaagatatataatggttgaattaagttagtttcatcattaacacctatttggttgtatacacctatttagtttttatatgtgtaacagtaccttcagagtatgactcattttttgccttatggatcacagtaatatgactttatttgggaaataaaagatatataatggttgaattaagttaatttcatcattctgtattctgtcatatttgctgtatagaaacagtctgttgggaagcatgtttattctgaacatgtttagcagtgaataaataagcacaataatgatcgaaagtgctcaattttaagatagtatccactctttttttgcctgcttgcagtcaccttgtttccatcaaagtccctgctgcacctatatcttatatgtctggtccctgtattttcagtaattataataatctcctttcctcattatgtgctaattattttttcagtctgatagttgattcctattaggaagttaaaagtatcttagagatctaagaggactgaaactttgacaatcatctgagtataatagaaacttagacatgaaataaacttttgatgaaattgtatcatggtaaaaatgtccttacacacaattgactacttttctgaagtatttaatatagattattcattaataaacatatggtaacattgttttgtgatattcgtaatatgcaaagtacgttcacaaacatgaacttatttttttcttctaacaacctggtttcttaggacagggcaaatattctcctttcacagactgaaacagagtcaagaaaaatcccagtcattcaggcagtaagagatggaacaagagcttgactctgagctttttgtgtgtgtttgtttgtttttgttttttgagtttattttttttagcaggaatatcttcctgcaacaagtgtacattgagctttggaaggtaaagactctttgggaaatctagacccttcttactcatttgcagttaagcacctaggtttttggtttttaatattttcaaactgaagttccattgagctgaggtcagcttattttttccaagtcatggggagcagaggggaaggaaatggggatatgtaggtcactagagacaaagttacagatacataaaatgaacaggtctagagatctaatgtacagcataaagactatagttaatgtggtattgcttttgggatttttggtgctcttgccacatgcaaaaaaagtggaagtaactgtgtaagatgatgcgtaatttgcattataatagtaaccatttcactaggtatatatatatcaaaacatcctgttgtacaccttaaatatatacaataaaaatacaaaatacaaaagtcataccagcagtagtgtatttccagaacctagtacagtgcctaggatataataggggttcaataaagatttgataagtaaaaaaaaaaaaaaaaagtcatactagacaatgttaatgagcctcatagagcttgacagcgaaacaccttagctgtacatcccatgcaccttagcgtgcatgagaggccttctggcttcctccctcctttctctcagtttcagttagagataaataaaacctgttaaattggtgtctcctatttctagcttctttgttcttgaccctgtgtacttgggcaaggaagcccttctgcccccactgtgtgccccatctctgctgagtttcttgggttctgttctcctttttcctttggttcagcacaaaaggatcagatcgcagtcattttccctcccagcttccccattgcattccttttcccttcactgatagtgctctctaggtgctcagggtctttttttttttctaactttcttcccctgtccaaacagggagtgattgtgtatctgtgtggtaaaatatatatattttatatataaagtttaccattttaaccatttttgtgtgtgtgttttcagttcagtggccttttaggccagagaagagtttgctctcaggtccctgatcacactggatgaagactgtgtggcccagctgtagttgtgggaggcttgttcccatagggaagcctgagtgtctcccaagggttaacagccatcttctcttgtgctttgtgtatgtctctgtgtctgggtccttttgaatgtcttttattctcatctgtgggctccctccttttttcctgttaatccttgcttctcgtcttatttcttagattgggggtaatattggcactcaaatatatttattagtgtattttgtattaatgttctctgtttataattttaaaagcaaatggaccatttcctatttctttttcatatgtgttttttcagtattgtatgtgcgtgtcagggactatatttttttaaaaaatttattaataaaatcatttttattttaacagcaaagaattatatttaggtagtacagttaggaaccactttgttgttttagattaaaaaaaggaaagcaggaattgttactacaaaattttgactttaaaattttttcatttttagttaattacattggctttttttcagtattattcaaataatacatttgtggcaggaaaaaaaattagaaagtgtagataagccaaaaggagagaagtataataatctgtattctatcatccaaaaataatcactgtgaatatttgtctgtatctttccaaatctttatatatgtaattaaaaaagggataaaattatacattttatactattttgtgacctgctttcacttagtagtatattcaaacattttttccatatcaaatatttacccacaactacatatataactagtatgataatagcttcagagacttttaatattaaatcaaatgacaaaattggttttttttttgttttttgagacagaatctcgctctgtcgcccaggctggtgtgcagtggcacaatctcagctcactgtagcctctgcttcctgggttcaagcaattctcctgcctcagcctcccgagtagctgggactacaggcacgcaccaccacgcccagttaatttttgtatttttagtagagatggtgtttcaccatgttggccaggttggtcttgaactcctgacctcgtgatcgacccgcctcggcctcccaaagtgctggggttacaggtgtgagccactgctcccagaggacaaaattgttagtatgaagtgataactactattttctactaaccccatcattttgatttagtattaaaagcctctggtgccattactaaattaataaatctttataaacttgtaaagaatattgtgtttttgcaactaatgtagggttttaaaactttttatttgtacataatttcaaaaagttgcaaaaataaaaaagtaaaagatcacccatataccctgcacctggatctcctattgttagcatttctgtcctttgcattattgttctcccatttatgtatgtatgtgtgtattgattgattggttgagataggatcttgctctatcaccaggctggaatatagtggcacagtcatggctcactgcagcctcaacttcctgagctcaagtgatccttctgcctcagcctcctgagtaaccgggccaacaggaatgtaccactgtgcccagctaagttaaaaaaaatttttttctaaagacaggatcttactgtgttgccctggctggtctcaaactcctgagctcaagcagtactcccactgtgatctcccaaagggctgagattacaggcgtgagccaccacacccagcctacccatatgtttatacatacacatatatatgatcgtatatatattttaaatcaatgatttgagaataagttgcatacgtgatgattctttacccctaaatgcttcagtgtgtatttcctaaaaataaggatgctttcttatataaccacagtatagtcatctgctttataaatttaacattgatacagtattttatccaattcacaaccaattttcttctccagttcaggttctagtctagagccagattttgtatttgtcatggatctttagcttcctttagcctggaacatttccatactctgtcttttatgacatgagcatttttgaagggtatagtcacacacacacacacacacacacacacacacacactttttgtaaattaaaacattctcattttgtttgtctgatttttcttatgatcagatcaaagttttacatctgcagccagtgagctgcccgggtgatgtgtccttttcagagtgccacctctagaagcatgcaatgttcttttctctaattggtcatgttaattttgatctcttagtcaaggtgttatctaatttctccactcttctgtttttttctcccccttgatctgtgaggaggcactgtaagatcatgtaaatatcctgctttttattaaaaaaaatttttttgtcctagatttaacatccattgatgattcttgccagatttcatctttactgtgatggttgcaaaattattattttccaactgcagccctccctccagtcggttcttggcattctacaacaagcaagagacttcctgtctctcccatttgtttgtttgcttatctgttgtctctatggcctcatgaatttttcccccagtgttttataattcatggctgaatttaattattttgacgctcaaactgccatttccctgcttcctgccaagactgagggtttgtagtcaaactgtgcccacagattacttggattagttctctcaaaagtcagaaaaccatataaagaaatatactcatgttgttttcttccgtatcccttccacgccattcccacacaccccagtctttagagatagttgttgttttctgatttttcctccctgttttttattttctcttttttcttacacaaaagatagcacatactctatgctacatatgctgttttgtactttgctctttttcatttcagaaaatctggaaatcactgcacaccagtttgcagagattgtcttcactttttttttttttaatagctgcatggcactgcactgtgtgtatgctgtgcatattccatagttattctgccagtctcctgtgcttggacattcaggtggtttccagtattctgcagtaacaaataatcttatgctgaataattcatatatacatatcttaatattgttggaattgtatggttgaagtgtaaatgcatgttgttttgttagatattgccattggaattgtacctttttggaaaaaaacatttccaccaacaatatatgagagtgtatttccacagagtgtattgacaagcttctggatttttgttactttgatgagtgaataatggtgcagtattaattttaattaaacatcttttaatatggtcaaggctcatgtttatatctttttatgaattgtccgttcatgtcttttgcccatttttctataggattttggccatttttcttcagtttttaaaagttcttcataaattaggaatattaacctttaatttgtgacacaccttgtgaatatttattctagtttgtcatgtgttttgactttgtttatggtgctttttatcatgtatatttttaattcttatatagtcaagtgtatttcctctgggttttgagttgtagttaatgtctttccttacactgagactaaaatggaatttgttgattttcttctagtacttgtacagttttattttttacatttagatctcttatgtttctggagttgattcttatgtatggtatgaggaatgcatctaattatatatttttccaatagctatccaattgtcccaatactgtttat

SEQ ID NO: 1816 - DNA, 6000 bp, Homo sapiens
ttgtgcttaaatacagcacttggtacgtagtagggctcaatgccatgttgaattaagctccacagaatgatttaaatgatttaaccacttatctaagtttcacaggttctctgatttaaaaaacacaagtaagtaaataaatacaaattaatgctacttggaaaaatgctgattttagtactgtggcaggaaaacatataagatgagttatgagcatcttgtggtatcaaagagtaaggaagtgctaaaacaaataaacagaaacaaaaaaaaactatacaatgatgggaatatgtcaaagtgatagaggaacaaactgaaagagctgccaatggctatagctggaacaatttgagcaataaaataaagtagtatgggagtataacccaaagtataaaataaatattctaagaatccatcctgatataggcaaatgattaaataaataagtaatgaggggaaaggaagcaagatggcgaaatagaagcccacaccattcatctcttactggaacatcaaattttaatgactatctgcacacagaaccaaaaatcaggtgaacaatcatggtacctggttttgacttcaaatttccaaaagaggcattgaggaaggcaagagaaatagtcttgaattgctgacaccacccctcccgcatcctccaccagtggccatgtggtatggagagagaatctgtgcactttggggagggagagcgcagtgactgatggacttcacattatattcagtgctgccttgtcacagcagagttaaagctgtgctgggttcagccagcacccacgcatggagggaggatttggaccatccctagccagagggcaatagcctagcaattggaacttgagcttctcagcaaggcacaccacagcaggctgaagtgctctggggtcctaggtaaacctgaaaggcagtctgaacacaaggactgcaagtcctaggcaattcctaatgctaggcttgccttacagccagtgaactagcatggtaagtgacctagagtgacaccagctggcacaccttgtgccatacctccccaaaccccaggcagtgcagctctctgcaacaaagtgactctttccttctgcttaagtagaggagagcaaagagtaaagaggactttgtcttgtatctgggataccagctcagccacagtacgataggacattgagcagggtgatgaggctcccatcccaggccctagctcctagacaacatttctagacacaccttgggccaaaagggaacctactgccttgaaaggaaggactcagtcctggcaggattcatcagtccttgggccctgaatagcagcaataccagcgagtatgctgtgggccttgggctctgagatatgctggcttcaggggtgacccagcacattcccagctgtggtggctacaatggaagactccttctatttgagaaaagcagagggaaacataaaggaggctttgtcttgcaccttaggtaccagttcagccacagaggggtagagcaccaagagggttcttgggggagtcctcgagtccaggcttaggctcttgacagcatttctggatctgccctgggccagaggggagcccactgccctgaagggtgagttctaggcctggcagcattcaccgcaagctgacagaagaatgcttgagctttatgtgatcatcagccgtggcctggcagaaacccccatgaacaggtggtggtggtggctataggagaggctcctctgcctgtggaaagggaagggaagagttgaaagggcttgtattatggtttgaatgccaggttagctacagtagaatagaacatcaggtaggccaggcgcagtggctcacacctgtaatcccagcactatgggaggccgaggtgggtggatcaccaggtcaggagttcaagaccagcctggccaacatagtgaaaccctgtctctaataaaaatacaaaaattagccgggtgtggtggcggacgcctgtaatcccagctactcaggagactgaggctggagaatcacttgaatctgggaggcagaggttgtagtgagctgagattgcgccattgtactccagcctgggcggcagagactccaccttaaaaaaataataataataataataaaaagaacttcaggtaaattgctaagatttctgactccaatccctggctcccagacagcccagctctgggaacagccggggcctaggggaactcactgccatgataggtgctggcttaaggtctgatccagcacagtcccagtggtggtggccacagtgagccaccaccctcagttccagctggctcagcagagagagacattccatttatttcggagcaagtgagtgaaaagaacaagagtctctgcctgtaattcagagaattcttccagatctttgccaagactatcaaggtggtacctctacaagtctgaaaaaaccacagcattattaggcttggggcacaagtcccttcaaacaccctgaaagccttcccaagaaggacagccaaaaacaagcccagattgtgaagactacaataaatacttaatttttcaatgcccacacaccaatgaacatctacaagcattaacaccatccaggaaacatgatctcatgaaatgaactaaataaggaaccagggaccaatcctggagaaacatagatataggaactttcaggcagagaattcaaagcagctgttttgaggaatctcaaagaaaatcaacataacacagagaaggaattcagaattctatcagataaatttaacaaagaagctgaaataatttaaaagaagcagaaattctagggtcaaaaaatataattgacatgctgaagaatgcatcagagtttcttaatagcagaatagttttcttttctttttttttttttgagacaggttcctacttttttgtccaggctagggtacagtggtgcgatcatagctcactgtaacctcaaactcctgggctccagtgatgttcccacttcagcctcccaagtagtgggactagagatgtgcgccaccatgcccagctaatattgtattattattattattattatttggtagagatggggtcttgctatgttgccagtgctggacttgaactcctggcctcaactgattctcccatcttggcctcccaaagtgctgaaattacaggtatgagccaccattctcagtctctttttttttttttttttttttgagatggagtctcactctgtcacccaggccagagtggagtggtgcgatctcagctcactgcaacctccacctcctggattcaagcgattctcctgcctcagcctcctgagtagctgggactacaggcgcgcaccaccacacccggctaatttttgtatttttagcagagacggcatttcaccatattggccagggtgatcttgatctcttgacctcgtgatccccccgccttgacctcccaaagtgctgggattacaagcgcaagccacagtgcctggccagaagggtgaacattagagactgacaaccccacgtgctggaaagcatgtgaaacaagtggaactcttatatgtggctggtgggaattgtaaaatggtacaaccactttggaaaactgcttggcaattccttacaaagttagacatgggtgacggcacccgcctatagtcccagctattcaagaggccaaggctgcaatgagctatgattgtgccactgctctctagcctgggggacggagagaccctgcttctaaaaaaaaaaaaaaattttaagttaaacatacccagaatgacccagaaattccactcctgtatttcctcaagataaataaaatatgcccacaaggacttgtacgagaatggttatagcaactttgctcatcatcaccaaaaattgaaagcaatacaaatccatcaactggtgaatgcataaagtattcaatggaatgcctctcaataacaaacactactaacttctggttcacgcagacccaaaagagtacctatcaccttcatttttatagtgctagaaataagaggagtggttgctgatgtggtgggagatggacaggaaagaaacaggccactcttctgagtgatggaaatgctctacgtcctgattgggtggtagttacacagctgtttacatttaccaaactcatcaaattgtccactgggggggaaaaactattattttcactgtatacgaaaacttcgcctcaacaaaaaatgaactaaaaaagaaaaaaaaggggaggggggctggcgacgttgaaaagtaacgctaaactatgtaaggatttgataattggggtaagccttttctttaaaacgtctagtaaagaaaacattccaagaaggtctgctagattctgtgactaaacaaggacattaaaaagccctgaatccagcttggtcaacgtagtgaggccctgtctctacggaatttttttaaagttagccaggcgtagtggtgcgcgcctatagtcccagctactcgggaggctgaggtgggaggatggtttgaacacagcagctcaaggctgcagtgagcagtggtcggtgcccactatactccagcctaagggacagagaccttgtctcaaaaaaaagaaaaaagaaaaaaaaaaaaagccttgcgagctctgggggagatttcccgcagcccagctttgccagggacccagcctcacccctcgggctccaccgcccactcccgcccttcacctgacgtgagcgccccgactgctccactccttctcatcccgcgtcgcggtcccgcctattttccctctctcacccatcttttgaactggcccttcacctttcaatcaattcaaatatcgcacggagcaaaccaatcgcaagcctcgttgagtggaaggggtgggatcttccccggaagtgttggttaaagcccctccaatcagcggctcggtgcggcaagtttgaatttcgtggaggctcgggttgtgagggttcctgcttcggagtcggcggtggtcgtccagaccgagtgttctttactttttgtttggttgaggtttcacgctagaaggtggctcaggtaggtgggtgctggagagctggacggagaacactggcccgcttccgttgaaggtctagaagggtctgaggaccgggggctgcgagcgggagcaagtcagaggcaggctcctttaggaccgtgttacctgcccttcccgaagctgataatgcgagcctttagaagagtccatatgtttgccctgacctctgtaatagtcagcgtttcaccaccggggcgtaattgacctttggggtgaaactgttcttcactagctccgacattaaattcccgtagctcttcccaggtcccatggcaactaaaaacgcccggttgagaacctctagtcaagcaagattaacgcattctggactttcaagctggaggaaacgccactcagccaaacaaaatttaggtgtgtgtggagccagggctgccttgcttgggatcccagcttcaccaccttttagatatgctaatgtgagcagttaattgacctcatctgtatgagagcgataatagttaactacctttcagggttattctgataattgtacctttaatgttgtcctcgctcgctctttctcttgctgtggatagtgctatcctgtatttaatacataagtcttaatttttcttcaatctttagcgaattaatattgcaggagataaatagtagaagacagttctttatgaaaagcacagtccattgtcactttccttgggtcttagaggagaatgttattagcatgcaggtcagacagattctcgttttttatattttgttgattgcttagaatcatgtaacaatgtattgcattacttgtgccaatttttctattatctggagttttctagtggatttagttaattcttgttgaagaatataccatagtgtgtctatcacagagcctcccccttacctttttttgtttttgtttttt

SEQ ID NO: 1817 - DNA, 6000 bp, Homo sapiens
tggttacaggtgaggagtaggtagagagtaaagattttgctaaaggttgagggcatatatgaggacaacagcaacgactgaatgaccatgagctttaattgggggtgtaggaggaggtgctggaaacagaggtagatcagttcattgtaggtcccactggatcaaggattgctcacattagagtgttaggaagtggtgatcagagaatgacatgcttgaaattaggaaattgaagtagttggaaatgacaaggtctagggatctggccaagagagggtaggagatgagatcattagaggaaaagacttcatggaattgggaggcctaagtgttgacagaatcatccactggatatgaaattaccaataatgtgtatattaattgatagaatttaagaagaagttgctttgtgtttgttcactgctgcatctctggtacataattagtgctgagtaaatattggttatataaatgcacgtcacttgtgttgttatttgaggaatagctttctaaaattattgataattttctatttcccttatttatattacagagctatattctgcattgattaaaaattaatggttgtctttatggttttataaaagaaccttactgaaacattcaggatgtaatcctgacgcttttgggatgtcatacttactcccagtaagtgggaagtaaacttgaagcaaaggatcatgttttacttgtcttgggaggctgtggttaagagctagctggagtggcagaattagacatagctgggtttgaatcctgggtctaccatttgctagctccctttgacaaggcagctttgtattgctaaactttagtttgctaatttgtaaaattcagacaaatctagttcataagactccttgtgaggatcaagtgcttgctgagcacagcattattagatatgcagcaactcccttttcaactagattgaagaagtcaggatagagttttatttttaattacaagcatgttcttaaatttgccaggagtagaatgatatgaattttaatgtctacgtgtgagataaattataaatttcaagggagatttaaaaggtgttgaggttttttcaacaatatgaaaattgagcagagtaaaacagttacaagtgacatgttaatgatatacaagtatgtcattaatgacataacataacttttctaactttgtactagactttataaaaaaaaaattttagagacagggtcttgctatattacccaggctggtctcaaactcctgggctcaagtgatcctccttcctcagcctccccaaggagtgatattacaggcatgagcaactgtgcccggctgcattagactttaaaatgtaaactagaaaccatatctagcatactaaactgatttttaatacaatatttgctatattaaagcaacatagggggaaagctttaattattacctagataattcttcccacctacagtatttccagaaatatagaagagaggttaatgataatttatggttttttagtagtttcagagtgttaaaaaccgtaaattatcatagcttgaaaacctgtaactatttgtttgtttctaatgttgaaaattttttggcctctgaaaaactttcagaatcaaatttaggatttaaaactattttccccaggtgactttggttatgtcctttttgttctttgaatattcaggagaaataaggtattgtttccaaagaggtaacccactgccacagcacatcctgtgatttgggccgttactcctcagaccagagactgggtccgtttttggtttgtagatggttgtgtgctcatagtttctattaaatttacatggcagtgacctaggacttttttaaattaattctttttaaacagcgtaggtggaaatggaataaataagattctactttgtaacatgactaaacccagagcaaactgaccatgcattaataataaaatgtaggcatgaaaatttgtatttcgtatacttaaagtcagagtcagatttttccagttttctgatctgtatgttttttaaataagctttttgtaagatgaaaataatgcccttttgattatgcagtattttcttgtttgcttagagacataaagaacatttaaactgtcagttattataatgacaagaggtattcctgatcagtaagagaagttatcactgaagacatttctgatttcactgcccagacccacagcttctgttcttatataaacctacattcattgaccataacaataggttaaaagattcatctgtgccaatgactaggcattttattaaagtatttaacatttaattgtctcattttcaagtgccagttaacagccatcgacacacagctttccataaagaaggcattattgctttttttttttttttcttttggagatagagtcttgcactgtcgccagggttcaagcgattctcctgcctcagcctcccgagtagctgggactacaggtgcgcgccaccacgcccagctaatttttgtattttttttttttggtggagacggggtttcacaatgttggtcaggatggtcttgatctcttgacattgtggcccgcctgcctcagcctcccaaagtgctgggattacaggcatgagccactggcacctggcctactatttgatgagttggaaaattgcatgcaagttgatggattccttaatgttcacaaaccagagtgatttttgttggggggaatggtataaacaaagcctgtcccacccagatatgataattgtgagaaattttgttcctttttaagttattttccagtgttaatataaatgttatagtctcttctgctacattttgcagtagactagcttagagcttatttaattaggaagcatggacaaagagttttcagaaaaaattaaattttagaatttttaaatttggttaagcatttttaaaaatgggaatcttgtacatttttaataaaccagattgtgaccttactgttcagaggaagaatatgatgttaattgtataaagcattcctactttggaatttatttcccttgccaaaaattgtagtttaggtttctaacttagtgattaacagtgaggactctggagtcaggagtatttaaaatctatctccagtccagcattacctagctaataacttgcttcactttttaaagccttggtttctcatttatgaaaaaggaggccaggtgcggtggctcacgcctgtaatcccagcactttgggcggccgaggcggctggatcacttgagggtcaggagttcaagaccaacctggccaacatagtgaaacctggtctctactaaaaatacaaaacattagctggacgtggtggcacacacctatagtcttacctactcaggaggctgaggcaggagaatcatgtgaacccaggtggcagaggttgcagtgagccaagatggcaccactgcactccagactgagttacagagtgagattctgtctcaaaaaaaagcaggggtcggtggtgggggtggtgggaagtgaggataattgtacctactcacagggttgtaaaaatgagttaattcagataagaatttaaagcgacacccagtactctgtgacatcttactagatactactcacagtcccattggagttttactgctaatgctagtctgtgtactccttttcgttctgattagagatattttggagcttactgtatcttctgataattcttctccataggcctctagcattatttattttaaaaagcaaatcctaaaatataggtttaagatttccttaatactttacagggggaaggaaattagcaagaaatctttgttgccagtacatgttttttaaaggttttttagttaattcagaataaacattgcaaatctaaagtttgttctagtattgttgtttttgtttttttgagatggagtctcactcacaggagtgcagtggcacgatctcggctcactgcatcctccaccggttgaagcaattcccttgcctcagcctcctgagtaggcaggactacaggcgtgcaccaccatgcccagctaatttttgtattttagtagagacaaggtttcaccatgttggccaggctagtcttgaactcctgacctcaagtgatcacccgcctcagcctcccaaagtgctgggattacaggcatgagccactgcacccagccaatttttttgttgttgttttttaatcactaaaggaaccataaaaatagaaactatgtaggaggaagaacacatggtttctggtcatactctgtcaagaagtagatatgtaacatattgggcatttaacttaaaaattctaagtcatgttttctttttccactataagattgtactaggtgatataaagttcatgtcacttaaaattcaacgactgtgtaagtagctctttcagcttttcattaagttcatttttggaaatgtgcacatctatgccatcattgggcagttataatttggggatttaaacacctggcagtgattgaccactgtgactttgcttattccctttctctcctcagttaccgagctgatacccagacataccagccttataacaaagactggattaaagagaagatctacgtgctccttcgtcggcaggcccaacaggctgggaaataattgtgttggaagcactgggggggttggggtgggcttggaacacaggtgtgtacagcgtgctgtagtggaagttttgtatcatagtaatcctgtttccactttgttatactctagccaagattgactgtattagatgaaatgtgaggatcttgttcaatcggaaacccccgttacctcctctttttctttctctttctttttttttttttacttaaacatttttatgatgatttagatggaagttgttcttcgtcacttaatgttggttccagtccttcaactgttcatatctactttataacattcacatactaacccttcttcaagatggggtggggggtggaaatgcagtttagccatgtcctcaagataaagtcttggtaaaaataaataaatgtcctttagttatattttctccctgagtgctttttttttttttgtctttgaacattgaattttcttgcaaagcattttttcattttaagtttaaaaaccaatagctgctacacaaagaatttgaagaaagtttaagtagtgcgcaacacattttgctgtgaagctaataacacttttacctcacttttccagcataattaaatgaatcttaattatagctccaaggtttgtacctactattgacgcaaacgttataaatgactttctggtgataaagcttgtccgcagcagcagcagcagacagatgaacttcttagtgttgatcagatgaagtactctttctaggaggtctttgtgcccttttcagagccttcagttggatactagttacccactactgtagggaagctataagggcaagggaaaaaccacaaaaaagtgtaagatagtcttgtctcttttttgttgttgtttttttgagacagtctcactctgtacccaagctggagtgtacttccaatcatgtcaatcatgtattttcaatcagcaagtacatgagcactctctgattctgctattagcactttaccaacagccagtgatatcttgacacagcataagattgaaagttttttggaaggctcatgattggtttaatatccccctgttcctgcctctacttgcacattagggccttaactattttttttgttgttttatgcaagacaaaattttacctagaacatactcatatgtgctcagtttttctatagaataatctggttaatgaaatgttatcactgtaccaagagattattagaattttagggtacctgacaaaattaagtagagttgtagttaatgtttcactgtgaaaccaaccaaattttaaagctaaaataggccgggtgcggtggctcacgcctataatcccagcacttt

SEQ ID NO: 1818 - DNA, 6000 bp, Homo sapiens
tacttatgtaacattgttatttagagccaaagaaaactactcattagcaattcaatcgaaaaaacataagacagtgttaactataaaccaacgggtctcactcccttaccaaacagggcttcctttgtgtaaagcatgctttggcctcctttatttatttatttttatttatttatttttatttttttctgagacaaagttttgctcttgttccccaggctggagtgcaatggtgggactcggctcactgcaacctccgcctcctgggttcaagcaattctcctgtctcagcctcctgagtagctgggattacaggcacatgccaccacgcccagctaatttttgtatttttagtagagatggggtttcgccatgttggccaggctggtctcgaactcctgacctcaggtaatccgcccacctcagcctcccaaagtgctgggattacaggcgtgagccacttagcacctggctggcctcctttaaaagttaaaagtgtttctctttcctgtatactgaaaaaatttacatcctgattatcatagttacttataattgcatttgagaatcggattttttttcctttgttttataaatttttaaggcatgaaagtacagttgccaggtcaaagggcaaggaagaaggccacaaaagtatcaagaaaggtagttttggggtgaggagaaactgacagagaaatcaatgtcacataaacctcttggtgggcacatctggcaggtagaccccaccactactgcaatttcagactacctaattttaactcgtttttaaatactaatcttgccataattgatcatctgacttttattcctgttctgagatatttttagaaaaagtattgaatgagaaagcagcagcaagattaaaaacatgaataaaaagcatatcttttcatgtaaatcaagcttgtccaactcatggctcgtgggccgcatgcaacccaggagcactttgaatgaagccttacacaaattcataaactttcttaaaacattatgagtttttttttgcattttttttttttagctcatcacctatcttagtgttagtgtattttatgtgtggcttgagataattcttcttctgatgtggcccagggaagccaaaagattggacacccctgatgtaaacgaaagtgaactgtaaaacagtaacactagcctctaagaaagccagacttccttaaaaaggcaagtcatttatccagtgtaggagtttggggaattattttctaaggaaagaaatggtgctttccagtcccccgtgaatgaaatttatttttacaaatttaccatctcactagtttcattacaacattggtccataataatggcataatttacctagaaaatatgtttagttcctaggagatagaaatcctagttgaattctaggatgtctttaagttatatataactttcattttttattctaatagctcaaaatgcattgcatctactctaataataaacagatattatgaatgctgattttagcattttaagacctacagctggaaaagaccatctgaccgtcaatttaagaaagccacaaatgacatgacatactaattatctgtattaatgacccagttattaacaccactcctgtaaacatttccttctagtgaaaaaggaaatagtatatatccgcatattgcaataatcattcaaggtagtttgaaaaaatactggaattggtaaagttaaaggcattttatagaaataaaaagttttactggttgcttatcagaattaattatgattattcataaatgttacttcaatatgtttaaaaatacacaaaccaacccaaatctcacacatgtcagccctactaatgtcaattcaattctaatatagttataagaaaatatggttatgtcaaaggaaacatagcaggttcacaaagtactgggcaggcaggtaacccaaataagtgaaacaggcttcaagggcaaggaggactgtgcctaacagctgctactcagcccgacccaacctttgcctctaggaaatactggtaaagaacaacaataataaacttctgctaatggaacagtctgcaggctggatttggcacacaggctaccatgtatatgtaccatgtacctttgccgaaatgcttagtggctacgaactagtctgagtcagaaaagctagactgaaaaaatacctctcttctgattctaacaaacttcatgaacctatccagtctccgtttcctcatctatatgtcactgatttttattttctttttttttttttttaagagaaagagtctcaatgttgcccaggccaactcctgggttcaagcaatcctcctaccttatcctcttgagtagctaggactacaggcgcgccccaccgcacccagcttgagttttttaagtgaagttaggtaatgcacgtaattttttaaaatgctatcattagatgctgaggggtacagattaaaaaggaaacagaaaaagaacaacaacaatttaagcatctgttccatctggctatgggctttacttttcctcaaactgacaacaccttgtcccaccttctttcccacccacaggctattttcacctgtaatgtctcctcttcctcaggtttcttcaaggtgtacttaatatttcatttatacctttcctttctacttcaggcctcctttgaaagtactttcaggaatggcactgaaactagggcctattttactgctgaactctaggacaaactcatgaaatcttgttccctttgaatgtagtagtttttcccccctaaatctttgaacgctgtgcacttcgtgaattccttttgcctacctaaaggacctatcagcatgttcactgaacagtgctttcatctatccctcttcccgggaccctcgcttaacatctgttcaaggtgccaatcaaattaacgaaaatgtcaaaacgtattaaccaaaaattcattgctaagcaaatagatttgaaacaacttcagaatatcaattccaaggctccccttctttaaaaggaaatgtgagttaagaacaatcttagttttttcttacattcattctagtacagacatccaaaaaacaaaacagctttcctcagaaaggtgtgtttgactttctcaaaaggaagttatcatattgatttcagttcatgtagaaaaataacattctccatttctttttttttcttttttggagacaggatctcactctgctgtccaggctggagtgcagtggcccaaacacggctcactgcagcctcaaccacttggggtcaagcgatcctcctgcctcagcctcatttgtagggacaaagtcccgccacgttgcccaggctggtctagaactcctgggcccaagcgatccttccacctcagcctcccaaagtgctgagattacaggcgtgagccaccgcgcccagccctccatttattttcttgataacaatctggaatcttgattccatgaaacctctgagaatcaaaagaaatgttatggtgcctctctccaggtaaatgcacagaacctcaaatttttgtaagcaattctaggggattcagaatactccaggatcttccgtggaatatctatccaccccaggttaagaattccactaatgaatatgaggtttctttctattattaagtgtcatgtatcttttaaaaaagatagtctttcttaatgagaccttcagctttgagatttaactagggaagcagcttccctttgcaactaaaactactatctcacagccatcctgacagctgacagaaaattgagaatttcttacctctgagaaattaacagccaagggaatgattccggccacgtaacatcccaccaacatagccagagacagcaggctaatggagatgaaatcatccattctgccctcctttattcacccacaaccactagacaacaaatttccagtggctttaaatggtgcttaggttctttaaacaggtgtggtggttccaagagagtgggctttccagttctttaggccttcccaccagcagatgtgttcacgaggcaccttcctcttgaacgtacccggcaacagaccctttttgctgatattagcaccagagaaagcttacagcaatctaaggtcccaggctctgggttctcagatgccagtcattagattctcgtgggttaacagagatgggaaaagtcaatggggaaaatgtgcgaatgatcgatttcttcgattgtcggattgagggtggcacaatgtcttaggcggcggcgggtaagtgactcaagcgaacctgttcgttccctaggcgcccctgtctccaagaggcggccccgaaggtgatccgccccccagagcaggaaaccagcccaccagtcccagcaaactctcctccgagcctgggatgaggaaaggagtcctgcaggtctctaacgatgggtcctaggggttcagcagcaaagttgacacaaagctgtctctgccctatacccggtgctgcccatggtactgcactcgaccgggccttgacccggagtcgccgatactacagctgccatggccgccaagtggcatctcttcattccatccacttccggattgtctaaccaccccctcctttacaaaggcacttccgggttacaaccgacctccggcccaggatacttacgttgccgccatttttgagtagggctaatgaaagatgtctgatgtcactgtctataccggtgatcacttgagccgtatgtttaataacgaaagtacggaagacagcgtcttgaaaaaaaataattcttcctaaagcttggaaactttcccttacctttttgcctttatcgaagatggctgaaacagagtcagtagctgctctagctgccggaagtgactgtgcctctatgatccaaaaggctcttttgcgttgcactttcgacgacttccggcggctcctctcgcgaggattggctgttagcggcgttgtagttaagctcgtgtaacggcggcggtgtcggcagctgctgtagcgaagagagtttggcgcgatggtgagaaaggcctccgcggctacccgagtccgagtccccggcctccagagcgaccccagccccatacgttttcccctccccacgagccccatgcagcgccgcgtgatgctccccgccactctagtcggtggattgacccttcttcccgccgcagggacgccaggcctgactctaggcctcggagccccggtccgccctgcggttgcgcgcccgcctgctcgctcgggtccggcgtgccttgggcctgaggatgaactctctcccgattgttactcggtagagggagacgtgggggaggtgttttgttttttgagatagagagtctcactctatcgcccaggctggagtgcagtggcgggatctcagacccctgcaacctctgcctcctgggttgaagcaattctcctgtctcagcctccctagtagctgggattacaggcgcccgccacctcgctcggctaatttttttattttagcagagacggcgtttcaccatgttggccaggctggtctcgaactcctgacctcaagcaatccacccgcctcggcatcccaaagtgctgggattacaggcgtgagccaccgggccctgccggatatggtatttttccctccaaatgctctagcctgctgtaggaacaatgggccagggttgtctaactattctcgaagctgacagatccagctatacccagcatgtgggccaggagaggacgtatttgctttgcagtgttttttcagctttcgttttcctgtgctctgccttttttttttttttcctgtttttgagacctctaggtattgcgtgtggcgcgtccctcagccctcgatcctgtacttatctgtatttatatcctcttggggctggaggctgaaaagtaggctcagctcagagaccagctctattagaacccaaccgggatgatcagtaagctccaattcgaagaaagtgaccaaaa

SEQ ID NO: 1819 - DNA, 6000 bp, Homo sapiens
caccaggtgatggctacaataaaagcccagacttggttggcgcggtggctcatgcttgtaatcccagaactttgggaggctaaggcaggagaactgcctgaggctagaagtctgagaccaacatgtgcaacacagtgaccccatctctataaaaaaaccaaaaaattagccaggtgtggcggcaggtgcctctagtcccagctatttgggaggctgaggcaggaggactgcttgagcccaggaaactgagactgcaataagccattatcaccactgtaccccagcctgggtgacagagcaagaccccgtgtcttaaggaaaaaaaaaaaaaggcccagactttactactatgccatatatctatataagaagactacacttgtatcccttaaatctattaaaacaacctattaaaaacagacagacacacaagcctatagtgtttgagcttaaccagaatatataagggatacctgtaaaatatttccatactgtaacaaaataacatgtgacaaataagaagagaatatttataaaacaacaagcagctctggaaagtcactcattatatacattagtttaaaaaaaaaaaacacctaatacttgtagcaaggaggatactatatacataattaatgtttaaaatgttcaaccggccaaggcggattacttgaggtcaggagctcgagaccagcctggccaacatggtgaaaccccatctctactaaatacacaaaaaattatctgggtgtggtggcccatgcctgtagtcccagctacttgggaggctgaggcacaagagaatcacttgaacctggggggcggaggttgcgtaagccgagatcgcattactgcactccagtctgggtgatagagcgagactctgtctcaaataatacataaataaacaaacaaataaataaaatgttcaataattatggtccatcctaaatatctgctttccctcctaaaattagcaattcaataaatttggagggttggaagtgataaaggcagggcctggggtggatggactattaaaaaaaaaaaatttggaggggaaaaacccagttcctaaatgagacatttttctaccccttgattagtgttaaactcaccttccatgcattcattcacagattcgtagtcagcataagttctgccttctggcctcttggtaggctgtaccagcaaaatggtgtgagactgcaggggaaaacatgatttcaatataagtttctatttgagaaattcatagtatgataaaaaaaaatccccatttgtaatgcaataatgattgctagttattaaaatgtaattagagaggccaggcatggcatcccatgcctataatcctcatcctctgggaggctgagagggggaaaatcacttgaggccagaagcttgagaccaacctgggcaacatagcaagaccctgtctctacaaaaaaataaaatttgccgggtgcatgcctgtagtcccagcactttggaagtctaaggcaggaggattccttgagcccaggaggctgagactgcagtgtgccatgatcacaccattgcatcggagagtgaggccctatctcttaaaagaaaaaaaaaagtcattaggatacttttcccacaaaaatattgatgtcttagtctaagtatagtatctagctggattcacaactctgctgtacggtctccctaagtctcccagtcctaccgtacttactgcctacaagtaatcagtataagctaccttgccctccttttccttttctatcttttcttcccaactaaattataaacctgcttaggttttctgtctccagtggtcactttccatctttaatgctcttaagtcactaataaaaactcagatgggctgatgaaaggaaacaaaaggggaaatagtataataatcacaagcatggtttcaacttaagctttttttccaacctcagcgtaagagcaaagtcacattttatccaggggttagacttaacattaaagcagtagataaattagcaatataaacatatcataagaattacccttaaaaatccattaaactattcacctagtagatgacttgccttactgggctttctcataccaaaatcacatattagaatcacacagaaagttaggtcatcacactatgagaaatgtgaaataatgcccatagcagacagacttgtcttccacttcgtgctcactgggaaacatgtttttgttagtgatcagtcactaacaaatcaatctcagtgttttctcaacgtgggctctattaccttttgggttgactgattctttgttacaaatgtcccttggggagcaaaaaatctcatccagctgagaattcactggtctgttgaaaatatgacccatccaattttctgctacatgtgtaaggttaattaaatgcaagtatgatgcaactccactgtaaatccagtcccaaatcaaactattcacctttttccttctcttctgctgtactagtatttttcagccaaaaaccagaaaacaaaaatttcctaacaggaaccctaaactgttttggaataacataatttttttttggagacagttttgttcctgttgcccaggctggagcgcaaaggcgcgatctcagctcaccgcaacctctgctttccgggttcaagcgaatcttctgcttcagcctcccaagtagctgggattacaggcatgcaccaccatgctcggctaattttgtctttttagtagagatggggtttctccatgttggtcagactggtcttgaactcccgacctcaggtgatctgcctgcctcggcctcccaaagtgctgggattacaggcgtgagccaccgcgcctggacaaaatgatcagaatttttaaccatcaaattggaacagaaatagctgaagcccagactttctgaataaacaatggaaaaatagtacatttaacatgacatgcaaaaccaagggttatcatacccttctctccccatcaagaactaaaccactttgactaaaagtttcagagggtttgacataaaaacggaacttggtgacaagagacgaaggattaactctcacctgtaataacctgagcagtcaaagcctttgttaaatcgatttaaaagccacagaaagcatcatattagattatttgttatacagaagtctttgtaagctagctactcaaaaagtttcaacgagtcatttaagaaaaaataattttgtagaaaccacgtgcattcttgcaacagaggttgccctatacactagctatctcaactgctactataataattgtattccaattctaatgcaaattaaaggactaatttgaaagggtaagaatggaaaaagctatacagcatgttgctttttatatctagtcttaaaatgaacaccgggcaaagtttactattttcagtacttactgcccaaagacaaggattaaaaatcactaagaacataacatgatacattttaaaaactgtggtcaagtggttatcatttttaaatggcaatgctttcctgctcaaattctttacagattataccacctctcaagccagttttggtcactttcttcgaattggagcttactgatcatcccggttgggttctaatagagctggtctctgagctgagcctacttttcagcctccagccccaagaggatataaatacagataagtacaggatcgagggctgagggacgcgccacacgcaatacctagaggtctcaaaaacaggaaaaaaaaaaaaaaggcagagcacaggaaaacgaaagctgaaaaaacactgcaaagcaaatacgtcctctcctggcccacatgctgggtatagctggatctgtcagcttcgagaatagttagacaaccctggcccattgttcctacagcaggctagagcatttggagggaaaaataccatatccggcagggcccggtggctcacgcctgtaatcccagcactttgggatgccgaggcgggtggattgcttgaggtcaggagttcgagaccagcctggccaacatggtgaaacgccgtctctgctaaaataaaaaaattagccgagcgaggtggcgggcgcctgtaatcccagctactagggaggctgagacaggagaattgcttcaacccaggaggcagaggttgcaggggtctgagatcccgccactgcactccagcctgggcgatagagtgagactctctatctcaaaaaacaaaacacctcccccacgtctccctctaccgagtaacaatcgggagagagttcatcctcaggcccaaggcacgccggacccgagcgagcaggcgggcgcgcaaccgcagggcggaccggggctccgaggcctagagtcaggcctggcgtccctgcggcgggaagaagggtcaatccaccgactagagtggcggggagcatcacgcggcgctgcatggggctcgtggggaggggaaaacgtatggggctggggtcgctctggaggccggggactcggactcgggtagccgcggaggcctttctcaccatcgcgccaaactctcttcgctacagcagctgccgacaccgccgccgttacacgagcttaactacaacgccgctaacagccaatcctcgcgagaggagccgccggaagtcgtcgaaagtgcaacgcaaaagagccttttggatcatagaggcacagtcacttccggcagctagagcagctactgactctgtttcagccatcttcgataaaggcaaaaaggtaagggaaagtttccaagctttaggaagaattattttttttcaagacgctgtcttccgtactttcgttattaaacatacggctcaagtgatcaccggtatagacagtgacatcagacatctttcattagccctactcaaaaatggcggcaacgtaagtatcctgggccggaggtcggttgtaacccggaagtgcctttgtaaaggagggggtggttagacaatccggaagtggatggaatgaagagatgccacttggcggccatggcagctgtagtatcggcgactccgggtcaaggcccggtcgagtgcagtaccatgggcagcaccgggtatagggcagagacagctttgtgtcaactttgctgctgaacccctaggacccatcgttagagacctgcaggactcctttcctcatcccaggctcggaggagagtttgctgggactggtgggctggtttcctgctctggggggcggatcaccttcggggccgcctcttggagacaggggcgcctagggaacgaacaggttcgcttgagtcacttacccgccgccgcctaagacattgtgccaccctcaatccgacaatcgaagaaatcgatcattcgcacattttccccattgacttttcccatctctgttaacccacgagaatctaatgactggcatctgagaacccagagcctgggaccttagattgctgtaagctttctctggtgctaatatcagcaaaaagggtctgttgccgggtacgttcaagaggaaggtgcctcgtgaacacatctgctggtgggaaggcctaaagaactggaaagcccactctcttggaaccaccacacctgtttaaagaacctaagcaccatttaaagccactggaaatttgttgtctagtggttgtgggtgaataaaggagggcagaatggatgatttcatctccattagcctgctgtctctggctatgttggtgggatgttacgtggccggaatcattcccttggctgttaatttctcagaggtaagaaattctcaattttctgtcagctgtcaggatggctgtgagatagtagttttagttgcaaagggaagctgcttccctagttaaatctcaaagctgaaggtctcattaagaaagactatcttttttaaaagatacatgacacttaataatagaaagaaacctcatattcattagtggaattcttaacctggggtggatagatattccacggaagatcctggagtattctgaatcccct

SEQ ID NO: 1820 - DNA, 6000 bp, Homo sapiens
tcatccttacaacaactctaagagtatgtaggaaccggaggcaaggcgaacttaagcaacttgcccaaagccacctagtaagtggcagagctgggattcaaacccagcctggctttggattccctgctctaggtacccctcatactgcctctcaccttcctctcacctcagctctgccttccacagatgcggatgagtgtgtgatattcgggcctggtctctgcccgaacggccggtgcctcaacaccgtgcctggttatgtctgcctgtgcaatcccggcttccactacgatgcttcccacaagaagtgtgagggtaaggacacacatgatccctgcccccaccccaggcccacagctgaataatggcccacccagcccctgccagccagtcccattattgctgagagtcccccttcctagggaggccgcccactgcagcaggctggtcccaggtgaaggagctgtgggctgtcagagattgtccccaggagggccttccaggctgggctgggttgaggggagggaggcagggcactaactcttcattatcagtgataggcaaacacccttccctgagggtggttggtggaaaggccaccttggcaatgccccaccctttcctgcctccccagatcacgatgagtgccaggacctggcctgtgagaatggcgagtgcgtcaacacggagggctccttccactgcttctgcagccccccgctcaccctggacctcagccagcagcgctgcatgaacagcaccagcagcacgggtgagtgggcctgagcgtgggggagcaggagaagggtacctgggctggggggctcatgtgcctccgtgccctgtgccaccagaggacctccctgaccacgacatccacatggacatctgctggaaaaaagtcaccaatgatgtgtgcagcgaacccctgcgtgggcaccgcaccacctacacggaatgctgctgccaggacggcgaggcctggagccagcagtgtgctctgtgtcccccgaggagctctggtgagggggagcaaaggggataccctgcagggctgggccaggccccagggagggggatgccctcaccttggaactggggatctagaaagaaggagcagagcaaaggccctgtcttccatccctgctgtttggggacaaagtagggcaggggagaggtggggagaggaatgttgccaggatctcccagagggtaccagtccttgcatgctcccagagacaaagccagccaggctttagctggcaggagctagaacccagctccttctctccctcctccctgacagaggtctatgctcagctgtgcaacgtggctcgcattgaggcagagcgggaggccggggtccacttccggccaggctatgagtatggccccgggcccgatgacctgcactacagcatctatggcccagatggggcccccttctacaactacctgggccccgaggacaccgtccctgagcctgccttccccaacacagccggtcactcagcggaccgcacacccatccttgagtctcctttgcagccctcagaactccagccccactacgtggccagccatccaggtctgtgttgctgcaaaactggggaagaggtgggcaccaaagctgtttcacttccatctcctccacctgctagtcatattgccagcagggtgaggactgggaaggggaaagacacaccaagccagaggtccccgttcacggctcgcttgagacaagtacatacgcccaggtccgaccctaacaactccgtcataaactatcacagggacacaaaaaggtacaggacactgcccctgtcccaacctacaagcttcctgtggggactgagagagagagagaaagctgttcactgcagtctttttctccctccacgccacctacaggctgcagaataacctgctctaaggacacccagcattcacacttgtgacctgaagtgtggattaaggttttctaaggactttaaaggcccaccgtgatgactcggtttgtgaatggtgcgatccaaacactcaggccttggagtctaatgaggaagtcaagcctagcactgtgccatgcacacggtacccaccacaggcaaagctaccacatcagactaaaaccatacctctgggtagggtgtggccttttccatggggtggaggggtgcttagggagtgaagagggttaggtagatctggtcaatgttttgctttgtgttgagtgaggcccctctgctaccaattgttccccacttcccaaaaacacgatgtgaaggtttaaacaaaacacctcaccccttccccacgcccaaacccaaaaactatgtagcaacacactcctcgaccacccaaaccccagcaggagccgggcattgtggaagcagcgagtctcagcctccctggagccctcatttgaagcccagagcacctctccccatctaaaatgacacatactttttttttcaagagtactgccttttgttctagcatctttccacaagaattttatgatcctctctgcccccacccccacagttccacaggggcaccctttgtccagaagggcgagggtcccagcattagggagagtctggacacagccctcagcctcctcctctctccgatttcctcctcccagagcccccagccggcttcgaagggcttcaggcggaggagtgcggcatcctgaacggctgtgagaatggccgctgtgtgcgcgtgcgggagggctacacctgtgactgttttgagggcttccagctggatgcggcccacatggcctgcgtaggtaagtgcagaattctgatggaggagtcaggctggcccactgcccacagagacgcctgaactcaggaaggctggaagagccactgctgcctcctagtggggctgtctgcatcaggctggaagggaagaaagcgccaaaggaaggtttaattatgtgctttagaaagccccttccgtgcaggttcccagacaaaagacaaggacaagagagcacggtcttgggcatggtatgagcttgctgccccctgctttgtccttgagttgcttggttttgggaagtgacttcagcctctggctgtcacacttagggtttcactctagggcagtggccagggcttactaaccagagaggtggaggcagccagcagaggcacctgggctccctacagcactctcctttgtttcctcttagatgtgaatgagtgtgatgacttgaacgggcctgctgtgctctgtgtccatggttactgcgagaacacagagggctcctaccgctgccactgctccccgggatatgtggctgaggcagggcccccccactgcactgccaaggagtagcagtcaggggtcagtgtggcaactacctggaaatggcctccagtcacaggcaggggccttgaggatgatttcctagctgggaagacaccgtgacatcaggccagaggtttccaatcagccttgcctgctttcatctctcccagcttagcctctggctgtaagcttcggtcattgcctccatgcccttgcttggctcaagcaccaccaatcgctttaatgcttcagccaccgcatgaggccctgtccaccacctttcctggccttgctatgggatgcttaccaaaggatggccctcatccaccctcccaagctgtgcgagcatgcaaggccccatggcctcacactgcagacacccctttccagccacaatccaccatcatcctgacgatcccacaactgggacagaggctacatctgccctagggaggtccttcagaatctgtggagcaagaaaggatttggggaagcttggggactgactccagagccccctcctaagaaccatcaccaccactcagccaatctgttctgggccctgattttgccacacctccatcctgtagcccattctctgaccccaaggagtggcagaagatcccttcactcagagaagcaaggctgatattagcttgttgaatgtaagagacacaaatgaagaagaacaaagagcctgagaaagcagcaagaggacatgatgaaaaatacgtggagttgatgagaaaggggagccaaggctttatacgtctaaagaaaatattcagtagctgaatccgcccagtgatagcctgtgggcaccagcagcaagggctgccatgggatacagcacccatctacaaagacctctattacataaacactgcttcttacaggaaacaaacctcttctgggatctccttttgtgaaaaccagtttgatgtgctaaaagtaaaaagtctattttccagtgtggtcttgttcagaagcagccagatttccaatgttgtttttcccctccactcagaaacccctgccctttcccttcagaaaacgatggcaggcattcctctgagtttacaagcagagactcactccaacccaaactagctgggagttcagaaccatggtggaataaagaaatgtgcatctggtctcttctgttgtttttatttcatatcagattaaatttctttaccatgttggctaagtctaaatattagagatgaggctgtgcctactccctggccagctctgctgatagcctatgatgggttccaatgggaaatgactctttactattaaaagacaaggaaagctctgacttcgtacttctctgatgaatggcaatgtaaatgaacaaggctccatgtgactggagcatggaagtgaatgctactttcttaatttaatctgccctgtcctacctgctcctctgattgttagccatcacataacttattgaatgcttgccatgtgccaggcactgtgctgagtgccatacatacatttcatttaattatccaataatcctacttactattgtttattctcaatttacaggtgaggaaactgagacatagaaagcttaaataatttgctctaggtccctatactaattgagatgttttcagcagacaaaaataagtcactcttacgcatgtaaaaatattctttcactcataataaaagaaatgcaacttaaaaccatactgagatcctttttaaaactgtcagattggcaaagatcaaaaagcttgttaagactcctagctggcaagcatgtgggaaataggtactctcataacagctgacagaagtacatattgaagaggacaatatggcaatgtccttcaaaattataaaagcactaactctttgatccagtagtttccacttctaggaacttaaccttcagatatattttcaccagatataaaatgacatacgtaagaagttattactgcatcatttgtaatagctaaagattagaaacaattaattgctatggaacccttaaaaaaggtggctctaaattccttaagaaagatatccaaaacaaattaaggggaaaagggagggttgcataacagcatgtaacataacactatttgtctaaagaatggggaaagagaagcggttgtctgttcacctcatccttgccactccgccttatacctcaccatcggagaacttaccatcccccaaatatatcctgctggcactacaccttcgtaactgctgttcccactgcccccacaacactccaatctccaccttcctgccaaccttgagatattgtatgcatatatacatatttcctttgtttaaaatacaaatagcatactatgcatgctgttctgcactttgctttttttttatacttgcaattagagctgcctcatttcattttacagctgtatactattccattgaatggataaaccataatttatttaatcagtccctcactgacagacgtttccattgtttcctgtcttttgctataaataatgctgtaatgaatattcttgtgcatatttcacattaatttatgggattacatctgcaggataaattcttagaaccaatggtggtttgtggggagggtgacagggtggataggtacaggattgggagacttttcactgtatctccttttgtattttt

SEQ ID NO: 1821 - DNA, 6000 bp, Homo sapiens
ctgtcactcaggctggagtgacattatttcggttcactacaacctccacccccgaggctcaagcaattctcgtgcctcagcctccctagtaactgggattatgggcgcacgtcaccacacccggctaattttttgtatttttagtagagatggggtttcgccatgttggccaggctggtctcaaactcctgagcttaagcactacacccaccttggcctcccaaagtgctgggattacaggtgtgagccaccacgcctggcctctatagggttttttgaaccagcctcacagcagaccacctgtataatatttttctctacctttccctcttgttctgttattatttttctttaactttatattctgttaaaataacaggattttgtgttttatctgttttaaagtatattatgaagttttataaatgcactaaaaggtattgaaaataatataacatagtctagttttggccgggcgcggtggctcatgcctgtaatcccagcactttgggaggctgaggcgggtggatcatgaggtcaggagatcgagaccatcctggctaacaaggtgaaaccccgtctctactaaaaatacaaaaaattagccgggcgcggtggcgggcgcctgtagtcccagctactcgggaggctgaggcaggagaatggcgtgaacccgggaagcggagcttgcagtgagccgagattgcgccactgcagtccgcagtccggcctgggcgacagagcgagactccgtctcaaaaaaaaaaaaaaaaacatagtctagttttatcaaaccttaatattttgacatattttgattccagttttttagttgaaatttcctctataaatttgcctccttccctccccagagttaaccactaccctgaatttaattaattccaatagatgtttttacaatattactatagatacatgtatccacaaaatatacaatgttgttttgcatattttaaacttagataagtgagaccctatttcattattcttctgcaatttgtttttcccctcctcattagatttttgagatttaaccatgttaatataattagcccaagtttattcattttaactgttgtatattattcctttgtctgaatattaccacagtttatccatcctcctgtttttggacatttagatgaattactttttctaaaagtaattttctaaaaattctactgaatttttttgctattacagacagtgcttgactcatttttctccataaataaattcataactgaaaggaaactttgtatcattatcataagttgaaagcagtaccacttgttataaagagaagataactgtaggaaaattgaaatgaaaacaaaatgttcttaagttctagtcagacttcattcattgtcttaggaagctcaactctgtggcaagttccctctattggaagggggactagcgtgtgttgaggggaggacgtggcctttttcactgacatcattaggttagaaggatcaccaaaaagagaatcactttctcaccatgtaactcagattgttgaatgttgtgatctgtaaacttaaaatgcctttcctaccctcagtggctcatcccactttttgtgaaactccagattaaatgaaacaagtatcaattgtataccacatgttgggcactgtgttagactgtagaggcacaaggagaaataagaaagaaacctctagatacccaagactgagatacaaccaatgacctgagacaggcagtactaagtgatcacagcagatgcagatggagaatgagggaaggctgggtagatgtcagaggaggtgggttttttttttttgtttgttttgttttttgagatggagtcttgctctgtcgccaaactgtagtgcagtggcacaatctctgctcactgcagcctccgcctcctgggttcaagcaattcttctgcctcaacctcccgagtgagtagctgggactacaggtgcttaccaccatgcccagctaatttttagtagagacggggtttcactgtgttggccaggatggtctcaatttcctgaccttgtgatctgcccacctcagactcctaaagtgctgggattacaggtgtgagccaccttgcctggcccaggggaggttttatacaaagaaggtaatatctgatctggaagtcttggagtatgcaaaggattttaatcagtagaccagagaggaaaggcattctaggcagagagagcagcccaggcaaaggcatcgaagtgaaatccatagggtaactggggagcaacaaaccttgtatccttggaggagcaaagccttggctgtggatggttgtggagacaaggtgggggtgatggggacaattagactgcacaggaaagtaggcacatgggtgccagggggccttgtagaggccagtggagagctgtgggaggtttttaacaaagggctagtgtgatcagatttggcccaggtggaatagcagctctcccagactgctagccagatgtgttccctacagtgatgctggatactgggctaatgtgtgctgagtggtgtcaactggaagactggactcagatgatctctgagaggtaccttctagggagtcagagtgattgaattatatatcccagctgttcaggctcatttgctctctctgctagccagagcccactgaactgacaattcccagaattcccagctggttacctccctgggcctgcacccaaaactttaatattggcctgtagggatccttagagactctccttggggacctgaatctctcttgagtgccctaccagccccagcctggcctctctgcctggcagcctttgattctggccaatcctcacgtggccttacatcccttagggcctactctgtgcaggcaaagcaaggttggcccctgccctcccacagtcagctgcaaagccatcctgagggcagctggggtgacggctggctcagggggcctccttgggctgggctccatgccatgacctcccagccaggcaggctcctgcgtccgtgctgtctgggttcccacaggccctaattcttagaaaattcccagggcacagaatctgtttcctctcagagccctcctagccccacgagaggtcttgtcaccaccacaaggggtggtgacataaaagtgggtacgtagtttccccttccactggggcgcacccccggaaactctgggtctgacaagcagccctttccctgacccccgtgacatgggccctgatgcagccaggaagctgctaacggtggtcgcccagagaggctttgaggtggcccaagtggcacaactcttggctggtgggacattctgggagctccctgggagggaggcagtgcccacaactttgggccaaagggccaggaatgggcctccgctttttcaagctgcaggaatttattttgaattcttcgtaagactccaaaaaccacataagctttggggtccactcaaatgtcaaacaaactcctaagtgggaccagatgtcgccatgctggccacagagatcacaggagtggccgccctgctctgtcctttgcctgtccagcctctgcacttctccctcccctcttaccctctagttccagtgcccggtgatgatttccaatgataaggatggaagccagagcccggcccagcctgccaaggagtcagtccctagagatctccaggagaagcccttctagggagacgccctggtctaggcatgtgggtctttagctgcagagtcagggccgggtggaaactgctggtgctgctggagtgcgccagacacccggaagcaaagtttggggagctgagtgaatgccccagcactgtaggtcagcgtctcatgggggtgccctcagagccaacatcaaggagtagctgaagggctgggcgcagtggctcacacctataatcccagcactttgggaggccgaggtgggtggatcacctaagctcaggagtttgagaccaccctggccaacatggtgaaaccccatctctattaagaatatttttaaaattagccaggcatggtggcaggactgaggttgccatgagccgagatcacgacattgcactccagcctgggcgatatagtgagactcaaaaaaaaaaaaaaaggagtagttgatggaagaactctatttcgctatagagtaagtcctgtttgcctctcaaataaaaattgtgcctccacataaaaattgtgcagaggcagcttaacccacatccccagccccatcctcctaccagcttgccaccttgtaagcacctcttaaccagggattctagagccctgttccttcagtgcccactcagggctcagccttcccacgcaccagactgccgggggctgagactcctcagtgtgcattcgttggcaggtaacacctcgtatgaccttgagactgttttatgtgtgtcttccagcctcccttggatcgtcagcattggtagggcaacgaccatggtgtttttttgtgtgtgtggttttttttttttttttttttggtgagaggcaatgtagagttggagcatggcttagagttgggccaacccaggtttgaatcaggctctggcacttacctgctgtgtggaattggcaagtcactgaacctctctgaagtggcttattagctttaggatcactgtcattgttgccccagtggactgccttctttatgtcagatgttaaacattctcacctcatttaaccatcataacaactcaattaagcagctattgttatctccattgtacagatggagagagtgaggtttcccagggatgtgcagagaatggcagagtcaggattcaatcttagatttgcaagtagaatagggacagccttcccagcctctccatgttcctccaggccctgcctctagaaggtgggactgtcggaggggctgtgaatagtccccagctctgagcatccttgtgttgactctgttttggtgaccccacaggaggaacgtctgcgggggacagtgctgcccaggatggacaacagcaaacagcaccaaccactgtatcaaacgtgagtgcctccaccagtagcagacactccgctctatcaaacgtgaagtgccattccccaccctactcccagggcaggtcaagcttaggtactccagaacctggagcagaagcgtctttcctagtctgcgtcctgaagatgcagcccctatttaaagtggaggcaacatccaatggaagggaagaggtttaaaaatgcctctagctggggccgggagcggtggctcatgcctgtaatcccagcactttgggaggccaaggtgggtggatcacttgaggtcgagagttggagaccagcctggtcaagatggtgaaaccctgtctcttctaaaaacacaaaattagccaggcgtgctgatgggtgcctgtaatcccagctactcgggaggctgaggtaggagaatcacttgaacctgggaggcagagtttgcagtgagccaagatcacaccactgcactccagactgggcgacagagcgagactccttctcaaaaagaaaaaaaaatgcctccagctggacacagcttctcaaatcaaatcactgcttgtgttttcaaagcttcctgcactccctcctgctgtcctactgtgttggccccactcacactgccggcagggtctcaggagactgcatgcacctatgttctgcagaacatgcctggcccagagcctccgcatcccacatttccaagggcaccattcatgtagcatgtgatgagaatccacctctgccctggcccctggcccaatggccctggcctctgttagccactctaccaggatggtcagatgacactgtgacccatgcctggagccgtctccccttggactgctctgatgcctggcaggctggctcgaaggagagaaaagccatcttattttgtggaaaccaaggagtgagttaggaagagctagagccttcacacctgagcctcttccactgatgg

SEQ ID NO: 1822 - DNA, 6000 bp, Homo sapiens
tccagacccaagagatgggtgagtaggcttagcagcgatctaatgagggagaaggctttaatcagggggtggggaagtgacacacggtgagtcagcggccatgctgaaacagcttcccttctttcactgggccaagaggattaagggtggcagaaagttctgataactccacatctccaggtacatgagctccaggtacatgaacagtgggctggcaggcagggaagagggcatttggggatatgccctagagctcctttggtggtgatagtggtggggtggttggaaaggtcatgattcaattgtgaagagggctccaggcttacaagcccggggtggaggcaaggcggtgtaaccttaaaagcttgggctcaggtggaaaatgatccaggtttgaatcctgcctctgctatttatcagctgtgccatcttgggcaagccagtagccattgccaacctcagtttcctcctttgtatgcgtggaaatcataatgcctcctttggttggttaaatcagccaattgatgtaacatgcttagtatggcgtttggactaaagtaggctctatcgattttggcaggttaaaaaaaaaaagcaaaactcaagtgtttgtgggattggagattctgaagagctgcaatcagtcccagcagttagagggtaagggagatatgggcagtaagtaggtggcaggacagagtgtggcgccgggatggggtagaagatgccagtctttggagtagatgaactgggttatggtccccaggcgaacagggtgggaacgtccaaggaccacttgtactcactgaggagtggaaggggcgcccgatggtgagggaaagttggtctgcgtgagggttttggcggaggcgaagggtgagggatgaatgggcggcagacttccagaaatgcagacggaggagacggagcagtaataatgacttggacacacaggaggaaaaaatagctcagggacgaagatgatgccaaggtttctggcttttggaggcccacggggatctgaggtgggtcttgagggatctagaggggagcttctgaaggaagtgggtaggttccggggagaggaagggagcccagaactacagaggtgggtggatatctgggcaaggagaggtaagtgtggacctggggcttccacagctgtgaaggagcagcatcccaggaacagaacgcagcattctgggaactaaggggcattcatggtcaaatgcaaggggtagggttcaaggagatctttagagccagccccaaaggcagcaagcacatgaacctggatcaggagctgccacccagaactcagttcctctctcttaaaatgggtctaatgataccagccctccccacttgatgggattactgtgtccttcattcagttagctatccatttcacacatacttcttggctgttctaggttctgcagaaacagtggtgagcaacgcagacaagatatctgttgctttagagctgtcattgtggtttgggaagtcagacaagaaatgattttataggttgttgaataggacttttcctctgctcttggaatatctgctgaagccacaaagatagaacaatgagggctaaatattcttgcattctgaagagaagtactagacaccttactaaaggcagaacaggttcaacagcaatcaaactacatccctcaattccagtctacaaatgaaagggattgaagaaagtcactgaagcataacactgctgcatttgtgggcagggctgagatttcccctgagggaactccccaactcaaaccaaatgaagggagctcccagagagaaccagtcatctgcaagaagaggaggctctgtccctataactgtccccccactgatgctgactatgttgctggatgttacaggcacctcggtgcattaaactacagcaagacagttcatgggagaacccaacatatgtctttaggaattgaggacgtacataaatgaagagacttgtgtgcacttcctgtctggagaattctgatcgtggagcctcgctggagtggcctgtgtggcaaggtgagaagtgggcagggtgaggagcggccaacccaccattgttttgcctggcataggtgggacagtcctatgagagacagaggatgcaggggtctccgagaggttggccagagagtaatttgctatggcaactcagggtggaggtcctgtagagaacctcccaaaaacccacatatgtgcccatgaaaaagccagcgcttggcacctgccaaccaagggtacctgtcacataagactttgctacttttcctctaacacctctctcccagccttgacaaagaggagccacagcagaaaagggaggtcaggaaaacagaccacaccccactctcaccactgcaggatctctagcaaagggacaggggagaggaggactattaaatgggatgtgatattgattaacttggatgagattttgatctggacaggagcagactttttgtgtctgaaaatgggtcttaattatattaatagaatagttctcgtgtctggtagggatgacctctcaagccaaggactctgcctgagatgtcattaagggtgggaaagggaaatttaccataatatggttgaaggtagtagtggagcagtttctggatagtccctctttaggttcagcccattaaaaaattcagttacacgagcaaacaaatcaataacaagatgatgtcaactgttttatgaagatgaaacagggtggtgtgttagagtcatgactggggtgagggagggctgctctagattggaggtcagggatggctactccaggagctgatatttaatctgagaggagcagtgatgaggaactaccctctaacatcctggagaggaaccttccagtagagggaagggggcattcacttggcttgttcaaggagcagagagagggccaaggcagcacagtgtggtgggtaagggagagcaagaggccagatgaaatcagagcgggggcagccagctagggtttgtaggccaaggccaggggtcgaggctttatttcaacagtagatattacctgggcttgtcttttgtgtggtgtgggaggttgtgaactggtgcccacatgccagctccttcactctgcctctctgggaaataggctgtacaaatgtgccaggggcagccctgttgatccaagcctttaggctgtagggagggagcatgggtgagaatggtgtgctgattactggggacacgcagacagcggcagtcagcattcccacacccctgcccgcctccctgctaacacaagatgtgaatgcacacactgggtcaatcggggtcaccgaatccccctctgggaaattcccgagagagtgaagggctgggtgggatcccgggaatggattcagccagaggcgggaggcctagattccactcccctctttcacatgcgctatctccttgagtgacttactcaagaggctccgtgtctttgcctcggtgaaaaagaggaccccttggccgggcgtggtggctcacgcctttaatcccagcactttgggaggccgaggcgggcggatcacctgaggttgggagttcgagaccagcctgaccaacatggagaaaccccgtctgtactaaaaaataaaataatatacaaaattagtcagacttggtggcgcatgcctgtaatcccagctactagggaggctgaggcaggggaatcgcttgaacccgggaggcggaggttgcggggagctgagatcgcaccattgcactccagcctgggcaacaagagcgaaactccgtctcaaaaaaaagaaagaaagaaagaaagaaaagaaaaagaaaaagaaaaagaggacccctcttctaccggcagccatcaccgcgccaggctcaggcgtgaccctcacgccagtggaaggggattgagatccagagcgaaggcggcggcgccagggcattgcagccacggagcgccagggccgccagctccgccagggggcgcgcccgggacctccctgcgctccgcgcgccgcgccccgccccgcgccacccccgctccggccggccctgcggagggcgcccccagcggccagggcgcaagcggagggggcggcggccctgttcccctacgcgggcctcggcgcccctcccggcttccttcagacctgcaaggctgcagcctgggtcccccgatccaaagacggtccctgaggcgaggggcgggagaacgattcggggcaggtctgcagttcgaacttgcccagagcaggagaaaggcggcccagtgtcccggtcgtggcaggcgccatctgcccgaccagcgcctgggtcagccccgcgccgccccctgctccgcacgggttaatccccctcgccgcccgctcgccgcccgctggcttcccggtgccaaagtgggtgttgctggaattcctcgctccctctccggtaatgagggggctgagctgtccctccgaggagggggcctggtgtggataaaagagacgaaaaagccgggggaggtttccaaaaataaaaccgtccgggtccccttcagacggctgcaggcacagggaggaggcgcgaaggtgcagcagccgtgcgagcccagctggagtaggagcgcggactcgaggctcggggcgcgcagccctcgttccgccgagagccgggcccccagtcggccgcttcagggccccctagactcagagaagctggccgccgggcggggccgggagaacagcccgcgggcgtccagcgtgccgaccacaaagctcttcgcggtgcccgcgcgcaccactctccagccgccccgcgccatgaggccgcggaccaaagcccgcagcccggggcgcgccctgcggaacccctggagaggcttcctgccgctcaccctggctctcttcgtgggcgcgggtcatgcccaaagggaccccgtagggagatacgagccggctggtggagacgcgaatcgactgcggcgccctgggggcagctacccggcagcggctgcagccaaggtgtacagtctgttccgggagcaggacgcgcctgtcgcgggcttgcagcccgtggagcgggcccagccgggctgggggagccccaggaggcccaccgaggcggaggccaggaggccgtcccgcgcgcagcagtcgcggcgtgtccagccacctgcgcagacccggagaagcactcccctgggccagcagcaaccagcaccccggacccgggccgcgccggctctcccacgcctggggaccccacagcggtctggggctgcgcccccaaccccgccgcgagggcggctcacggggtgagcatgggagagggaagtttggagggtacagaggggagccagggctcatttgtggaggggcgtgcaggcgagaggagagggcgccgctctcataccctcgtccctctgtctttagtacttcgggaaacagccccgaggttccaaaatcgggattggaagatttgatccgctttcgaagagttgaaggcagatagatcatcatcctcatcctttcttaccaactctcccggagccccgacgttaaatcctttcgcaaggcgcctctccactcgcccgcgttcctcctgcctgcaactaacgagctcttgtagactcttgcagcgctgccgggatctgagaggcagcggggagagggcaggagggtgggcgctccaggctcttgacgcccaggggaggttgagctggctcagagcgcgggttggcggaggtgtcgggggccccatggagagaaggtagatgcgtctccaggaggggagccggcagcgaagctggtgcgtcgggacaagtgtcgtggggcgtgggtcggcctgcgcacgctgagggctggatgcgggcgtgggcgtgagctctgggtactttgggcgggaagcgtgtcctgatgaggctgcgacacagtgggcgcgtggagaattggatcagtgtgctcttgtgcatctaggtgtaagcgtgacttgggcgcg

SEQ ID NO: 1823 - DNA, 6000 bp, Homo sapiens
acacagtacctgccctcttagatcttaccatcttttaggcaagacagataagcaactgggcaattgtgatactgaaggccaggtgccatgatggaggggaattcaaggtactgtgggaacctgtaccagggatgtcttacccagtgctggttgccagggaagccatggaatcctgcctagaacaagtgcataaagagaagaagagctcaggatggaggctggggtgggtccacaggaaatcgcagcccaggaggcagggcaagaaggcagaggccaaccaagcatctgcttgctagcagctttgagtagctgctggctataatgcaggttcagtctataaagtgaaaaggcccttggcccagagctgcccactgtttccctttctaccagtcatgaaggggaagataatccttggatgctacacttctcagccacccaagtccgggactcaggaacaaggtcagaagcagagggtgtttacccaggaccacttgagacacctctccagaggcaggtgctgaattgtcgttaagagaggacaagtcatcactggggaaaagttcatagggccaagacaacaaagaggctagaaaatgggaaaatggctagaaaatggggaagtgagtcaggaagctgaaagcctacaagctgggatgggttggggcaggtgtttcaggctaacacgatgactaataatatgggaaactgtgtttgcaggatgccttgggggccaggggctggcctgcagactggaagccatgactgctcagggtccactgcattgtcatggcccagtgtttccacacccaacccctcatgtttatctgtatctgcccgactccccgcataagagtcagctcctgaaatcagggctccttccttccacacatcaaccatcccaagtctgtcaagcatccattctgctccagcatggggaagacccagaaacggctcaagacatcagccctcaccttcaacgtccttgcagtaaggttgggagctagcgcttaggttcactggaaagacctttggagaaagatctcggcttgatccccatcactgttcctttttaagtagctaaacgactattggaaaattacataaactccctgggcctccatctttccatcttcaaaatggaaataattaaaacctaccactacaatgtgatcagaattcaatgagtcaaggtggttagagcaccaagcacactgtttggcatataatagatgttcaataaatattacttctctccctgaaacaacagcaagagattgtggtgataaacagttaagtgttgagttgtgggcactgactgccaccccctaagcacctgggtctacttcaagggcctcagtgacagttgaggattgagagcctgcactgtgatggtgagaattagtgtttgtgtgcacctatgcaaatcgctccattttctttctccactgccacaggcagaagcataagattctttattttctatctcatgtccatgctacaggactctgctctgtaactgtagtttgttttttgtttgtttgttttggtttgtttttttgagatggagttctactctgtcgtccagactggagtgcagtggcacgatctcggctcactgaaacctctgcctcctgagttcaagtgattctcctgcctcagcctcccgagtagctaggattacaggtgcctcccaccacgcccagttaatttttgtattttaagtagagacggggttttaccatgtttgccaggcgggtctcgaactcctaatctcaggtgatctgtccttcttggcctcccaaagtgttgggattacaggcgtgagccactgcacctggtctaactgtagtatttttatttctctaatacaagtcaaaaattaaattagaaatcgtgatcaattgctaccattctttgcaccaaaggtgctttctcagtcctcgcacaaccctatgaggtaagtactgttatcattcccactcctacagatggaggaagctggggctctgaaagcaaaggaagctgcttgaggcgatgtggctggtcaatagtggggccagtgtacaaaggagcacagcctgggcaagatggcaagaccctgtctttacccccaaaaaaaaaaagtttttaaattaactgggcatggtagcacacacctgtagacccagttattctggaggctgaggcgggaggatcccttgagcccaggaattggaggctgcagtgagctatagccagtgctacaccagtgcactgtagcctgggagagagagcaagacctcgtttctaaaaattaaaattaaaattacaaaaatttaaaaaaaaaacaagggagcagaattactagcacagctgctctggactggatgtgagcaagaacaaactttgattcaatccatggaaatgttagagtctccttggtctctgccgctgagcctaccctaggctaattcatctcacagcccaggaagctgggtttagaagggtatggtccccaatttagtgatgaaggactgaggtgcacttgtgggaaccacagacttcgcccaaggtgttgagttcactcaggaaagagaacttcggcatccccagccatcggtatccccctactccatgaatgtaaactcagagagaccctccatatcatatccctagcacctagagcagttcctggagcatagcagggctcaggcaatacatgccaaatgaaaaaacaaattaatgaatacaggctgggcgcggtggctcacacctgtaatcccagcactttgggagactgaggtgggtggatcacttgagaccaggagttctcgaccagtctggccaacatgacaaaaacctgtctctactaaaaatacaaaaattagccaggcatggtggtgtacacctgcaatcccagctacttgggaggctgaggcacaagaatcgcttgaacccatgaggcagatgttgcagtgagccgagattgcgccactgtctaccagcctaggcgacagagcaagactctgtctcagaaaaaaaaaaaaaaaatacaaactcatacacaatagacacatcccatgcataagtgctagaaacactcagttatagacaagcatatacaatgaagatacttaagcacacgcgcacacacttgtgcacaatacacacctgtgcccacatacacaaatccatacccaaactaaagacacacacaaacacgtgtatgtatacaaagatgttatgggcaacatatacaatacatatatgcacaaacacacacctactcaccctcacacacatgcacagtgaccctccacaatgattctgggcccaggaagcagtttgtctaccccacgaaccccagcttgtttgaagctcgtcaggatgttccttgcagaccccgcttagccagctggtgactggcccccgcctcctgaacctccaggcttagggccggccaggcaggcaggctgcatctctggcagcccctcgtgggtgggcaggcaggcaggcagtggacgcagaggtcactggggtgagagctggggctgccctggcctccctgctcttggctggaatgtgagctgtaggggccacttcccaggcctcgctcctcccccacagccacccaccagccccaggcccagccaactcgtgactcccagtcctgccaggttcctgcagcctgggagctggacacagaaggcagtgagaggagtggtggtaaagaaagatccagaaccaagggagggcacacacaaacgcagagagagaggcacagtcttcacccacagagacagacacacacacgcagagacaggcaggcgtgcagactcacagtcccaccgaaagatacacattcagacacttccaaacacacccagatacacagcggacacgaacagatcacacaagcatacagagatacagagagacctgacccccacacagaggcgtatttggaggtacagtagtcacacgtactcagaccacacagaggctcagatgcaccgctcatggatattcacagacccgcaaatgcccatgcacacgcgcagatgcacacagacccccgcgcagcgtacagttcctcctcggccagggaccaggaggagatgcctgagtgagaccactctctaccacagggggctgccccgcagggagggcctgggaagactgcttcccaaggaggcaacaggcctgatcctccagccaggtgccctgagaggtttcctgtgggaggcccactgtgtccgtgcctggctaggagggtggtaggtcgggttagagttctggagtcacgtaggcttgggttttgtctctgccagttcctcggacacacagatgcgcgcacacacacaacacacacacactttccaagaatgcctatgtccattcgacatatgcaggcaggggtgctctcggagcctcggtttcttcatctatataacctggctaggaatcccttggccccctaggggtgtgggcatggctgccttcccaggcatcccggacggcccttcctgcagaggcggttagatcatgagccttgacggctgacgctggactcctggatgcccccatcccaggtgaccgccctgagagccgaagcagggctgtgggccctgtgggcgggcgcggcgcggcccggggagctgcgggctgggctcggcgaggcgtctggacctgccgagagcccctcgcacgcactgcgggctccggcgctgcgggctggccgggcgctgcgggctgaccgggcgctccgggaactcggctcgggaacctcgtctgcggtgggcggggccggcccggagccccgccccggctcagtccctgaaacccaggcgcggaccggctgcagtctcagaagggagctgctgtctgcggaggaaactgcatcgacggacggccgcccagctacgggaggacctggagtggcactgggcgcccgacggaccatccccgggacccgcctgcccctcggcgccccgccccgccgggccgctccccgtcgggttccccagccacagccttacctacgggctcctgactccgcaaggcttccagaagatgctcgaaccaccggccggggcctcggggcagcagtgagggaggcgtccagccccccactcagctcttctcctcctgtgccaggggctccccgggggatgagcatggtggttttccctcggagccccctggctcgggacgtctgagaagatgccggtcatgaggctgttcccttgcttcctgcagctcctggccgggctggcgctgcctgctgtgcccccccaggtaagagctacccccacctagcctggctccccagacctccccatcccagcactggaagcatgggactctgaaatcacagacccactccagggagcagcaactccaaggatgtccacacacttcctaaaggccaggctggacttctttcgtttgggaagagacctcaggctggctgtcccccaggtcctgggggctgtcttggtgggggcagggaagccacagggagggagggagggagggaggtttcctgtctggcccctggagccctggtggctttgctaaaagcatctgtccactaatcccaggcgggtccctggccttgtggtcagggtcgaggccccatggccaaccaggcgtccccaggacctctgacctggcctggtgggggtggcggaggagccagctgaagaagctgttggtggggaggctggccctgcccccaccagggctcaggactgagccgtgggctcctgggtgggctggggacgagacaaggggtctcgctgtgccttttctcctgggtgggtggccggaggtcctgagtgcagggcctggggaagtgagcagggcccttttcccaggagccgggtgagtctggctgggagccagcttgggcagtgaaatcctgacaaagccaatgaactgccttcccactgcgttgtcccactgccctgggagtccccagccccagcccaagagtaggagtgggctgggcagtccctg

SEQ ID NO: 1824 - DNA, 6000 bp, Homo sapiens
gatgcttttgttcccaagtgtgaccctaaacttaagctttgtaggagttgacattctttcatgtcccttccctttactcatgccgaaactatcaactgggacattttgtgcttttggtttaaaagttaattgatattatactttggttttatctaaaaagtaaatgtatttgcctttgacaaaagactgacacaagagcaaataagctttaaaatcgggtgttatgtgctttcctccatttttgagcatattatccaaaatggtctgtataatataaatgagaatgatgcagtttaagtaagccttgttataccattgtcatggacccctgtcataaagccatttcttggtttgtttgggaaagaggcatatgggatttatacagattcacttgtaaatgttggattggggatttttgtgtaaattttctcaaataaaggctagcagaaaccattttaggtgtactgttactcttgagtacttctatgtctggattggtgataattcttccatatttctcttttaaattatggcaaattatacctgatgaattagagaaaaaatattgttattcttcagttactgcagatcgatagtttatatgagctagtaaaagattatcatattttgtatgtaatatatgtaaattatatatatatatataattaagaatccttaattatgcatcctcagaccaaatatggttctgtaagctaggcattttattctctttatcttctctcttttggaaactgttactattaggttcgcacaaaagtaattgtggtttttgcaattaaaattgcaattgcatagaatcactcctacagagagccatctcccctgcctttcattcctaaaagacccccaccccccacccccggtatatgaatcctcaggactcactttttaggcctatcatatccaatgcaaaaccccactccaggaggtaaacgtcttttctcctctcctttcacttacagttgaacatttttcacaaagcgactttccaagagccaatatgaagtgctttgcacacccactggctggcctcttatttatcctcttatctccattctccctcaaataaattttattatgaatccatagtgtgtaaagtagtggttcccattattggggtataatttttttttcttttctttttttttttttttgagacggagttcactcttgttgcccaggctggagtacaatggcatgatctcggctcaccacaacctccgccttccgggttcaagcaattctcctgcctcagcctcccgagtagctgggattacaggcatgtaccagcacgcccagctaattttgtatttttagtagagatggagtttcattatgttggccaggctggtcttgaactcccaacctcgtgatccacccacctcagcctcccaaagtgctgggattacaggcgtgagccaccgtgcccggcccaatacatgctttataaatcatttatttagtctgctgcagtggtgtctcataaaatgttgagctgcatgtataattttaaattttctagtatcacattaaagaagtaaaaaacaggtaaaatttgctgattctccagcctcccgagtagctgggattacaggcacatgccaccacgcccaggtaatttttgtatttttagtagagatggggtttcaccatgttggccaggatggtctcgaactcctgacctcgtggtctgctcaccttggcctcccaaagtgctggaattataggcatcagccactgtgcccagccgaaaattatttttagtagtgtatttaacctaatatacccaaaatattatttcaacatatagttaatataaaaatggttaatgagatgttttgcattccatttttcatataaaatcttgaaaatccagtgtgcatttcaagctataccgcatctatagcttaaaattagactagccacaattcaagtgttgagtagctatatgtagctaatggctaccgtggcagacagtgaagggtataaacttgggttggtctttggtagattctttcatcttgacagtaactctatggcccctgggaatttgccattcacaaattggaaactaatgcaaaatagcattctaaccattcacttgttaaagtacaatgtggaaatagtttggtttcaaccaaaggcgctttaaaattttacaccttggccaggtgcagtggctcacacctgtaatcccaacactttagcaggccaatcacttgaggtcaggagttcgagaaccagcctggccaacatggcagaatgccctctctactaaaaatacaaaaattagctgggcatggtggcggacgcttgtaatcccagctactcaggagactgaggcatgagaatcacttgaacttgggaggtggaggctgcagtgtgctgagatcatgccactgcactccatcctgagtgacagagtgagactgtctccaaaaaaaaaaaaaaagttataccattagaataaatgttgactatttttgaacttataaatattcaaaggtaagacaattagtttcagttatatccaatataatgaagaattcagcaggaatgtctctgctctataataggacatgtttcttctaggcttgtagtatctatgcattatcattagaacaattcagtttcaggccaaccacgttatagaaaactagttcctcgttgcaaaggtgccagaaaaaaatgaatttttaagcttaggctgaaatctattcagcctctttgaaagtcagcattcccaattttaagtaattggttttttcccattcaactgagaaacaatttattgagcatcttttctgtttaacagagttaatcgagaataacagaattaagttaatagaattaacagatttaagccaaactaaactctggagtttatctagataaacaagaggcaatacctatcctcaaagtgccttctaattaataggaggatgtagatggaatggcctctacctgaaatgatctctctactttgtttagacttaacattttgtatattcctgcactcacacagcaagtttggcttggacagatgccactcctaaatgcctctctagaatcttgcactttaatagcccttatagaaactgttttaattgcctggtggttttctgttacatgtaagctctcttaaagtaggaacttttcacaaatcgatatgacacaatgtatttttatgtatttgagacaggttctcactctgttgcccaggctcgagtgcagtggcatgatcttggctcaccgcaacctccgcctccccagttcaagcaattcttgtgcctcagcgtcccaagtagctgggattacaggtgtgtgcacgcctggctaatttttgtatttttagtggacacggggtttcaccatgttggccaggctgaactcgaactccaggcttcaagtgatcggccctcccaaagtgctgggattacaagtgtgagccaccacgcccggctaggcacatggctttctcttagccccatcacatcctgctttttcagattgctgggttcaacttcccagctccctcttactaggtctgtcacattaagcaggttacttaggtacctctgtttctgtaaaatgggaatgttaggataatacataatacataatacataggataatacataataatgtgagataatacgtaaaaaacctttagcatagtacccagaacataacactcaataaatgttagctgttatgtctgtgatgtagaccacattctcacaacaaaacaagcttggagatgagaagttgcccaaggtcacataattgcccaaggtcacataactgatggaacacctattgttcaccgtattgctgttttcctacttgacggtagggagaacattattgcagatttcctgttcccaaacagtgtgtggcaccaagtgctcaaagaatgtttcatgatatcatatggtcaaatatctggaaaaacacatagaataaattgaatctggaaaaagagacgggggagaaggaaagtgtcaggagagttgacttaaaatatttttggagttgtgtagaagagggagggacttaggatggccctgggagaaagaactcggcccagggaccgagatgaccggaggcagacatttaggctgtctatattattattattttttttttttttgagacaaagtctcgctctgttatccaggctggagtgtagtgcgcgatctcggctcgctgcaacctcctccttccgggttcaagtgattcacctgcctcagcctctggagtagctgggattacaggtgcctgccaccacgcctggctaatttttgtattttatagagacggggtttcaccagttggtcaggctggtctcaaacgcctgacctcaggtgatccgcccgcctcggcttcctaacatgctgagattacaggcgtgagccaccttgcccggccatattatctttactatactatctctctaaaaaagaatgctgtccaacgttggaatggggaagaaggtgtacactgggaatgcttccccaatcaccctcttgtcacagacctgacgtcaagatgagactggacgacctctgggcctccaagttgtatgagtccggaccggggaggcagagaagggtcaatagacccgagaggccgtaccgtcagtgatgcccttgttcccgtgggagcccttcggttccacgcggttcccaccacgcgcccgccaaccctagcccgaggcctcactttgcaggccttccccgaaagcgggaagccttggccgctagactagccaagagggtaagcaaaggcggaggaaactcagccaggccggaaacacagagaactgtttccgggtcggggggcaggagccaccatcgagcttcgcggggttgctgggctgacggatccgcgggccggcatctgaagcgagcgggacgcagcgcggccagggcctccgggcatacgcaggctggtccccaaggcccgcggccgccgccatgtcggtgctgggcgagtacgagcgacactgcgattccatcaactcggactttgggagcgagtccgggggttgcggggactcgagtccggggcctagcgccagtcaggggccgcgagccggcggcggcgcggcggagcaggaggaactgcactacatccccatccgcgtcctgggccgcggcgccttcggggaagccacgctgtaccgccgcaccgaggtagcggccctcggcgccggccgccctgtctggcgctgtcgggtcgccccgagtccctccttctcggccccgctttcccagcgtcgtgagcttagtgctttaggcgcccacggggtatatgtcttagggtcttcaccactcttcccactcaccggcactagaaattggctagatcattggtttgactagtcatttttgattgtcctaagtcacctaaccgtctcttgagctttagtttccccatctgtaaaatgggcttactgataataccttgaaatcatctttttcttttttttttaagattatcttgagaatcaaacgaaggctctgttctgtaaattaaagtggtatacgaatgtgaggtattgccaaaacttccttcctctcatgctgtatatatagttctccaaggtcggggtgaggaggaggggcatagcttcaaaatccccacacccgtggcaactccgttatttttgtcattatctttaagttcagcagtgatcactcagttggaagcttttcttgaagctcattgggaagatctttgtgtgttggttctttatcagtgtttatcttgcagggtttatgcatgggaaatactttgttggtatattctaagccattagttcttaatttggggggcacaaggacccctttgataacctaagcaaagtaatcttgccccctccatcaacacatttgcacatatgcacatcctttggagagatccatggatcacggaatcccaagttaatatatactagtgtaaaaccctgcagtg

SEQ ID NO: 1825 - DNA, 6000 bp, Homo sapiens
agccccgcccctccaccccaatttttaaagggtacgcagcatggttcctggattctgtgtgccatcctccaaactaccgaatctttcttaaatctgccttgcttgacatctggaagcaacctccggttattaaaactcgccaacgctgctcctgcgagacggtaaaataatttggtcgttaggaactgtctgtatttgtagctctgtttaaatatatcaatatattaagtgcaaagcactactactgctatactgatgcctcccacttgtacagctctttgcaaggtacagaaggccgtcacagttattggcttaacgtgaggggcattaacaaccttgtgtgggaagcaagataagtggtattgtttccatttgacagatgagaaaacagggaatcaggtgtaataaatggtttaccatgaattatggaaactgcaatatacataatctctgccttcaagaagtttacagagaggctgaatcaacacatcaaatagctgagtagtaataactttcaaaagtacaaatattcaatatctcattaaatcccaataatcccgcaaagtgagtagcagtagtatctctaacacaacaataaagcacactgaggtacaaagaaggggcttgaggaaaatcacctaagtgccaagcagcagagccaaatgcccttctgacaccagacattactggagtatttatctccagcacatactactgggtgccagccattctcctaggctggcagagggagatgtaccacaaattcccagcctaatggggcatttaagttgcgtctttgttgactcttcatatgagatctccaagtcaatatcactggccaggtccctgacactggttggctgagatccataggagatgggctgatagccctgaaagcaaacaacattccagtattatgttgaggggaaggcctggatggacacaggttaaaagcaaggattcggaagtgggagtagcacccctgaaacctcattgcaagcatttcttaaatatccagtaaatcactcagttcagtcacacatgttactggataggactgtgtgttagcatgcctgtgacagcaagagcactggcctggatatcagaagagctgtgttctcatcttagctctcctgaaaactacctgtgtagtcagagcagagccctttccgctatcagtttcctcccttgtaattactttagagattatctctaagatcctttgttaacttgcttctcagtgagaatactttgttagattttaatctgaagaaacactcattgccaaaaatccaagacagatgaaatataggctccaatgaatcccttgttcccttcttcttcggcaccagatgaggaagaagggattaatctttggatttttccatttcttgtaagctcacagcatacgaccatcaccttatagtcagtttccagaccttcacccccacttcttccccaacttgctgaaaacagaaggcaaatggtcctcactctgggcagagaggtaccctgcagtagtagcttccagaacttgcttagcacctgaatcacgtgtgaggtttgtaaagaaacagagatgccagggcctcagctctggagactgatttggtagaggtggagtccaaaaaagtataactttaataattttccttcctatcttgcaactgtctgctcaaaggccttcccttatcaccctatttgaaactgcaacatcccccaacctaggcacaccccatcctccttccctgcttgattttctgccacaccacatttgtttgtttgcttgtctgtttgagacacggtcttgctctgtcgtccaggctggagtgcagtggtgcaatcttggccccctgtaaactctgcctccctggctcaagtgattatcctgcctcagcctcccaagtagatgcctgcgccaacatgccgggctaatttttccatttttttgtagagactgggtttcgccgtgttgctggggctggtctcgaattcctgagctcaagtaatcctcctgcatgggcctccccaaatgctgggattacaggcgtgagccactgcacctggctcagcactttttaccgtactacatcatttacatatttatttagtttatcgcctcctccactgccccacccctgcctctaaaataaaatttccctgagggcaggagttttgtttcgttcactgatattcttcacagagcctagaatagtgcctggtatatagtaaacattaaactttttctgaaatttcagaggcagtatagcatagtaattaagtccagaatctggcaacgtcctgggtccaaatcccaacagctgacacctaataactatgtgaccttgggcaagttacttttaaagtttctacccctaggtttcccattggttttgcaaatgaaagtaatgcctacccaagctagatagcctgtgtaaaatatcgcctccatcactcacaagcagtgtggtctgtaaaaaaaaaaacaaaaaactctatgcctcagtttcctcatccgtaaagtgacccaccgctgtgctgggatacagagaacagccccttcagttagtggcctggaagccagacctctcagaaagggtccaggaaggctggagtgagatggggtgggagcggcactcactctcaggaaagttcagttcagaggcaagccctgtgttgcggggtgcggggagccacgtgccctaccctcccttggctgctcgtgggaaaaggcctagaggttcgggccgagaagaggagcgaaagcacagagccgacttcccctcacccatctgggaaatgggctcgggccaactgctgacttcgcgctcgctggcgcagctccctgcggagacctcggcggggagggaggctgaacatctggatgacatttctgcgagagcggctccggagcggcggtcggggagggagaggtgcgctcgtgcgcacgtcgggccgggagggaggcgattcctcggggcctgggtcttgtttttctcgctctctaccgcagccccttctcccgcccctcagcccccaccccgcagcccccagcccccgagcctccccggctcccgaccagccgagctccttcactggcggcctcgcctcgccagagggcaccctcgatcttccggaaaacgccaccatttttcactgcccctggagcgtctccaggcttctgcccgcctcccgactccgatcttgtcaatgaagaatcgggccaggatcgccgcggagcggacgccgaccctccgacccggctcgcaggctgggagtcccctctgcgaggctggcatggccgcccctaccgggtcccgcgccctctgcggaccctgccccgggttgggcctggcccgcgggcggccccgggaccgggggaccaggagggagagtagacgcgggccgcggacggcgcggactgacagctggcgagagggcgccggggctgggggaaagggagggagggggctcatcggagtaactttccagaaaaacagccaacgtgtggcaggagtgattccaagaggggaaaaaaagttcagctaccacgtcgaacgagaggactcgcaaagtatttttcaaaagggctcggcttttcctgtgcctgtttaaaacattaacatcgtgcagcaaaagaggctgcgtgcgctggtccctccctcccccaccccaggccagagacgtcatgggagggaggtataaaatttcagcagagagaaatagagaaagcagtgtgtgtgcatgtgtgtgtgtgtgagagagagagggagaggagcgagagggagagggagagggagagagagaaagggagggaagcagagagtcaagtccaagggaatgagcgagagaggcagagacaggggaagaggcgtgcgagagaaggaataacagctttccggagcaggcgtgccgtgaactggcttctattttattttatttttttctcctttttattttttaaagagaagcaggggacagaagcaatggccgaggcagaagacaagccgaggtgctggtgaccctgggcgtctgagtggatgattggggctgctgcgctcagaggcctgcctccctgccttccaatgcatataaccccacaccccagccaatgaagacgagaggcagcgtgaacaaagtcatttagaaagcccccgaggaagtgtaaacaaaagagaaagcatgaatggagtgcctgagagacaagtgtgtcctgtactgcccccacctttagctgggccagcaactgcccggccctgcttctccccacctactcactggtgatctttttttttttacttttttttcccttttcttttccattctcttttcttattttctttcaaggcaaggcaaggattttgattttgggacccagccatggtccttctgcttcttctttaaaatacccactttctccccatcgccaagcggcgtttggcaatatcagatatccactctatttatttttacctaaggaaaaactccagctcccttcccactcccagctgccttgccacccctcccagccctctgcttgccctccacctggcctgctgggagtcagagcccagcaaaacctgtttagacacatggacaagaatcccagcgctacaaggcacacagtccgcttcttcgtcctcagggttgccagcgcttcctggaagtcctgaagctctcgcagtgcagtgagttcatgcaccttcttgccaagcctcagtctttgggatctggggaggccgcctggttttcctccctccttctgcacgtctgctggggtctcttcctctccaggccttgccgtccccctggcctctcttcccagctcacacatgaagatgcacttgcaaagggctctggtggtcctggccctgctgaactttgccacggtcagcctctctctgtccacttgcaccaccttggacttcggccacatcaagaagaagagggtggaagccattaggggacagatcttgagcaagctcaggctcaccagcccccctgagccaacggtgatgacccacgtcccctatcaggtcctggccctttacaacagcacccgggagctgctggaggagatgcatggggagagggaggaaggctgcacccaggaaaacaccgagtcggaatactatgccaaagaaatccataaattcgacatgatccaggggctggcggagcacagtaagtccaaattctcgctggggtgtctgctctggagggtctgaactggagctgggagctctgcagaggggggcctagtgctggccacacagcagggtgccccaggattcaccagcaccaaggctcaggatgtgcgatgctcctccgttggggctggggaggtgggtggggaaggagatagagccattctgttaagagccggcgcttctgggaggccaggagccctggagctgagtggcttgctgaattcacatcacatccttgactgattttaatttggaattacattgtgctgtccagggaaacatatgtattcttgcacatgcgatcgtatcagtaactgtaagcatctgggtgccataaaggggaaggccggctctgtcaggagcccttacggttctcagtgtggagacctcatcttctccctgcttttcacaactcattgtgacacgtctccgtttcagtttttccagttcttgggaagaagaatacctgccccaaattaatgtctgtcaagctttttgaagcccaggcaggagacagcttcttgctgcctgggccctttggtctaccccacccacgtgacccacgagacccacgtgagctgtgtgtgtggaaggaagagggtatgcacgaatgttcccagggccgtgtactttagggtgacatgcagtcttgtgcagtagacagattcatgtgctcaaaatgggcgccctccaggccggtgggcacggggagagcgggttttggctgtggatgcgtagaggaggctggcgccctttgtgtctgcgtgtcacgggagagcgggtggagggg

SEQ ID NO: 1826 - DNA, 6000 bp, Homo sapiens
tggaaatcagagcacttcaaaattcttggccatcaaatgaatcatttgcaggtgtttcccaaggccctccggtggagactctgcctctaaggcttcccagcacataaacaaaactttatttagtcagactcttgggtgctgaaatatttatacttttgcttactttgtttaaaaaaaacagcattaatataagcacttttagatctcatttaatgtggcttcctttgattctcacaataatggacagaaactgagactgctgtcattttacaaaggaggaaactgaggcctaggaaggtgatgaagtggctgacataaacctaggagcaaagccttctgatttcagatcctgggtttcctgggtgctttccactctaccctgctgaaacttgttttaagatgttctaaggactgactgccccactaaactgagaggggttacagaagagctcgtaaaaactcttatgcaatgtcgacacttcaaattgtagtgtcatttaggtttcagggatggtggaaacaatctttctgataataagcagcttattttcttctcaagtcagacaattccatcccttcaccatggttgcccttttccatttgtcacagcactgagtatctgaatacagcatcctacatatggcggttgtgctaaaacaaaaattcaatgatcttgtcgctaaatgctgttcacaggtgttttctctaataatttttaagtatttcaaggttttaaactttttgaagaccctgtatagatccatagggtagaaaaacttctttactgcctgatttttgtgtatgttaaatgtagtctatttattgcccatcttctcccactacaacataatcacatgagggcaggaactttgctttattcattgctgtatctccagcacctaggacactgcctgatacacagtaggggctcaataaatatttgttgaatgaatgaataactacattcacatccccaggtactaaaaaacattcacgtatcagcaggcctggtgaccttcaaaacacttagagatttcacagcagacactaaagacttgctctggggcccaatcttttagtaagtgcgatcctaaccagttttaaagataaaaaggcctgatgggggttacaaaggaggaaggtagacactgaacttgggtcttgaatctagctccattatttactaactataacgctgggtaaaccacagcctcataggcagcagtagctaacctcttctgacctcttccgtgataacatatgccaagcactgagttacacgcttcccatgtattgttgcatttccttttcactgtaacacctccattctaggcataaggaaaccaaggctcggaaaggttaaatcgttttttaggttttttttttttttttgaacccaggcaacagctctatgctccatctggcctcagtgcctgagcacctaatcactccctcacgttacaaatcggtcttggtttccttaactactgaggtaactgaggttaactcccacctccccacggggattaccgggaagaaaggccgtccctgcctgcctcccttccatgcataaaacagtgcggcttttgcaggaacttctgcgacgaggtgtcccaaaggaaaaactctaggatgggagcgagtgcgaccccggccggggctcccctatcaccctgtgatcgatctgttctggggaagttcgcactcggggctctagaaaacggagaaaggctcggaaatttcccacggtcctagacgccggcggggacagggtgttttctactttctgaggattttaaagaaagcaaaccccaggccagcagcggcggagcccacagtggcctgggggcggggcggtgaggctgcctccttctgggcctcacccggcgcggcgcgaggcctgccgccctgagtcgcctcagagaagtcggggccggcggggtcgctcctccccacccgccaaatcctggcccccaaggcccccgaattggtcctcacggaggtagccaagctgtagcgaagctcctcgtccaagtcgagcaaatcctccatctccgcggccgcctgacgtcacttcctggaaaccgactggcccagacgcgtccctgctaacagccccgcccctccaccccaatttttaaagggtacgcagcatggttcctggattctgtgtgccatcctccaaactaccgaatctttcttaaatctgccttgcttgacatctggaagcaacctccggttattaaaactcgccaacgctgctcctgcgagacggtaaaataatttggtcgttaggaactgtctgtatttgtagctctgtttaaatatatcaatatattaagtgcaaagcactactactgctatactgatgcctcccacttgtacagctctttgcaaggtacagaaggccgtcacagttattggcttaacgtgaggggcattaacaaccttgtgtgggaagcaagataagtggtattgtttccatttgacagatgagaaaacagggaatcaggtgtaataaatggtttaccatgaattatggaaactgcaatatacataatctctgccttcaagaagtttacagagaggctgaatcaacacatcaaatagctgagtagtaataactttcaaaagtacaaatattcaatatctcattaaatcccaataatcccgcaaagtgagtagcagtagtatctctaacacaacaataaagcacactgaggtacaaagaaggggcttgaggaaaatcacctaagtgccaagcagcagagccaaatgcccttctgacaccagacattactggagtatttatctccagcacatactactgggtgccagccattctcctaggctggcagagggagatgtaccacaaattcccagcctaatggggcatttaagttgcgtctttgttgactcttcatatgagatctccaagtcaatatcactggccaggtccctgacactggttggctgagatccataggagatgggctgatagccctgaaagcaaacaacattccagtattatgttgaggggaaggcctggatggacacaggttaaaagcaaggattcggaagtgggagtagcacccctgaaacctcattgcaagcatttcttaaatatccagtaaatcactcagttcagtcacacatgttactggataggactgtgtgttagcatgcctgtgacagcaagagcactggcctggatatcagaagagctgtgttctcatcttagctctcctgaaaactacctgtgtagtcagagcagagccctttccgctatcagtttcctcccttgtaattactttagagattatctctaagatcctttgttaacttgcttctcagtgagaatactttgttagattttaatctgaagaaacactcattgccaaaaatccaagacagatgaaatataggctccaatgaatcccttgttcccttcttcttcggcaccagatgaggaagaagggattaatctttggatttttccatttcttgtaagctcacagcatacgaccatcaccttatagtcagtttccagaccttcacccccacttcttccccaacttgctgaaaacagaaggcaaatggtcctcactctgggcagagaggtaccctgcagtagtagcttccagaacttgcttagcacctgaatcacgtgtgaggtttgtaaagaaacagagatgccagggcctcagctctggagactgatttggtagaggtggagtccaaaaaagtataactttaataattttccttcctatcttgcaactgtctgctcaaaggccttcccttatcaccctatttgaaactgcaacatcccccaacctaggcacaccccatcctccttccctgcttgattttctgccacaccacatttgtttgtttgcttgtctgtttgagacacggtcttgctctgtcgtccaggctggagtgcagtggtgcaatcttggccccctgtaaactctgcctccctggctcaagtgattatcctgcctcagcctcccaagtagatgcctgcgccaacatgccgggctaatttttccatttttttgtagagactgggtttcgccgtgttgctggggctggtctcgaattcctgagctcaagtaatcctcctgcatgggcctccccaaatgctgggattacaggcgtgagccactgcacctggctcagcactttttaccgtactacatcatttacatatttatttagtttatcgcctcctccactgccccacccctgcctctaaaataaaatttccctgagggcaggagttttgtttcgttcactgatattcttcacagagcctagaatagtgcctggtatatagtaaacattaaactttttctgaaatttcagaggcagtatagcatagtaattaagtccagaatctggcaacgtcctgggtccaaatcccaacagctgacacctaataactatgtgaccttgggcaagttacttttaaagtttctacccctaggtttcccattggttttgcaaatgaaagtaatgcctacccaagctagatagcctgtgtaaaatatcgcctccatcactcacaagcagtgtggtctgtaaaaaaaaaaacaaaaaactctatgcctcagtttcctcatccgtaaagtgacccaccgctgtgctgggatacagagaacagccccttcagttagtggcctggaagccagacctctcagaaagggtccaggaaggctggagtgagatggggtgggagcggcactcactctcaggaaagttcagttcagaggcaagccctgtgttgcggggtgcggggagccacgtgccctaccctcccttggctgctcgtgggaaaaggcctagaggttcgggccgagaagaggagcgaaagcacagagccgacttcccctcacccatctgggaaatgggctcgggccaactgctgacttcgcgctcgctggcgcagctccctgcggagacctcggcggggagggaggctgaacatctggatgacatttctgcgagagcggctccggagcggcggtcggggagggagaggtgcgctcgtgcgcacgtcgggccgggagggaggcgattcctcggggcctgggtcttgtttttctcgctctctaccgcagccccttctcccgcccctcagcccccaccccgcagcccccagcccccgagcctccccggctcccgaccagccgagctccttcactggcggcctcgcctcgccagagggcaccctcgatcttccggaaaacgccaccatttttcactgcccctggagcgtctccaggcttctgcccgcctcccgactccgatcttgtcaatgaagaatcgggccaggatcgccgcggagcggacgccgaccctccgacccggctcgcaggctgggagtcccctctgcgaggctggcatggccgcccctaccgggtcccgcgccctctgcggaccctgccccgggttgggcctggcccgcgggcggccccgggaccgggggaccaggagggagagtagacgcgggccgcggacggcgcggactgacagctggcgagagggcgccggggctgggggaaagggagggagggggctcatcggagtaactttccagaaaaacagccaacgtgtggcaggagtgattccaagaggggaaaaaaagttcagctaccacgtcgaacgagaggactcgcaaagtatttttcaaaagggctcggcttttcctgtgcctgtttaaaacattaacatcgtgcagcaaaagaggctgcgtgcgctggtccctccctcccccaccccaggccagagacgtcatgggagggaggtataaaatttcagcagagagaaatagagaaagcagtgtgtgtgcatgtgtgtgtgtgtgagagagagagggagaggagcgagagggagagggagagggagagagagaaagggagggaagcagagagtcaagtccaagggaatgagcgagagaggcagagacaggggaagaggcgtgcgagagaagga

SEQ ID NO: 1827 - DNA, 6000 bp, Homo sapiens
tttctgcagtgatggacatgttctataatctgtactattcattacagtatctatgagccataatggctactgagtacttgaaatatggctagcgtgattggagaaactgaacttttaattctatttaatgttaattaaattcaaatttaaatagacacatatgacttctggctaccatactgaacttctggctaccattgcagaaatttcttttctttttttttttgagatggagtctcaccctatcacctaggctgtggtgcagtgatgcaatctcggctcactgcaacccctgccacttgagttcaagcaattctcctgcctcagcctccccagtagctgggattacaggtgcttgccactgcgcccagctatttttttgtagtttttagtacagacaggattttgccatattggccaggctggtcttgaactcctgacctcgtgattcacccccctcagcctcccaaagtgctgggattacaggcatgagccactgcgcctggcccattgcagaaatttctattggacagttctgctctgtgattctttcttgggattaaactccttttcttttcttcttttacctcataaattatgaacatgaaaacagcaaaaagttgagtcagaacatctaccttttataaacacatctatacctgtgtgcctccatgcccctcttttactaacagcaccccatttacctttagggcagtccttctcccccaaccacctgtagtcttggctaatgaaattgccccatcctcctctagccaaggatccaagctaagtcaacagactcttctctctggaaatttcactctagcttctgtgtcacaagaatagaaaatgtgtcagagcagattaatatgagtgttgatgccctaagacaacatgcgttcatttgcagaccattagtccagagtgtgacgataacaaatgtgacacatgatatgagttaggcgtcattatcgtcatccttgtcatcatgaaagtgacttgtacccagcagctcagatgtgcctgctcctgtactaggtatgtaatttgcctagcttctcttatgcatcctttcttcatctgtaaaatggaaatcatactcatcctaactcttccacggtttttgtgaagacagcaaaaggaataattgtcatgagggccgggcgcggtggctcacgcctgtaagcccagcaatttgggaggccgaagcagacagatcacttgaggtcaggagttggagaccagcctggccaacatggtgaaaccccatctctactaaaaatacaaaaattagacagacatggtggcaggcacctataattccagctactcaggaaactgaggcagagaatcacttgaacctgggaggcagaggctgcagtgagcagagatcgagccactgcactccagcctgggtgacagaccgagactctgtctcaggggaaaaaaaaaaaaaagaaaaaaaagaaaaataacggtcacgaaagctttgagccaaataaggagttacccaagtgtctgttggaggagttgttcccaaggcataggtgtggggagtcatgggagggcttgatgaaggacccaggatctgagaccaattcaaaagttgtgccataccaggttaagtcacttgttctctctgggcttttggcttagataagactgggttatacacatctctttccagtttcaccattttctaatctatttgcaagcccccttgcctgacacataccctcttccacttctatgcacacatgccagaaaattctctagcctagtccatgctgaccttgtacccaactcatttcttcttttcccagctcctcacctgattgggaagttgctctgggtatgcactcccacagcttcctgaataaccctctggcagagcaccttatggaaatcatgcttaactatctcctccactagtaggccataagtccaactagagcaaaggccatgtccctcttgttcactactgcttctccagtgcccagtacagagtcaaacacatagaagatgttctatgagtacttactctttgaatgaataccctacatctattttatttgtcatttcagaaaacacatggtattatctcatgctgcgtaacaagttagtccaaaacttagcagcttaaaacgagaatagtcacttatcctctctcaatttctgtgggacagaaagtcagacagggcacagcagggctggttgttctctgctccatgtctgggacctcaactctaagacttaaaggccgagggctggcaagacctgaagtctcggtttgccatgatctggtgattgactctggctgttggctgagagcccagcagcagctgtcagcgagaacaccctcatgtggcctcaccatgtggcttgggcttcttcacaacatggtagctggtttcttctgaggaaccaagaagaagctgtctcctttttatggcctggtcttaagagtcatacagcttcactttcatcacactttattcattagacaccagtcaccaagtacatcccacattcagggggaaaggaattagatcccatcttttgaaaagaatggtcaagagcttgcaagccaattttaaaaccagcaccacttggctaacacaagaagcaatgtatagagtgaaaaacaagtgtctgaagaagtaagacttctgttcacattctagctctgccacttactagctgtgtgagtttggggaaattaccctctgagacttggtttatacaatacagggtgatagttgttgatccctagtgatttttctacgcttggagtcttcttgccttagtgagtttaagaagatccaggctgaactaactttcttggagtcttgcaatccttcccatcactgataacccttggtttctgaccctggaggtagtaagaggttgctacgggagcacagggtacccagaaagttcagatactagggacagctttagagaacagatgtgaaaccactgaggccctggggtctctctaaggcctttaacccagcccttgtgtagtaacctcagcttgtcaagaaatgcaacgaccccacaactaaggaatctgaatctgccggctaaggccaaggaatctgcattctcccacaagactgtgattcatgctaactacaggcaggggagagggggagcatcttaaagcacacactcggccgtctcttcctaaagttcttggcttcagcctagagatagtgcctttcccaccatttacaactctatggcatgagggaggcggagggtgcgtccagtgtccaaccacgcaccacagctggttgtactttcaccttcctctaggccagcggaccctccccaagcattgcctcccacgcccacgtcgcggtcccaccctggtccgcggggtccagagcgtccaaagcccggtctaggcagatggtctaggggtgagctctgcgcaccccattcccaccagtgcaggcaatcgaataaaacagggtgacttttaacccttttcgtttccagagatagtgaccccccgtctcaatccctagatgtcctcctctaagaactgtgcgcgctgggagggactctgcgctcactcactgtgaccacctcggctgggatatggggaaactgaggcctacagagggaagggaactgctgaacgtcccaaagcaacacaggcactgaatccggtctagaatcccagtcttccaggccagtgctctcggtcctaccggctcagggcccctgcgaagaatctttttcaagaaattcccgaccgcaggaattccttctgcgctaggaatctccatggagtttgcgctccctctggcacgttgaaaacgtcctccgcagcttcgcaccggcttcgcggcgccctgacagctgggtgaggagggagcgaatgcccaccggcgtccttggggtaacttgggacagaggcaccgccgcggggggcggaggactgggcgcgaaggcgctggccctttaagggggggacggagcgcatgcgcggcgcgggccgtagtcgagcctggtgggcggctggctggcaggggacgtggtcggcggcagcggggcccaggggcggcggggctgcagcagcggcggccccagcttcgccgagcagcgatcggctggtgggcttctcgttggcgggctccgcgttggcgggctgctccccaggcaccagcgcagcgcgcgctcgcccggcttcgtcactcgcctccagctacatccgccggccgaggctgcgcgagcctccgggcttgcggtccccgccccgcggtccttcctccaccctcagccagggcagctgcagcccgagcgaacagccacggagcatcctccgcccgcccgggccgcgccaccgcccatgctgcagccagtcccaggcagcgaccccgcggccgcagcccgccgctcagtgacctcagcctggcccctgcgcgccgcccgagccggtcccgctgagccgcgggccccgtgccctgcgatggctcggctggtgcagcgcggcgccaggtgccagccgtcctcccgctgagacgcgcccgagtggggacccgctgggcctcggggctcgcagccttcgcctccccgccgcgcccgctccctttctggggactccgccgctgtttctggggacgaggggacaggggacccagacaaagcccactttgtgcagggagttggccgcaggcggggaatgtgcgcgtcggcgcgcgccccctccccgctcccggccagctgcgagtcttggctcccggacttgtctcgtcgcgtcggagaaatcgccccccagcgccgctctcccgcccgggggtcttggttccgagctcgcgcggccgggagtcgcctcggtcttccttggggcgcgcgcagatgtgagcgtgcgagagttgtgtaggggattttgttccctccgaaactgagacccagggcgcccagtgggcacccgtgccttgactctgtcctttctgcagccgctggtccgagctgtctggcctcagtttccctccgacttttctccgctctgccagccctcactgctgcccgtcattgttctcgcagttagatgggggtgctttgtgacggctgccaagttggggtgtgttctctttattccgtttttcaaacagaacaaggcctccaaggctgaccccagacaacccaccccctcggaccctaattcaccttattgcactgattttttttatcaagtcgtattttattgtacaggagccacgccctgatttcttaaaggcgccttgcactctggccatgtgttatctctgcagccggtgtgtgggaggcctcttgtgagccagttgttttcccgcctccaccacccccctcgaagatttagggatgccaggggggaagaaggtggctgggggtggcagcagcggtgccactccaacgtccgctgcggccaccgccccctctggggtcaggcgtttggagaccagcgaaggaacctcagcccagagagatgaggagccagaagaggaaggggaagaggacctgcgagacggaggcgtccccttctttgtcaaccggggtgggctacctgtggatgaggccacctgggaaaggatgtggaaacacgtggccaagatccaccccgatggagagaaggtggcgcaacggatccgtggggccacagacctgcccaaggtgagacacacgggtcaggggggtgatagcacagtctaggttttagtgaccttggggccaagagtgaagccacactctcctcccacggggcaggggaccactggctcggtaagatctttaaaatgcagtgatatcatacctgtctaggagaactttctctcactgccattctaggagggaggctcacatacattgtctccaggaggccctccccgctgtcttttaaaatgtccacgttttacaggaggggacagcagcagatggaactaacaaacacagtaggatggcttgacgtctcatttgcttgatgacacttgccaagccagagaactg

SEQ ID NO: 1828 - DNA, 6000 bp, Homo sapiens
attctcctgcctcagcctcctgagtagctgggattacaggcataagccaccgtgcctggctggaaataggttattcttttgaggcatctgttctcaaagagagtaacagggaatagtagggagtaggttttgttattgttttggtttttatatatttttcagcataaaggagaatgaaaaatgtctgcagccagtaaaaacaaaaaggaatcactagaggagtcagaacaagggaggctaactggtcaagggataataaaaagcacagcaagaaagttaaccttagaaagaaagctctttcttcccctgagaatggaaggaaaagtttgagaaagatatttttaaataatcttttaagggggaggaagtaactaaaaaatctcaagagtacctccatattctctaggaagtataatgccaagatatctgttgaggggaaaggggcagaacggggaacagtgttaggaataccccagtagggatgaaactggaatggaaaagaacctcggtccacaagcggataaatcgtaagtatattcaattgttttaccttctgtaactggccaaactcctggtccctttaggttccaaggcagaatataaacaattcatgaaatgtagtgaaaatattatggacataaacagaatagagacagtcctcaaaatcgtagaactccctgaaaaagtttttgcctcaggtctataaacctgttccctattactcttcaattattttttcacaagaccctaaagttgtaagttttctcattagtagcttgtgattcctctgaaaatgactgagatttatgaactctgcaaaatgaaaatccataaacaagcaacctgtcaaggcattttagcagcacctttcaggaatgtgcttcataaatatcattttacatcataaaagactaaatatattttcaacatttagaattatggaaacaatagtaaatgtcaccactcaattatctcacccaatatcgaaatcccctcttagtaatatttggccacttatcaatgaaacctcattagtttacaaaacagcctatggcattgctgggtatcaataactggtgttcacataattcctgtattcctatattgatttttatctgtcctgttcatcccctagatctgctacacagatggcataaaataatgcatgaatgaaatctaccttttagcgactctttaacttctaccagggtccttaaactaagccttgaaaatacatttcccttatctattgattgtctttcaaacaggtaaaagcaatttttacattctcttctctagggtaaacaaatctaaccatttttctcatcatgatttttctttttttttagtgtttcaagtcctccctaaatattaggaatcaaaacagatatgatgtgcatagcacatgggaggggggtggtaactaacatgcagtaacatgtccattgtgtgtctgctgcgttgcagcatgtctgcaagctagttttcttatcctcacaatttatcactgagaaaatggagccagagacacgaaacaacctgactaattcacagctagcaagcagcatcacaactagtcttactttataccaagatactgccttccctcaatctagacactgcttttcttctgtttaagtggaatgttacatcctagaaccacttttgtcaagccaggaaaactcaggttttgtaaatgtaatcacaccaagtaaatttatttattttttattttttttgagacaatctcacctagtaaatttatatctggccagttctggcctattattatatttcagcctttaagaaatctttgatttctgagtgtcatctaatttgctcattatcactacatggtttgagtgcatttattaacttgagaatcacgctgcttatctatttaaagttggtattaagaaagtgttaatccgagtaagggcaagaccagagtcctgtagcatatctccaaagacatctccccaggcttacatcaactcattaatcaacatttcgggtttggtaatttgcatggatataaatccatctaaccacaccttatccaatgcacatttaactcttgtgtctacacacagtattagaatcttgttggaagactatgtcctaaataaacttaaatgaacttatgtccaacaatccccaatcaccaccagtctagtaaactgtaacaaaaggaaatatgatttgtgtcacctggctttttcttgagacagggtcttgctttgtcgcccaggctggagcgcagtcacccgatcacggctcactgcagccttgatctctcagactcaagtgatcctcctgcctcagtctcccaagtagctactacaggcatgcacctccacatctggctaattttttgattttttttttgtagtggtgaggtctcactatgttgcccaggatggtcttgaactcctgagcttgtgtgatcctccagctttggcctcccacagtactggtattataagcgtgagccaccacctctggcctcacctggccttttctcactgaagctctgctggcttcagggaatcagctctcctttcccaagtactcataaacttgttggctcttccaacaagattctaaaacagattattaataggttcctagtagccaagagccatcgaatggttctatgtgaaaacagacatttaccagattctagtcttctatcattaactgtacttttaggatttttcaaaatctaagaataacgattttataaagtcatctgcaaatactctggtatacaatttacctgagcttaaaaatatgatcactctgtaatctcctcaattaccttgaatttaattcctctagatttttttgtccttatccaattttaaagaaaacaagcagaaaacactgtcctccctttcagacactcagcagagtcactgctttcaaatataatgtcctgaaatgaactagcccattttataggccacagctatgaccaatttttctttatgacattcaattttagaaacagcatttaaaatttaagaacctcattaacaactcgaatagtttttattgcttgttagtgcaaactacattttcaaaatggaacaaatttaaacaggatttgcccagaaatcaactaatatgcttgaataatgcatcacaatataatcgaaatgagataaaagagggaaaaaaaccctaaaagacaccagcggtggtcactctgaataagacaatcttggataattattatattcatagtcaagattatttaacaggtaagcatcctaagggcactttaatccaaatgtctatcaatactactaccactaccatcatccatccattctttcattcagcaatacagagggcttattaaacgtcaggcagtgttctaggcgctgaaagctcctcgctttcattctagcaacatcattcatacaaacctttagcgggcacctacaactgcaaggcattgtgctaggtatctgtaaacagcgatttagatcgagatacacaaacatcaccaagtttctcttaaaaacacagaagaccacccttaagaaatgctcttagaaatagttcctaacctcagatgacttagcgaaagctccgtttaactggcagtctaaatttagggagcattaccgagcctatcttgggcagacaatcgtttaggagctgtcacataacctctagacttacgctccaattttctaaagaacaatttctctcataacaaaccaaatcaaccaccaggagcgggtccgtaaagacgatgtctgggcaagaacgaaatctaatcccggaagtgccttttcctcatcttagccgcaccctcgttacgtggctctccaaaactccaaagtcggagtaccctagacatggaacaacctccaaaaagtttcaggcctagccaaggttgggactaatacgccgcgaaataatcggggagatatgagaagtctgtggctgtgagactgtgcgcggttaacaccgctgccccttttgcccaacccctagaaagttccccaactctgactgccccccagtgcgagggccgctaccagttctagggtgagtccggcctccctgccccgccccggcgcctcagaccctctctacacgcccgccccacaaccccgcgtcgcccgcaaagttcaatgtgtaccggaggttagcggagggaggcagaatccggaaagagagactccgccagtggatagcggcggttggccataacctactccgacctccagatacgcgggaggtgggcggcgctgccctcagtcggtgggtcactcacccctcgcttcaggcaagcccctcagcgacgtctctccttgccgactgcggccatcttgtatatggaatgtcggggacctacgtcatcacgctgcgtcctgagacgccaccaagcgaccggaggggcggagagagtaggatgcctgtcaaccaatgggaagaaagcagagctctcaaaagaggaacgagccgccgctctcctccccgcccgccccgcgggtcagtggctgctgcttacagagggaggagccagccacagggcccatcccgtcggtcccgcccctcggggcgaaaaggcattctggagcaaccgaacctgctaacggaacttgggcgcgtaggcggggcccgggtcgagattcgtccaatcaaagctctggcgggggcgaacgcagccagttgcgacatcgtggttggcggcggctgagccggccgctcttgcccccgggagctgccagcccactggctggggaggaccccgaacggaacgccggctgggtggcggggcggggccgcgcccatgcgtccgaagcgtgggccaatgaacggcggcggctgcggcccgggggcggggtccggggcgggaggagaagcgttgggccgcggtcgcggggccgtctcaggctgccgtcccgcccctcccgtccggccgccgccgccgccaccgccgccaccgcctgggggttggttgaggcggacggcggggtccgggccggagtacgtcgttcccgctgcgctaggggaagcgggcaggtgagtgctggcggcggtctctgcgcccgcgcggcccgcgggggaaactcgcgccgcgtctccgagctctgcgaggccgtccctcgccctggccagcgcccctcggccgaagtccggcccgcgcccccgccagggtccccgccggccgctgtggccccggggcttgaaggggcaggtgtgcgctcgggggccagggcgaggagggcccggcggggtcggagggcgccggtcggcctctgcccgggcgccctgcggggcgagaggcgcgcgctcgccgctgccctgtcccctctggcgcccacgctcccgggccccgcgccacccggtctcgaggtggtgccaggtgcaggcagcgctctccccgagcttgccccgctgtccccggccctcgcgcctgctctcgggtggggcccgggcccctcgcgctagtcggctcggctctgcgcgcggccgggtcgcgctcccatttccttccttcctcccgtcaccccgctgctcggggaaggctgtgcggttttatgttcctctctgcgagttctcggtgcccaccagggtgcccggggaccagcccccgcctcctcccgcgccgtccagttaggaagacggacgtaggaaataggtcgtctttcttcccacgcgcccctggccgtgctccacacgcgcagtgccctactagggagaggcaattcggtgctttagagtttgtcattccggcgttaactcttcctcctcgtggctccagcccggcgatgcaactcttgtcttttcccggtctccacttgggaaaaggagctgacagtgacgcgcgcccctggctgcggggctcacccctgcccggccggtgttgggaggagggcatttcagtgttgcaaaggcattcgcgggttaggaccactcggaccgtgttattttgcttttctaaataaataaggtgatgtttcaaaagcaaaaata

SEQ ID NO: 1829 - DNA, 6000 bp, Homo sapiens
ggacatgggcaaaacttccaaaagagcttccatccagtccaccatatctgcaatgccacatttttgttgcagggaaaaacgcagaaccatgaggtgaccatgacatgcagcgaagctaaatttttacaaacaacaaatcaaaaatgttattagacactagtaaatattttatggtaaaagcagcttttataagtatttgtcaacactaatctttacttcctctcaaatatgtgtaatagaaaactgctgatattgaaaaggcatgtctattttctgagactgaacattgtaaaccatttagtcggaagactttcttagacctgttatgtcctgatgaattgtattcttaaaaaatggaacgtgaaactcaggatcatagacagtaataaacctaagtgtatattttattaagagttctatgtatcatatatttttgtcaattaaaaactaaaaataaaaagttccgtgtagacacttgattatctacattctctagacaattttttttgtccttctaaaaaacagtggaaacatttcttcctgctctgtccctctgccctcccctacttccccatcccagtactgaggttaggcttgcaaaaggctaatgattcactttggcttagtaatcagtagatccctttcaaaatcttaacttcaaagatagatgtgtctttcattgtcaaccaagactgtttggactcactagttcacttctacttggaaagtacttgatagaagaaaaaaaaaattgcaaagtcttaactttggtatttgaattttataatcatttggaatcagttttcttccattcaaatttatctcagtcgaaactgttcaatatctgtgtttttatctcgtttttacagtctgtttatatccaaaacttagaggagactcccaagtggaaacggggtcaacacagctaatctctggcttgagttaaaaagcaagacttcttaatcttgcagatgctaatttttttttcaaaagactattaagtaactttttaaaaagccaagtctcagcccagtgcggtggctcacgcctgtaatcccagcactttgggaggctgaggtgggcggatcatctcaggtcgggagttccagaccagcctgaccaacatggagaaaccctttctctattaaaaatacaaaattagccaggcgtggtggcgcatgcctgtaatcccagctgctcagaggctgaggcaagagaatgaacccaggaagcagaggttgcggtgagccgagatcacgacattgcactccagcctcggcaacaagagcgaaactccatctcaaaaaaaaaaaaaaagccaagtctcaacttctttgtaataggaaaatatattaatatatattaatattttgatagaaattttttaccttgagagtaaatattatgtaaattaattctatttgcatatcaaattagttaacctctccaatttatgaatagaaaaatgagatgataaaaggaaatccaatgacagaaaaccattgtaaaggcaacagaagtgaaaactatagaaaactgaaaaagcaagactctttattctaatactctcgactggttaaatatgacccaaaacaaactgttagccagataaacacttctatgactatagcaggagagaaaagatgcacggctaatcaaaagatttttcactgataaaaaaagggcccaaaaataagggtaggtaattgagaaagcaaatattataactggccacaagcaacatccaaagtaacataagaataaagataagttcaccgttctgttaaaaacatttaatgccatagcaataaatgactccgagttctctttgagggaacaaagtcaccactccattcccaggacttcggtccaagggaaagaaacacacttgaaactcttcctctccaccctcaacagaagcacaaggcacagcagccagggaacaggcaaaccagtctctaaagataaataacctctcagagaaggatattcatccaactacacaaaagaaagatacagtattactagttacagttctaaaccctacttcggatttgtgataagaaaaaagactctatgtaattaaaacattgaagaaaactggtacgcctcaaactacactgacatctagtcacaaagcattcagagtaaccctgacttggaggtaggatttttgctcatatttttactacaactctacacagcacaaactatgcacctggttttcattgaattcaatgattgtctactaaatattcactccaagcaagcctccgtcgctgatggtcataccttccccggcgccgtcatcctgtcattctcctccaggcaggagagtactgtgttccaaggaggctgttgtgaccgtttatcagaactctcaaaaccaaaacagttgtccagtggttaagctttaaataggaaaaatatcacctccatatttttctcattatccagtggcttctaaagcaaaagcttaattatcatttaaaatgtggcctaaatgtccacggcacggaagagcagcgcagcagccatcactttcttactgacagtcactgtgctcttacgagaagctttcgctataaccgtacatacagacataagatgttctaatcttcaaatccaacaccactccaattccaggaaaaaaaagcactgagatgttagcacactggagaagcaaccattttactccttcagactacagttccatttcagatattaacttacaatcacttggagggcagacaggaaaggggtagcagaaggctaaaatccaaggttgtctggggtcccaataaagaggttctgtagctgtttgagaacttggctttgcaaactactttcttaggccgaagaaaaactcctcggtaaactgttggaatttcaccaaagtatcaatcacggcagcccttgggactaatccagtactgctggactttcacgcatggtagcccgtataaacacagtacatacagcaaggttcaagcaagtcttggcaaattttaacagtggagaggaagactgctttattttgctatattcttgggttaaatgtattcgcttaaaataataaacacttctccgagattattactggttagttcagttttgaaatactggcaaggtcatttcaagaagaaaaacgggagagggagaggtatattttacataagataaaattcacacttttcagtgtccggttctgagttctgacaaacgcatttatagtggcctcatcagcaccacaatcaggctacgaagatggggtaactcttcgaggattcttaaaagcaaaattgatttgtcagcatactttaaaagtatttttgcttttgaaacatcaccttatttatttagaaaagcaaaataacacggtccgagtggtcctaacccgcgaatgcctttgcaacactgaaatgccctcctcccaacaccggccgggcaggggtgagccccgcagccaggggcgcgcgtcactgtcagctccttttcccaagtggagaccgggaaaagacaagagttgcatcgccgggctggagccacgaggaggaagagttaacgccggaatgacaaactctaaagcaccgaattgcctctccctagtagggcactgcgcgtgtggagcacggccaggggcgcgtgggaagaaagacgacctatttcctacgtccgtcttcctaactggacggcgcgggaggaggcgggggctggtccccgggcaccctggtgggcaccgagaactcgcagagaggaacataaaaccgcacagccttccccgagcagcggggtgacgggaggaaggaaggaaatgggagcgcgacccggccgcgcgcagagccgagccgactagcgcgaggggcccgggccccacccgagagcaggcgcgagggccggggacagcggggcaagctcggggagagcgctgcctgcacctggcaccacctcgagaccgggtggcgcggggcccgggagcgtgggcgccagaggggacagggcagcggcgagcgcgcgcctctcgccccgcagggcgcccgggcagaggccgaccggcgccctccgaccccgccgggccctcctcgccctggcccccgagcgcacacctgccccttcaagccccggggccacagcggccggcggggaccctggcgggggcgcgggccggacttcggccgaggggcgctggccagggcgagggacggcctcgcagagctcggagacgcggcgcgagtttcccccgcgggccgcgcgggcgcagagaccgccgccagcactcacctgcccgcttcccctagcgcagcgggaacgacgtactccggcccggaccccgccgtccgcctcaaccaacccccaggcggtggcggcggtggcggcggcggcggccggacgggaggggcgggacggcagcctgagacggccccgcgaccgcggcccaacgcttctcctcccgccccggaccccgcccccgggccgcagccgccgccgttcattggcccacgcttcggacgcatgggcgcggccccgccccgccacccagccggcgttccgttcggggtcctccccagccagtgggctggcagctcccgggggcaagagcggccggctcagccgccgccaaccacgatgtcgcaactggctgcgttcgcccccgccagagctttgattggacgaatctcgacccgggccccgcctacgcgcccaagttccgttagcaggttcggttgctccagaatgccttttcgccccgaggggcgggaccgacgggatgggccctgtggctggctcctccctctgtaagcagcagccactgacccgcggggcgggcggggaggagagcggcggctcgttcctcttttgagagctctgctttcttcccattggttgacaggcatcctactctctccgcccctccggtcgcttggtggcgtctcaggacgcagcgtgatgacgtaggtccccgacattccatatacaagatggccgcagtcggcaaggagagacgtcgctgaggggcttgcctgaagcgaggggtgagtgacccaccgactgagggcagcgccgcccacctcccgcgtatctggaggtcggagtaggttatggccaaccgccgctatccactggcggagtctctctttccggattctgcctccctccgctaacctccggtacacattgaactttgcgggcgacgcggggttgtggggcgggcgtgtagagagggtctgaggcgccggggcggggcagggaggccggactcaccctagaactggtagcggccctcgcactggggggcagtcagagttggggaactttctaggggttgggcaaaaggggcagcggtgttaaccgcgcacagtctcacagccacagacttctcatatctccccgattatttcgcggcgtattagtcccaaccttggctaggcctgaaactttttggaggttgttccatgtctagggtactccgactttggagttttggagagccacgtaacgagggtgcggctaagatgaggaaaaggcacttccgggattagatttcgttcttgcccagacatcgtctttacggacccgctcctggtggttgatttggtttgttatgagagaaattgttctttagaaaattggagcgtaagtctagaggttatgtgacagctcctaaacgattgtctgcccaagataggctcggtaatgctccctaaatttagactgccagttaaacggagctttcgctaagtcatctgaggttaggaactatttctaagagcatttcttaagggtggtcttctgtgtttttaagagaaacttggtgatgtttgtgtatctcgatctaaatcgctgtttacagatacctagcacaatgccttgcagttgtaggtgcccgctaaaggtttgtatgaatgatgttgctagaatgaaagcgaggagctttcagcgcctagaacactgcctgacgtttaataagccctctgtattgctgaatgaaagaatggatgg

SEQ ID NO: 1830 - DNA, 6000 bp, Homo sapiens
ggagagggcatcccagagtcctgcctactggagggctggagggagcagagtggagagggtgggttggagggtggtagaagggccagggggccagcggggccagcgtgggtgactcagcagaccctgtctcaacccgtaggtctggagtgggactgactggctccagacagaccatgttctacacagaggtgacagatgcccagcgtagcggtccaggtgggggcctggtggaggagggtgagctcattgaggtggtgcacctgcccctggaaggcgcccaggcctttgcagacgacccggacatccccaagaccctcggcgtcatctttggtgtctcatggttcctcagccaggtggcccccaacctggatctccagtgagactccagggttctagacagaggccagtcttggccactcaccccacaccccgcggaccccaataaaggcttgcatagctccagcttctgcctgctggttctgagctctgtgaccagggccttggagaggactggggaaggggcgggaagcagtgaccctgacctgagatggccctcgggacacggcgagctctcctgtaggaggagtagctggtggcaggccatgcaggtggttgctgtggggctgaggacaggcctggggatgccatgggcagggccaggctgtgcctcctcttggagctgggaggggtggggtccgggactcatggagggtggcatggcaggcctgggggtgggcctgctggtcacggggctgcagcatgagctgtgctcacgagagtggtggctgagccagtcctcaggagttaggatggggtgggcagcactgcaggctgcacgctgcagggaaagtatgttccctgctcctggggcaagtgaggggtccccaccctgactggggctgggctagagccactccacaggagcccggagccaaagctgccctgtgtcgggggccccagtagctgatccgtgcacccccagccttggaagttttccaagggaccttcctcggcctgtggggtatgcagaaatgtctgcaggcttgctccaagaggagcaggtggcggcacagggtggggacacaaggccagtggtcttgacatgggccaggttcctggtgccagcccggtcctggtcccggggcacggcctcagcctgggccgcccagcaccaggctctactggcccctgagcatctctggcctgtatgccctggccttgccttctgacctgtcctgagggtggggctgtgggagatgcgtgcagctcagagctgctccccaggtgcccagaatgcttgtgaggcaggaggggacccagctcgcctggtctgcttcctgggccacaggtgcacagtaagggttctgcaggtgaatgggtgtgttggcactggttgtgggcattcgagggcactgctgggccatcagtctgcggcaggatcgatccgctcctggacatcattaggtccaggctgtggctcccaggaggaaagtagagaaggggacagtgaagtgaagggagcctcagtaccctgcagggtggaaccctgggcagggaggtggagactgaccccctgttgtcatccagcacagtgctggacagcctggcattggaggctgtcctgaggaggctgtgcctcaggggcccacaaaagcagtgccacctgtatgcaaatgctggctgtggcccaggtggggccctgtgggcatcagcaaggccagcgacagggctgccggggaggggctgtcaggtatggggtgtgtgccagggaggggctgccaggtatggggtgtgcgggtcttggccagcctcagcttcactctacccagatgaggccccagcaggacattcacaggacaggagctctgcctgacccacagcagccttgctgtgctgcccttaccagcagcctgcctggtgacaccacgagagtgcgatgggccctccgggttgaccagcagaggcctcccactacctcagagggacctctcgcaggcaccaggtgggtctggcccctgaagcactgaggggacaggtgacagggcacccggacctgggtgtagtccagcccctcactttgctccgcagcccgatggggtgggtcagcaggcagtgctgccgggcctaatggagctggcattgatttcccggcactggagggggggttgtaaccggaaactcccctccccgtctgctatatttagcactgcaggacccagcggaagcacagcttactctggagcctcgccggctctgtccaaacccctggcagcccgtcctcagcctggtccccaggactgccctatgggcccagagcccctggccaggctgagcagctgcacccttgccctctgcatacaagctgggcaccgcccagcgctcagagtgggagccctccaggctgggggacgggtggctctgggaggctggagggtgctgtggtccagtgggccccagaacaatgacgaggtcccttactagaagagaccaggtagcctggtctggtgagggttggggctggagccctggccgccactgatctcagcccctcaccccagcaaggtgcagcagggggcaaatgtgttttgtgaaatatgtatgaggggcgagggttcccactgctgccttctggaaactcaaaccagggtccagctgcctggcatttctggctcaagggctgctgaaattcctgcagggaagggaccccctctccgatgcctcctatgtccccctccttcctaagggcaggtgcggccaccttcctgacctgggtgctctcatggacatcgtgaggtctggctgacccatgcccgtccacgctctggcggccccctatgccagcttctgtatgacttgtctaagtcctctgtccacccccgggctgggggctcctgagggtgtgcaggggcggagtctcccttgttcaccacttggccaagtgcccagcagaggcacccagcaccccctcccccaccatagtggggcagtgggcgcaggtggggatggagccctgggcctctggagccgggcagggggcttctctgtcctggggcttccctctctcgagtacccgagtacctgcccccaggccaaagcacaggagaggtggcatctccacagggagcccctccccccgtaggcggtaatcaccgcccacacaccggaaggcggcaactggaaggctctgaacacagcttggattctcttgtttggtgggggtctctgtgcgggcctcatcctggcttgtgtcttaatccccacgaagcctacccaccaccaagtttggggtgggcactctgagcagagccagctgaggtgggcatggggggctcccacccacccctttagggaccttcagctgagcctgcggcctggatcctggaggagctgctaaacagggatggagcaggcagaccctgcgcatggggtgttcacaggccctgtgcctccaaagctctcttccttcagccctcagccccagcagcatggtggcagtgacttgctccaggctggggggctgcacagccacccagctccgggcacagggcaaatttgcgagaggagctagggggagagaagacagctcagttatcatggggatgggttgaggacccctctggaccatatggggatctttaaccaccaaggtgacccctagctctggaaaggaccgtgctcactggaggagaggaaggtgccattggttttgaccctgtggaggagctgcgaggtcacccagggagagggcaaggaggtgaccgcagaggatggggtgtggaagcctggtgaccagggcagcagtgggaggcctctctcggggtagccttcagggacaggcactgccgacttttgttccccatttcccgcctctcgccccccaagcccagacctgagtttggggggcgagaggcgggaaacggggaatgtggcctgagcatttcctgagggcatggcctggctacctcgacgccagcgccgagctgagcagtctgcaccctggagcatttgttgactggctgcttgaccagcgcgcctcgcagaggggaaggcaggggcgtcggaggggcgcagcgccccctgcagccggcgtggaggcggtaggagcggcgcggagaaggggagattctcggaggaggtggggggcgcgcagtaggggctgggcccggctctggccccagggccgcgccaccccgcgtgggggccgagccctgatcagagtaggaggcggcatctcctctgggactgcgaggagcgcggcggtggcgcactgatgggaggggaccacacggcaacctcggggcgccccacccccggtttctgacacccggcaggagcccaggcggaggaggggaggcagctttgcggcgccggcgcacgcctcgccgactcacgcggaggtgtgagcggggcccccgcggcccgcgctgaccccgaggccccgtgcccccgccgcccgggcgccctggggggcgcgcgccgggccggggcgctggcaggcgacgccctccaccgcctttaaagcctggggcgcccccggacccccccccggccccaccccgcggcgcggccccgccccctcatgcatatgcaggtgcgcgggtgacgaatgggcgagcgagctgtcagtctcgttccgaacttgttggctgcggtgccgggagcgcgggcgcgcagagccgaggccgggacccgctgccttcaccgccgccgccgtcgccgccgggtgggagccgggccgggcagccggagcgcggccgccagcgagccggagctgccgccgcccctgcacgcccgccgcccaggcccgcgcgccgcggcgctgcgctcgaccccgcccgcgccgccgccgccgccgcctctgccgctgccgctgcctctgcgggcgctcggagggcgggcgggcgctgggaggccggcgcggcggctgggagccgggcgcgggcggcggcggcggggccgggcgggcgggtcgcgggggcaatgcgggcgcagggccgggggcgccttccccggcggctgctgctgctgctggcgctctgggtgcaggtgagcggggcggcgggggcggcgggggtcgcggacggggcacaccgggccgcccctaggggccgggcgggcactgcctggggccgccgtggttcggaagccctcgaggctgcgcgcggcggctggggctccgggcgggcgcggctgggtgggggcggggcggcggggcctgttcccccacccctggcgcccggcccgccgaccccggcccgcgcctccctccgctctcccgctgccttatttttaggcggcgcggcccatgggctatttcgagctgcagctgagcgcgctgcggaacgtgaacggggagctgctgagcggcgcctgctgtgacggcgacggccggacaacgcgcgcggggggctgcggccacgacgagtgcgacacgtacgtgcgcgtgtgccttaaggagtaccaggccaaggtgacgcccacggggccctgcagctacggccacggcgccacgcccgtgctgggcggcaactccttctacctgccgccggcgggcgctgcgggggaccgagcgcgggcgcgggcccgggccggcggcgaccaggacccgggcctcgtcgtcatccccttccagttcgcctggccggtacgtgcgctccatccctcgtgctccagcccttccctctctctccgcgccccggccccgcgcgcttcgcgacccccaacacctgcggccgggtctgcgtgcgagccgcgcgcgcccaggcggggcggggccggcagggggcgcgtgctctggggacttggtccgcgcctggccacgtgggcgcgccggggccccggggccaccgggagcggggtcgcggcgggggcggggcggcggcgtcccgcgtgcgcggcggtgtgcggcgtgtgcctgcgtcgccctgcgcgtgtctgtctgggtggggaggcgaggcgaggcgccccggtcccgggcaggccgcggtggcatgtgcgcag

SEQ ID NO: 1831 - DNA, 6000 bp, Homo sapiens
tccaccaccagcagcagctcaggccgaagcctggctccacaagcaccccttcactggcctagcttgctcccctcataaagacaccatggagcagcccaggagggcccctgagagcagcagtcccctcccacccaggcctgccgcctgctccccaacccgcccctccacctcccagccttcctatcgtgctgcggctttgacccttcagcccaccctcagggaccagcgacaaacccccagcccactctccaatcctccctggccaagggcagtcctccctggctccaatggtccccgtgttgcctgggcactgaatgccccaccctgcccccataccaaagctttgaaccagacccccaatgtacaaggcggacatgccctgagttctccccagggctctgggccccagggccatggcaggaggaacagaccgatgcccacccaacacaggaacccagatgcccacattccataccagaccagccagctctcctggtccctactgggaaggtgtgggaaggaggggggtggtccccagtgtgcagacaggatcccctgaaggtagggtggggaggccagggccctgtcatccccagcccaagctcagaaaaaacaggaagcagagtggtgctgaacctcacacctgccacgagcagcttaggtagctccaggcacagacctcagcctggcccaccttgagccctagggcggctggatgcagggggtgggctctgtaaaaaccttcctccctagggggcaaaggagagggtagggaaggctgggaaggggaggaactggacaggtctgggagccgggctgggggcacaagcagagcccgagctgggagtccagcagccccatctgacttcgtgagacctgcaatgaaaaagcggcagtgtgcccctttcacaggtgagaaaagctcagcccttctgatggcccaggacctcaggcctcctgagctgatagacgcagggtcagccccaggcccacctcctgtatctacagggccttcacccatcccgttctcctcataagcccagatctgtcacggggaccatgctccagccacaccaccccgcacagctgccctggagcccagcacacacatgccaagacagaacaagaaagaccctcgctggcaggcaggctcctgggctcctggctccagagatgggccagccaggcaggcacgacttccagctgcacctctgagggtggggccctggctgcccaggtcacggccaactgccaccaccctgctcctccctcagccagcaggtgtcccctgggcctgccacctaccaggccccagagcaaagctccctgctgcccccagcatgacactactcctccccaaacctccatcaccacctgccatgcctacagagcacccggggtgcgtgcacacacgcagctgggagaatgtggcctcaccctgccagctacaagccaggcaccagaaccaacccaggctgacaccggcctcctggggacgtctgggggtggagccaggagaggaggggcagccaggcagcctgctggcatgtggtccaccacctctccacattcaagaccctgggcccacccactgagggaagctgagcccgagaccagcacagatccatgactaatagcacacagaccccggccacaagaagccaggccagggggcagagggccacccagccaggcctgggtcaacagcagagaccacaaggtgggagagtcactcagggggcagggggtggagggagcgaatgcagagcccagactcccccactcctcttccacaaggccctctcattccctttactccaaggagcccaaaagccccacgggcctgggcaggatgccaccctagcctccaggctgaaacccctcctcaggtcccagggagcctgaactcggtccttgccttcccatcacagccaagtacacctcagctcaccgcacagagctggacctcagcaagccagggcagcatggccagggactgccgccgcccgagtgcaaataccagggtgctggcatcacggcacagctcccgcccggcagccaggccacatggcaggagaccagggctgcccccaaacacgcagctatgactctgccctggcccccaacccagagacaggccgcctgccccctcctggggcattcgaggaaccggctggaagcaagaggcagggaggtgagctggccccgaaacccagtgcccggactccaaggaaggcaagggcctacccggtcccatcccacacctgaccggctggcccgcggggcgaagagccagggcggacacgcgatagcccgccacattcctccaagacctccctgcccccacacccactgctgccaactcgagcagaaaacacatcctcaggtagcgatgtggggccacgctggctcaggcccaggtgcagatgacaggctgcgggccctgctcagacctgcctgctgcaccgccgtgggggcgaggggctgggcttctcacaactgcctgggccctcccatgcccgcccctgccttttccatctgggggacactttcccctctctggggcccccctggtcaagggatactcggcggggtgctcacgggttgaggacatggccagaggagactgtggccagcttccacgggtgggagctcaggaagcggtgaggatgggggcagcaggcaaggctgccagccagggctgcaaaggtacagcacaggactgggagccacacacggcaggcccaactggcgtgagctcggcagggattgccctcaactcacaatcacttcagggcccaggataccaggtgggcacactccggtgcctcctgctgactggagccacttcctggctcccagatccatctactccctgatcacaggtctgcatggtgctctcattcccgcactcacccagttccaggcccccagcacaatgaccaagcagggaaggacctctgggcaccagggcaaggccgtgctccaggcaatgaggtaaggcgcccgaggcctgggcctgcccacctaccactacccacctgccagcccactgggatgagtacctgtttcccagtgacactggacccctaccacccctcctcccagcacgcccaggccagggctcctgcctgactggccacctgccaggggagaccagacagccccgactcagcttctgcccctccagaataacaaaaccaaaaaaacccacaaacagggcagtgccacagaaggtcactgcaccaggatccactatctctgtctctgaacgatcttgggtcaccatcgggggcttctgccgacataagcgttaggcgttaggctctcccgggcctaggtcccacggcgcccgcccgtgccccccaggcatccaggaaactgcagggcaggcgcaggctggccacgggcccggggcggctcagtcagggcctgccctagaccagccccagcacgcgctgcgcacatgccaccgcggcctgcccgggaccggggcgcctcgcctcgcctccccacccagacagacacgcgcagggcgacgcaggcacacgccgcacaccgccgcgcacgcgggacgccgccgccccgcccccgccgcgaccccgctcccggtggccccggggccccggcgcgcccacgtggccaggcgcggaccaagtccccagagcacgcgccccctgccggccccgccccgcctgggcgcgcgcggctcgcacgcagacccggccgcaggtgttgggggtcgcgaagcgcgcggggccggggcgcggagagagagggaagggctggagcacgagggatggagcgcacgtaccggccaggcgaactggaaggggatgacgacgaggcccgggtcctggtcgccgccggcccgggcccgcgcccgcgctcggtcccccgcagcgcccgccggcggcaggtagaaggagttgccgcccagcacgggcgtggcgccgtggccgtagctgcagggccccgtgggcgtcaccttggcctggtactccttaaggcacacgcgcacgtacgtgtcgcactcgtcgtggccgcagccccccgcgcgcgttgtccggccgtcgccgtcacagcaggcgccgctcagcagctccccgttcacgttccgcagcgcgctcagctgcagctcgaaatagcccatgggccgcgccgcctaaaaataaggcagcgggagagcggagggaggcgcgggccggggtcggcgggccgggcgccaggggtgggggaacaggccccgccgccccgcccccacccagccgcgcccgcccggagccccagccgccgcgcgcagcctcgagggcttccgaaccacggcggccccaggcagtgcccgcccggcccctaggggcggcccggtgtgccccgtccgcgacccccgccgcccccgccgccccgctcacctgcacccagagcgccagcagcagcagcagccgccggggaaggcgcccccggccctgcgcccgcattgcccccgcgacccgcccgcccggccccgccgccgccgcccgcgcccggctcccagccgccgcgccggcctcccagcgcccgcccgccctccgagcgcccgcagaggcagcggcagcggcagaggcggcggcggcggcggcgcgggcggggtcgagcgcagcgccgcggcgcgcgggcctgggcggcgggcgtgcaggggcggcggcagctccggctcgctggcggccgcgctccggctgcccggcccggctcccacccggcggcgacggcggcggcggtgaaggcagcgggtcccggcctcggctctgcgcgcccgcgctcccggcaccgcagccaacaagttcggaacgagactgacagctcgctcgcccattcgtcacccgcgcacctgcatatgcatgagggggcggggccgcgccgcggggtggggccgggggggggtccgggggcgccccaggctttaaaggcggtggagggcgtcgcctgccagcgccccggcccggcgcgcgccccccagggcgcccgggcggcgggggcacggggcctcggggtcagcgcgggccgcgggggccccgctcacacctccgcgtgagtcggcgaggcgtgcgccggcgccgcaaagctgcctcccctcctccgcctgggctcctgccgggtgtcagaaaccgggggtggggcgccccgaggttgccgtgtggtcccctcccatcagtgcgccaccgccgcgctcctcgcagtcccagaggagatgccgcctcctactctgatcagggctcggcccccacgcggggtggcgcggccctggggccagagccgggcccagcccctactgcgcgccccccacctcctccgagaatctccccttctccgcgccgctcctaccgcctccacgccggctgcagggggcgctgcgcccctccgacgcccctgccttcccctctgcgaggcgcgctggtcaagcagccagtcaacaaatgctccagggtgcagactgctcagctcggcgctggcgtcgaggtagccaggccatgccctcaggaaatgctcaggccacattccccgtttcccgcctctcgccccccaaactcaggtctgggcttggggggcgagaggcgggaaatggggaacaaaagtcggcagtgcctgtccctgaaggctaccccgagagaggcctcccactgctgccctggtcaccaggcttccacaccccatcctctgcggtcacctccttgccctctccctgggtgacctcgcagctcctccacagggtcaaaaccaatggcaccttcctctcctccagtgagcacggtcctttccagagctaggggtcaccttggtggttaaagatccccatatggtccagaggggtcctcaacccatccccatgataactgagctgtcttctctccccctagctcctctcgcaaatttgccctgtgcccggagctgggtggctgtgcagccccccagcctggagcaagtcactgccaccatgctgctggggctgagggctgaaggaag

SEQ ID NO: 1832 - DNA, 6000 bp, Homo sapiens
gaaggagggaccagtagttttatgaggttataatgtcaaaaccagatacagacattacagaaagtgaaaactatagaccaatatcactgttgagcatataaataaaaactctcagctaaatattaccaaattaaattcggtgacatgtaaaaggaataatacaggacaaactggaacccaacatcttcttgaatagagtttatcttagagaagagtgtttaagatgaggcaagctattttaatatgtcccagaaatagctccaattggatggtcataggatagtctgcaaagaggcttaaatcacctgggcctattgctatgcctgtctctcctcactcctctctgcttgttattttctgtggttctcagttggggaccgcgctgcccataaaagggcttttggtggtgtgtgggcatggttccttttctcttttctccactttcctgttagttttcccatgtctggagggcatttatgtgtgcatgtgaagggagacagcctctgtggcatgtgctatgttctcacacaatgaaacattacgccattctcagatcattaaagagccctgctccagacactctcagggtgatgtgatttatcttctttaccttccaaacttaactttccagcgcaggcgtttttgctgagttgtgtcaatccagatatccgctgggtaagaccgttcggtcttcccacaatcttctggtccttctctctgcatggtttcaggaaatggcacctgcatctcatagctgcactgtcctgctcaattggctgcctgagacagaatcctggatgtgcctgttattcacagtctcccctccccttccattgctgtttatatcttttgaacctggcatttctattgaacctcggctccctctgtcccactcttggtgataatattgcttcacaatatgcatcataacatatgatttgatcaggcatttgttttctcttttaacgctctttttctccaccactttccctcagtacagattacagagaccatgtcacttctcattgtatccccaggcacaaggcctgaaatgtaatgttagtaaacagttggcgaatgaagatgaaatgcaagccatcacccattttcacatggagtcctgggaagggacccctaatgagactccctgcctctgcttgtccacctgccccaaactctaatcttactctgtatgcaggtgacttttcagaagacaccctagactccttaactatctgagagagctgctccttggggctgtgcagaacagaaaattctcccatttcagtgcatgcgatggaccttgaatggatgagcatgagcagtggccccctagggaggctggggatgaggggccagggtccagtccctccctacaccctcccaactttggaaagcagcactgcctgtcctaacttcttaatgttttctaacaaaaaaaggggcccagctgccatgggtttttccctcagactgagacttttctgaaatgcaaatatttcaggcacatgacggatattgctcaatatttgctgaacacattaaagtgaattccgtttaagatccttggcctgaaaggcatttggggcccatttaggggctccaaggtggaggttgctgcctatgtggacagggaagagccagaggattcacatttcatccagggcctctgggcccctgcactgcgagcatgcgcacttcccactagaggctctggggtgaccccccttcctccgttcactatggaaaccaaggctgggactggcctctcctcctgttcctgggtctgccaagaacagcctattccacagctgtgtaatctgttccgtattacagagttcgaagtaacccaccagcaaaactgtctgctccagaatattttaagttacagcttctccgtatattttctgtgtctattcacagaacttctatttacagaattttgatttaatgagtagttgagatatatttttgtagtcttcacacttttctactaagctgctggccctgagaggacttattgcccaactcaaataggggcccccctggagacacccagcaagatttattatccccatgactctcaggacagcattagagctccatcccagatcttgagccttgggtcaaggtagttgtggatgccttccaagtactagcttcgtctcatttctcacagtgtctttggtcctttttgttattactctgaaggtcggaatctctggttcgtgggcacacaccttattaggcagccatcaagctactgacccgtctatcccattgcacctgcgcatgtgtgctttccccactaacaggctatcccaggctttattttgtcccactaccccacctacccaaacttctactcccagtaatttgattttgggggggaattgaacctcttcattcttcaggaagaagatgatatcattttagcaggtgtacagttgggctccaggtctagcctgtgcttcatttcagacttgtgcatcagacctaaggctttaagccttccaagtgtaatctctcagggtggtcttaatcgacaggccctggtacagcattggacaacccttctgtcagaagtgtagtgtgttgtgtgctgcaggagaggccttctgcacagtctgcttgatgctggcaacttcactagaatgaagtccaggtagaagttatccagtcctgcccaggcagcaactgaagtccaagcagctctctggccagagcgctgatactcacttcagcagagccaccttttattgttgtcatgccccaagcctgcactttaatttcaagaatccattacatctcggagggtgacatgtgagaatgcagttttaatgagatcacaatgttaaaaaccatagcctatggccaaagccaagttgagatttaaatagtaggttcaaacacttttcttattaaaaaatatatcaaatgaactaaatattttatttctttatttatttaatgtttgagacagtctcgctctgttgcccaggctggagtgcagtggcatgctctcagctgactgcaaactccacctcccaggttcaagcgagtctcctgcctcagcctgccaagcagttgggattaagggtgcccaccaccacacccggctaatttttgtatttttagtagagacggggttttgccacgttggccaggctggtctcgacctcctgacctcaggtgatctgcccgcctcaccttcccaaagtgctgggattacaggcgtgagccaccgcacctggcctaaatattttatttaaatagttagaaaataatacatacccaaacaaaataaagaataatattgatggagatttaaatgcaataaatgaggattatatttatgaagcatgggggtaataagtctgttcaagagacattcttaaaaacaatgaatataattagcatatttctgtaagatgttcccaagaaaatggtagatatctataaatagaagaaggagaaaaaggagaagtagatggagaggagaaggaggaggtggaggagggtgaggaggaggagaaaagtgttgaaataattccaactaagactgatatctaggaattaccctggtgaagtgggaagcttaagagtcctgttggagggactggtgtggtaatggctctgccaaaagtgttatgtgcgtgcaaacccaaagagagaaagcacagaaaacctttcaacatcaacctgcttgaggaaaaataaagtgggaaaagatacatactcacagtgaggactctagacatgtcaagacaatttttaaatatgcttttggcttcgagtggcaataactagattcaagacagcatatttaagaagctgctgatgagaagaaacccgggaagagctgaaggaccacatcagcccagaccaaggatgctgaagcagcattaaggtccctggtttcagatgctcaggcaatgaccctttttttcatggagagcctgtaggagtgacagttttgtctttgcccactgggaatctgttttccatacctggaaaacagggttacctatgtttcccctgctaccctttggtcatctcagagacactaccagatattacccatgggacctattttttttttaaatctcaggaaagacttgggtgtggcttccaacgtggaggactcagtagcttcagagagggtcctgagagaaggtgaattgaagaatgagggtgctgggcagagggaaaagacattatcatacaagtttgtgctaaaagatatagcaatccttctgctatggactaagtatggaaaaaaataaaatggaatcaaagttacccaaaggaagtgtaaaacccaaatttatgcccgttaaagcattaatgatgctctaagtccactgcctacttaaaaagttcatagttcacatgggttgataggaaattacgttaacgacacactgcatttccccttttcttatagcctatctgatttggtagggagtcgatcattttttattggaatttctcaggattccaacctcagacatccactttacagtttacacattttcttggacaagcccgactgttcctctcactggttcgcataaagctcatgtttacaaagccgcccagacctttctctgggactctcatatttaacttaattctggatatacccaggtaagcgtttcccaagaaacttgaccccaacatcccaaaaacttaaggtatctttcccttaaactggccccttctccagtacgcatccatctcacttctctcctgccctagatcttctcagcccaaacaggaaaccccgggatcgctctcccagcaggtgaagcctcgccatggaccctccccgtcggggccccgcgctgccccgcccgcccccagccgctggccaaggccgcggtcgcgcaggcgcagtgccgcgtcccgccgccgccccgccctgcccgtcgctgcggaaggcgccgcgcgcagcaacgcgcacttcctctccaggaatccgcggagggagcgcaggctcgaagagctcctggacgcagaggccctgcccttgccagacggcgcagacatgtcagaacaaagtaaggatctgagcgaccctaactttgcagccgaggcccccaactccgaggtgcacagcagccctggggtttcggagggggttcctccgtccgcgaccctggcagagccgcagagccctcctctaggcccgacggccgctccgcaggccgcgccgcctccccaggccccgaacgacgagggcgacccgaaggccctgcagcaggctgcggaggagggccgcgcccaccaggccccgagcgcggcccagccgggcccggcaccgccagccccggcgcagctggtgcagaaggcgcacgagctcatgtggtacgtgctggtcaaggaccagaagaagatgatcatctggtttccagacatggtgaaagatgtcatcggcagctacaagaagtggtgcaggagcatcctccggcgcaccagcctcatcctcgcccgggtgttcgggctgcacctgaggctaaccagcctgcacaccatggagtttgcgctggtcaaagcgctggagcccgaggagctggacagggtggcgctgagcaaccgcatgcccatgacaggcctcctgctcatgatcctgagcctcatctacgtgaagggccgcggcgccagagagagcgccgtctggaacgtgctgcgcatcctggggctgcggccctggaagaagcactccaccttcggggacgtgcggaagctcatcactgaggagttcgtccaaatgaattacctgaagtaccagcgcgtcccatacgtggagccgcccgaatacgagttcttttggggctcccgggccagccgcgaaatcaccaagatgcaaatcatggagttcctggccagggtctttaagaaagacccccaggcctggccctcccgatacagagaagctctggaggaggccagagctctgcgggaggctaatcccactgcccactaccctcgcagcag

SEQ ID NO: 1833 - DNA, 6000 bp, Homo sapiens
tgaaaagatgctcaacatcattagttattaaagaaatacacatcaaaaccaaaatgaggtacagttttttcacactcactgggatggctataaacaaaaagacagatatcaagtgttggaaaggatgtgaagtattgaaactctcatctgctactagtgacaatgtaaaatagtacaactactttggaaaacaatttgacagtttcttaaaaagttaaacatagaattaccatatgtcccagtaattaagtgtatttccacacaaaaacttgtacaggaatgtttatagcagcattataaataatagctaataaagaagtaacagcccaaatgtcctccagctgacaaatgaatagataaaatgtgatatagccatataatggaatattatttggcaataaaaacaaagtactgattcctgctataacatgtgtgaagcttgaaaatgcaagttaaggaatctagttgcaaaaaaccccaaacacatactgtatgattccattcgtaggaaatgtccagaataggtaaatttatagaggcagaagttagattaatggtcgtttagtctggatagggttggggagagtgagatggggattagcctgctgatgggtagagggtttcttttagtggggagacaaaaatgtaaaattagattgtggtgacagctacacaacagtgtgactatattaagaaacactgaacactttgagtgaattatatggtgttgtcttagtatgtttcatgctgctataacaataccacagactgggtaatttataatgaattgaaatttattgactcgtggttctggaggctggaaagtccaagaccaaggtgccagcatctgctgagggccttcttgctgcatcttcccatggcagagggcagagagggtaagagggagtgagagagaaggggaccaaactccctattttgttacaaactctcttgataatgacattaatccattgttgagggtggcttaattacctaatggcctaattacctctaattagtcccccacctcccagtgatgttgcattggggattaagtttccaacagatgcttttgggaggatatattcaaaccatggcaggtctgtagtttatgtttcaaaatgtattttttttaaagaggaactagtgttgataatacacagcagcttgcatgaatctgcaaggcattaggctcaatgaaaaaaaggcagtctcaaaagtttatatatgattccatttatattttctaaattattgaagatcatgacacatttactattcaaagtatacacactaaaaacaatgtttttaaaaaattccagaatacagtatatataataatagtttctagtttaatgtctgggtttaaaactttaggaaatgttatgttcagcctacattaagcagttaacctttgactgtaacatgaaatcaatataggctcttaaaatattggaaatgttcacagtagtctcttagtccccctaattccccttttaactccttagttcctaatttgttgtttaggccaattttctccccttcttgttaagaagatagtctcttatggtcatgtttatttttccaaaaccatctttaaaatgaaaatgtgaaatatgtttccacagtgcatgaaaaataatttggatcatccacaagaccaaagaatgacataatctttttttttttttttttttttttgagacagggtctcccttctcccgtctgtcacccaggctgaagtgcagtgtcatgattatggctcattgcagcctcagcctcctgggctcaagcaatcctctcacctcagcctcccaagtagctgggactatagacatccactactacgccaggctaatttttaatttttttgtagagacaaatctccctgtgttgcccaggctggtcttgaactcctaggcccaagcaatcatcccacctccacctccggaagtgccaagattataggcatgagccactgtgtcacccaggctggagtgcagtggcacaatctcagcttactgcaacctccgcctcctgggttcaagcaattcttttacctcagcctcccgagtagctgggattacaggctcccgccaccacacctggctaatttttgtatttttgtagaaatggggtttcaccatgttggacaggctggtctcaaactcctgacctcaagtgatccacccgcctcggcctcccaaagtgtcaggattgcaggcatgagccaccacacctggctagcccataatcttctttatacataattttcttcagtaatatttgcaacagcctcaagatccatcctcctttgttatttcttagtaagttttttttcttcttttttaactgtgtaggtacagtcctcttgtatcatttatacttttcttgactgaccagtttgtggatttggcccaataaactctctttatattatactttggcctttattaaatctactgtctggtattactctcaccatcttctcagtgttataggctgagaagaaaattacaaccataggttgtataagttataggctgtgaattagaagtataactatcttcatcactgctgagttcttcaacttctagtggatttatctccacatatttggaagaatttcaacacaacttaatctaatgtattcagaacacagtttacctcatttgcattttctttatacaaatctgagctcaaacaaaaagtggtcttaacatttctcttgcttgggacactccactaaatagcactggtttgcttaagagcctctgttaatctaatacttattcttagcatatgtactggattttgaaggacattgttgatgagtacccagtattagtggcagatctgcaggctggtctcgaactcctgacctcaggtgatccgcccaccttggcctcccaaagcactgggattacaggcgtgagccaccacgcccagccttgtctggctgtcttttctttaaaataagtcagatggatcaaagagacgattgctaagtaaattcacatacaatttcttcaggattcatgtgttgtgtgttctgctccataggcatgtttggccctacattttcactactttctaccttaattaccattttcttccttctagtatctagacttgttgggaaaaattggaatgacagcattacagtcatagtgtcaataatttttttccctctgtttccttctctagcattctgagcccttggtctcaggtgctttctctttccattggcttttaggaaagttcatccttctgtcttcagctcttatgttttgatgaggactttgtttctttgtttccatcatcagcctttattaaaactaatcctgaattttggtctcttggtatttgtctttgaaatcacttcaacatgagtcagttaacaaacatgttgaggccgggcctggtggctcacacctgtaatccctgacctcacctgaggtcaggagttcaagaccagcctgaccgacatggtgaaaccctgtctctactaaaaaagacaaaattagccaggtgtggtggtgcatgcctctaatcccagctattcaggaggctgagacaggagaatcgcttgaacctgggaggcggaggttgcagtgagccgagatcgcgccattgcactccagcctggacaacaagagtgaaactccttctcaaaaaaacaaaaatgttgaacattttataaatgttacatgaagctctgtctgtattacatgaagttgtaattgtcacagcaacgttaaaacaaaattcttgtctcaaaatgcttataatgggcagataggacccctgcccctcatgcccccaaacctgctcctctcattcttttttttttttttttttttttgagacggagtcactctgtctcccaggccagagtgcagtggtgcgtctcagctcactcactgcaatgtctgtctcccaggttcaggcagtcctcgtgcctcagcctcccaagtagctgggactacaggcacacaccaccatgactggctaattaaaaacttttgggtgtgtgtggagacagagtcttctatgttttccagcctggtctgggctcaagtgatcctcttgcctcagcctcccaaagtgctgggattacagacatgagccactgtgcctagccacctcctttcattcttaatcctggcagctgtgttatggctaggggtaggggagtaggggaatctcacagccatgaaaactgataccaccataaattcatcatttccaacaatgttgtactgtcgacactatttagacattctgtgtgattctagttagcttcccttctcaatccttacagagttaaaatgcttaagacctcaatcctccattctcatatagctaaaccttctacttcacagagtaaactgtatttctttatttctaatattcttcttcataagttcttaccagcatctgtgttgacacctatcctttaccaccttccttgttgtcgttcaatattgatccatacacctgtgctctagaacctttcttgcttcctaactcttgtgatttctaatttttttattgactccttcccccttgatatattacaatattcaatctctctgtcactctttccttttctttctcgccgatttttgctcatttagtcttccaaataattctcaaatttgtcccgttctctccatcttcactgctactatcctagtccattgttattttttgtctaacctcctaaagccatccattacagtaattaccagaggaatttttctcatatgtaaatctcatcctattactccctcatttaaaaccccctaatgtctccccatgctgacaaagtctgtactgcttagcaggtacatgtacctacacgatctagaacatcccagcttaatagcttccttgtttattactcttttgtacatactgcacaccagatataatgaatgttcttgaatgtctctgttgctttaacacatttattccatcctcttggagtgttcttcagttacctagcaaacaatcttcatgttaagactgagctcaaataccacttcttccttaatggtccctgtgatcactccaggaaatgtaatgtaatgtacacgctaccatactctatgtctacacctccaatatagtactttagtcacccactgcaatcacttgtcttacccgtatgtgctgtaagccccttaggggtagctgctgtgctctattcatctttatgcatctccagtgcctagcacataatctgacatttatagatgcttagtaaatatttgttgaattaatatgttgattaattaaaagataatacaaggcagcttatacccaacagttgagaaaaggttaaactaaaatataaaggggcttaaatgccaagctgaagtttttcgagttcaccctataagccaatgggtccaaataagtaaaccacaatctatttataaatgtctacaccagtagcctccgctaccaccatcatccccaccatcatcccccagcctgagatttcaaagtaggaacaaaggtagagcttacaaaggcagcccttcccctttgctttgagggactcagattagtaccccacacatgatgtagattacaaataaacaagtgaaaatgatcttcacaaaatgtttggggtctcctggcagtgtcacttggaaagctttcaaagtatttattttgttgtttaagcaatgatgcaaactgataaaggcagaattttaggattattagtatggaggaaaatgtaggattgtttgaagatgggagaattggtggcaattggtctaagctgaaaaggatgagaatctaaatgatggcagtgcaatggaatagattggtgtggaagcatactgaagccacatttaactggatttgatgactaaatattgagactgagggaggaagggggaagaatcaggttggaagtacatgtgctcactgcttctgtgtacccactttctctgtgaatgacaggattcttttcttcttttt

SEQ ID NO: 1834 - DNA, 6000 bp, Homo sapiens
gtccttccactttggcccccaaaagtgctgggattacaggcctgagccaccatgcctggatgccaacagtcttttaaatcagcagtccccaacctttttggcaccagaggctggtttcatggaagacagtttttccacagactaaggtcggggacaggcatggttttggcatgaaactgttccacctcagatcatcaggcattagattctcataaggagcacataatttagatccctcggaattgctgttcacaatagggttggcgctcctatgagaatctaatgctgccgctgatccgacaggaggcggctctcaggcggtaatgcttgcctgcctctcacctcctgctgtgcgggccccgttcctaacaggccagggaccagtaccagtccatggcccaggggttggggaccattgttttaaattgtgattttaatttgcatttccctgatggccagggatgagcactgtttcagcggtttttagtggtttgcatatcttcctttgtcagttgtttaaatcttttgcccattttatttgtcttcatattattgaggcgtagggaatttttatgtcttctagatacagatctcctttgtcaagtatatgttttatgaatattttctcccagtctgtgacttgcctattcattttcataatggtgtccattgtattttttcaacattttattatgaaaattttcttttatttttttctttctttcctttttttttttttttttttttttttgagacagagtttcactctgtcgcccaggctggagtgcagtggtgcaatctcagctcactgcaacttccacctgcctgggttcaagcgattctcctgcctcagcctcccgagtagctggggttacaggcgctcaccatcacgactggctaatttttgtgtttttagtggagacggggtttcacaatgttggctgggctggtctcaaactcctgacctcaagtgatctgcccaccttggcctcccaaagtgctgggattacaggtgtaagccaccacgcccagcctattatgaaaattttcaagcatacaggagcttgaaaaactttcatcgtgaacacccatacacccaccacctagatactatcattaacattttattatacttgtctttttacatatgtgtccatctatcctattgtatgcattttaaggtaaattgcagaatcagttcacctcccacaaatacttcacaatgcattattatgaattataaattagaattcatataattatgaattagaattcagtaactgcagctttttttcttttgaggtaaacttttcgtacagtgaaggcacgagtttttgtttttgtttttttttcgagatagagtttcactcttgttgcccaggctggagtggaatgatcccggctcaccgcaacctctgcctcccgggttcaagtgattctcctgccttagcctccccagtggctggtattacaggcatgtgtcaccacgcccagctaatttatatttttagtagagacaatgtttctccctgttggtcaggctggtctcgaactgacctcgggtgatccgtccacctcagcttcccaaagtgctgggattataggtgtgagccaccacgcccggcaaaggcacgagttttaagtgaacattggcagagttttgataaatgcatgcacctgtggaatcctaaaccccatcaagatgtagaatattaccatcactctaggaagttctttcaggcccagtcccagttaatctgtatttccattcttccagatccagccattgtcctgctttttctgcatcataggttagttttgtctgttctaaaaccttataaaagtggattcacatattatgtactcttctgtttaaagcatctttcacctagccgtaatgtttttgagattcatgcatgttgttgaacatatctagtttattcctttttattgctgaatagtaatcctttgtatgactatatcacactttatccattctcttgtgaatgtatacctaagatgtttccagtttttggatattatgaataaactgttgtgaacatttttgtgcaagtccttttgtgggaatatattttcatttttaagggtaaatacctatgagtggaattgccagattataggggaaagtgtgagacccttttccatagtggttgtactaatttatacccccaacaacagtgtatgaaagttctttttgttccacagtcttgccaaatttggtgtttttggtcttaggaattttagccatcttggtgagtgtagtgataacctcattgtgatagtgtattgtactttaaatagctatttctcacatcccaccttctttaatcactctccatgcacatcacacacctcagctttactagttttctctcagctttttctgtactactttaactttgccttcaattttctatgcccctgcacttttatatatagttcaccgtaggagagaacctgtgcagccaaaccagtgctattaagaaccaatgaaataaaatttaggtgagtgtatatgagttttctttctttgaaacatactctatgttgcctacctcagggcattagaggttttaaagttgagtttcaccacttacaatggtgactttgggcaagtttcttagtctaatgtttctgttttcgtgttgattaaatgagatcgtgatgtaaagtttctagtgcaatgcagagtacaaactaggtctttattgctttccttctcttttagaagtggtatatatttgtagggttttcttttcctttattttattttattttattttattgtatttattttttttgagacgagtcttgctctgtcgcccaggctggagtacagtgacgtgatcttggctcactgcaagctccaccttccaggttcatgccattctcctgtctcagccttctggaactacaggcgcccgccaccacgcctggctaagatttttgtatttttagtagagacagggtttcactgtgttagccaggttggtcttgatctcctgacctcttgatccacccgcctcggcctcccaaagtgctgggattacaggcatgagccacctcacccagcctagctttttctttaaaaaaaaaaaaaaaaaattgtttattccaaaacaaggccagtattcttgctagcataaatcagttatcaacgtgattgtgcttttatatttaccttctttttttcctctttaatcctccttcccccctacccttcctagcctctggtaacaaccattctactttctatattcatgagatccacatttttagctcctacgtatgaatgaaaatgtgatatttgtctctctatgcttggcttatttcacttaacataatgacctccagttccatccgtgttgccgcaaatgacatgatttcatttttatggctgaatcgtattctgttgtatatatattccacattttcttcatatactcatgtgttaatgggcacttaagttgattccatattttggctgttgtgaatagtgctgcaagaagtggtatataactgaatgactaagaattcaaagcatcattgcttcagttaaatttagcacaaccttacttgtcagatggaaggcattcccaataacagaggccttatactacatcatcaatatggacattacacagggctcaatttactgaactcccctgctaagtacagaggtagaacctcatactctaaagtcgtcagctgagaacttgatacagttgtctgataaattatatcaagaattaagtatgttattttaagggtatgctaaaggaactgtacgccacttaaagggattttctgggacttttttttttttctttgaaacaaccactctgtacaatacaaaagttctgaactctttaaacatatatatttttttctttttctttctttttttttttagacagagtctcgctctgtcgctcaggctggagtgcagtggcgcaatctctgctcactgcaatctccgcctcctggattcaagggattctcctgtgtcagcttcctgagcagctgggactacaggcatgaaccaccacgcctggctaatttttgtatttttagtagagatagggtttccccatgttggccaggctggtcttgaactcctgacctcaggtgacccgcccaccttggcctcccaaagtgttaggattacaggtgtgagcaacggcgcacagccgtatctttcatattttaagttgatatagtgccagtcagtctttaaagaggacagtataaaaatgaaccattcccggctgggcacggtggctcacgcctgttaatcccagcactgtgggaggccgaggtgggcaaatcatctgaggtcaggagtttgagaccagcctgaccaacgtggtgagacccccgtctctactaaaaatacaaaaaaaaaattagctgggcatggtggcacatgtctgtagtcccagctactcgtgaggctgaggcaggagaatcgcttgaacctgggaggcggaggttgcagtgagctgagatcgcactactgcactccaggctggacaacagggcgagcgagaccctgtctcaaaaaaaaaaaaaaaaaaagttaactgttctctaatctttcttgtgtgaaatatgagggcagaggttgagatcatgacatgcagataagaatgacaacttcagtgaaggaaatagaggagcaagcggtagacagtagttcactgtgaattctgtccagtctccaggtttcagcagctttgggaagcaggctaaactgttcttggggttcttcaggttaataacaataagcaagggtggagtgcttaatccttttaagtgaatgataaacactgtggaaggcgtgtcttcaagcgccccactccctcagggctgtaggtcacgtgagcttaaagtacttcccgaatcccagccactgtctcttgtaggcagggatcacagtctgaaacgacagcaaggaagaggtaggcagggaaaactaactggaaggaagtttaaatacagaaagagcaaagtattatctaactataacaatgccacattttactgtgactaaggtagaggacccagaggagggggcagcggcttcgatctctcaagagcctagtttagcagacataaaagcccggattcaggattcagatgaaccaggtgagtacgcaacttgggagcttttggaacctataaaatgtttcatgaaagaagtaactaggatatcaaaattcaaaatgccttctttaggacagagaaaagtgttgtggttgaggtgtttttcagttacttatttcactcccctgtgtatctgatagcttctcttacttttctcacacactggattgtttttccccacaatgagttctgtgttcattaccaacaggtgaaactgaatcagtggcaatgtttgaagagttttcaagcaaaaagaaagacacagaagtcaatttatgtggaatttagaattcactttttcctcacagtttagattatatctggaaaagactttaaacccaccgagtggatgacatttaaacttagcagtttacataatattatataaagagggagcatggttcagtagttttgtaccgtggactttgactgtacttgtgatttctcaggttattcagtattttacctcagtttaccagcttaaactataattcaataatgaatggtctaagaattttttaatggcagaacaaaagtacaagagatggtcattgtggtgactagcatagcatcaggttaaaaaaagtatttgatgaatgtgattatccctattattttctttaaatggtaacagttcacacttgctagaggaattgtggttttgaatttttaaacaagcaattaaatctttgttaatattatagtattaaatatagttgtaatttgaagccccttatttttcaagtctgtaaatcgtgagcagcgtctttagttatatgaattaagaataagggaataagctctcaaaattac

SEQ ID NO: 1835 - DNA, 6000 bp, Homo sapiens
aactccgtttctactaaaatacaaaaaattagccgggcatggcggtgtgcgcctgttatcccagctactcgggaggctgagacaggagaatcgcttaaacccgggaggcagaggttgcagtgagccgggatagcgccattgcactcacttttcctttttttttttttttttttttttaaagacagggactcgctttgttgcctaggctgtagtgcggtggtgcggtctcggctcactgcaacctccgcctcctgggctcaaacaatccttctgcctcagcctcccgagtagttgggactacaggcgtgcgccaccatacccggctaatttttggttttggggttttttgtttggttggttggttttgtttgtttgtttgttgtagagacgaggtttcgccatattgcccaggctggtctcaaaccatcctcccgcctcgacctcccaaagtgccaggattacaggcgtgagccaccgcgctcggcctttttaaattttatatttctctatttatttgtacaactttttgagttgaccattgcatcttctattttcatgtttgccctttttcgcgctggccccaccccatttcatcactcctgtactgacatacattctgtgttcctggagcagaaatttgacccgatgggacaacagacctgctcagcccatcctgctcggttctccccagatgacaaatactctcgacaccgaatcaccatcaagaaacgcttcaaggtgctcatgacccagcaaccgcgccctgtcctctgagggtcccttaaactgatgtcttttctgccacctgttacccctcggagactccgtaaccaaactcttcggactgtgagccctgatgcctttttgccagccatactctttggcatccagtctctcgtggcgattgattatgcttgtgtgaggcaatcatggtggcatcacccataaagggaacacatttgacttttttttctcatattttaaattactacaagattattaaagataaaatgatttgaaaaactcttattttgtgagttgttggaggaaaggattggcagtatttttttaaagggagggagatgataaaggagagtaccccagagagttgcaacaataccacttggaagaaaaacttcagtcctgctgttgcaagagtggtcatgtgctgttcatgataggagggtattggggaagaaagattaagactttcacagctgtcagcattcactgaaaaatacctctgttgtcacttaacgtaatttcttgtcccttgaaataagattttgattaaaaatggaagagtacttgtaaaagtaataggcatattacagacagaggtcagtgaattgaaagtcagaagaccagtatttgctttttgtataactttgagaaagttacttaacctgtttagtctgatttttctcctgattaacttatctttgaactcaaattgatttagtggtgggcctttctttttttttcttttgagacagagtctagatctgttgtccaggctggagtgcaggggtgcagccttggctgactacaacctccgtctcccaggttcaagcaattctcctgcctcagcttcccaagtaactgggattacaggtgcacgccaccacacctggctaatttttgtatttcttttagtagtgacagggtttcgccatgtcggccaagctggtctcaaactcctcacctcaagtgatccacccacctcagcctcccaaagtgctgggattacaggcatgagtcaccacacctggcctgggtctttctttttttttgagatggagttttgctcttgtaccccaggctggagtgcagtggcgccatcttggttcactgcaacctccgcctcctgggttcaagctattctcctgcctcagcctcccgagtagctaggactacaggcgcacaccaccatgcctggctaatttttgtatttttagtagaaacaaggtttcaccttgttggtcaggctgatctcaaactcctgacctcaagtaatccgcccgcctcagcctcccaaagtgctgggattacgggcatgagccaccttggccggcctagtgctgcagattttaaaattgctttgtggagtctgtattttaattctgcaatctttattttctatgataaaaattctagattccagaagcagatataacttaaattagcacagatgtgatttatgaagacataccctggaaatactttttttttttttttgagtcaggtctcactcctgtggtccaggcaggagtgcagtgatgtgatcacaactcattgcagcctctacctccctgtctcaagcggtccaccccatttttaaattttttatagaaacgaggtctcactatgttgcccaagctggtgttgcactccgggctcaagctgtcctcctgccttggcctcccaaagtgttgggattacgggcgtgagccacagtgcccggccagactttgcttttcttggatcttgctatttgaccatcccagcagaaaagttcaggatagttgtgggttgctgaaaagaaaaaaaaaagtctctcaactggagtcataattaatagaagacagatgattttgaaatacattactgaaacatataggaatggtgaaatgagatacttgtttcctgtcaaggaattttatttcttagcctgttcacttacttgcagggttcttaacattggatctgaaggattttaaagagttaacttagagaaattgtgaaatgggatacttgtttcctgtcaagcaattttatttcttagcttgttcacttacaggattggatataacattggatctgaaagatttttaaaagttatcttatccaattaaggggataatgattggagacatgtttcttaagcaccaaagtcagtaagtgaattttgctaccagttttttaatgttggctgcagttctgcctttatcttacaaaaaagaaaaaaaaaaaagaattagcattgctccatgctaccacctgtgtagacttaaaagctttaacctgaaaatattcctaatgaatatagaggagagaaagcaaactggcatgaatataaaaaggactttttccataagagatcccctgaggaatgaggcttcattttgcaccagaggctgtgtctccctgagaaaataaagagatccctggggtattaacgtctgagacatacatttatagagcttggttagtgctcagaaacaagaaaagtcttaacagggatagtatattggaattaggtggtacatataagtaaatgcagatacactggtaggaaattgggtttcataaaaattctgtgtttctttataaaggaaaagtctgaagtttgaatgaacggcaggcctgcctgaggaaaaaattgatcctgctgaggatggatgaaagctgtgggcctgaatcaagaaacccagactttataaagagtcaaactttaggaggtttacactttacattaggatttctcattttgttaccaggatctttttaacctttttgatcctttaatccttgaaaggatttggactttgtgtgtcatttgataaaagagaacttccgggaatacagttcccattgctaggagtgctgcttaaacataaccacttgtgaggagccaagaccccaggcaaaaccgggggccagtttctgggcccaggtgattgttaaatttagaggtcttgatcacagctataggaaatagcttttcaaacaaaacattggtgagtcagaatttatcgaacaccaccatttatacattaaataaacactaagaaaaaatattctagcgacaaatgtagtggtgaaaacatggaatggatttgagaaaatacatcaacgtcttctccaggtataaaaaaacgtattatttagtggaactttcagtctgactagaaagtggacatagcatttattaaaaggacaagaacaacaacaaaaaattaaagtaggacaaatgtgtttaaggtactttatagttttatttttatttatttatttctttgagacggagttttgctcttgtccccccaggctggaatgcaatggtgcgttctcggctcactgcaacctccgcctcccaagctcaagcgattctcctgcctcagtctaaggaatagctgggattacaggcacacgccaccacgcccggctaatttttgaatttttggtagagacggggtttcgctatgctggccaggctggtctggaactcctgagctcaggtgatcgatcacgcccgcctcagcctcccaaagtgctaggattacagtcgtgaaccaccgcgccaggcctactttatagttttaattttttttttttacataaaagtggtttatttgtatgtagacctctacataaaaattacaatgagggttattcccaggtataggagcggtgtttctggttaaagaaatcatgaatgatgttttcagagacactcatgaaagagaaatggctccccgggttctgagggtgaggagcagcgcccgccctctaggatgcttccagagtgagtgtgcagcacagccggaccgaggaaaaggattattcccctcttcacgcgggtcgggccgtgccctggactacagctcccgtcgtgcccctggccactcgtattcggccccgccccgcctgccgtgtcccgcggcgagcgcaggcgcgctgcactcggtcaccgcgggctgcggcggctgggcggggctttcgggcgcccgcgggacggttccgccctctcactgcacccccgggcttctcttcgcaaggttcacctcgaatgaggaacaagcggggagggaagggaagggctgcggcggcgcgggcgcaccccgtcgggcccggggctgggggaggccaggtcacgtaactgctgctctggcgtcgggccggggagggggcgccagccccggcagcgcgaaccctgcgcgcgccgcggctctgaaacagttaccggctagtaaacaacagctgcgcgcgcacccgcatcagctggcgccgggatactgcacctgcgacctccttctccctcaccctgctgcccagtcaggccagcctgcgtggccgtctcctcctctactgggaccctgaggaagaacgacgagggggtgacctgcgccggggcgggggtaggggagaacgcgcctccggcaaagggggtggctcgtcctgtcacacgcaggagaaacctagcgagcggaccgtggctcagtggactagctacgacttgccacgactctgagctgcagtccgaggtgtcttgatccgctaacctcctcccagaccccgaggacctttctgctaggagaagagcgggcgcgccacccccaccgacctctcggagacaggaatccgctctgcccctgcatcctcctctgctcacccttctctcagtagtgtgggttatttttcccgttatgcatgtgcacctttcccaccagacccaagtggattgtcgacatcaaaaacaccgggtggctttgcatacacctccccccagccagacctgtggggtattcacctgatacacaacaggtggccgggtgtacaccttttagcaatctgatccacgctatagtcgcctgataaaggtttgcctgcacgcacttcgcccaactagaaccgtgggacactcaccagataaaggactacctcgacaggaaactgggggctgaggggagggaggcttcatctgctgccctgagaccatggcactgagccttcagccccggaccagaggggttagctaggtagctcttcattctgaaggaaagaagtcacacaagattggcattgttttgtctttttgttttttgtttttttctctcttaaaaaatatattcacctattggtgatgcactttctaggacagtcggcttgaattctgagtagaagtattcttagttggggctttttgtgtggtgtgaatcaaggttattgaaatgtgttatttttcaagttatcttttgtattgcagtcaaaagtagc

SEQ ID NO: 1836 - DNA, 6000 bp, Homo sapiens
tggtccaacaaggtcatgtgctagctattctcttttgttcattactgtcaatcagtcagttaaccagtattgattgagtacctgcctcgggccaggtcctagggatgaagagttagaacccatattctcatagcttttctacaccagtgaagaaaacaaggctaactggagcctttgactgctagaaagaggtcaactggtccaatatctttgtttaccactgaggaggaaggcgcagcctgtgggtagacggatgggcctctctcatgctcgtctgtgtagtggggtcttcctcatgtcagctgccataggtaactcatattcattgttgggagtctgttccaggcacacatcccacagctggcagtagtcagcctctcaaatgccacatcttcctcattgacaacaaagggaaccagagctagcaagaaaaaaaaaagccttttctcttggaatgcccactgccttctatagctgtgttaggccatttttgcattgctctcaagaaatacctgaggctgggtaatttataaagaaaagaggtttaattagctagagattctgcaggctgcacaggaagcatggcgccagcatctgcttggcttctggtgacggaggccacaaggagcttttacttctggtggaagatgaagaaggagcaagagagagaaaggggcgtaccacatacttttaacgaccagatctcaggtgaactcagaatgagaactcaccattcaccaaggggatggtactaagacattcataagggatctgccccaggatccaaacaccttccttcaggccccatctccaacaatggagaagcctctttctatgcgagatttggagaggacaaacatccaaaccatgtcaatagctccttacaaagggtttggacggaaaactagaaataggctcagatagatccagagaggtttgcagccctccatgccatctttggctgttaggagatgatgtttctaactctgcttgtctggattctgttctccctgctttagcttgggagcccgtgttggaagaaaggcactgaaatgcctcagagcaacaagtgtcaaagacctacatggagagcggaagcttgtggttgtcttggctcaagaggctggggttggccaggcacgatggctcatgcctgtaatccctgcactttgggaggtcgaggcaggcagatcacctgaggtcaggagttcaagaccagtctggccaacatggtgaaacccagtctctactaaaaatacaaaaattagccaggcgcctatagtcccagctacatgggaggatgaggcaggaagatcgcttgaacctgggaggtggaggttgcagtgagcagagattgtgccactgcacttcagcctgggtgagagagtgagactgcatctcaaaaaagaggctggggttctcatctttggtatgttcaatcatcccagaggtgagcctgaaattctaaaacataaagagttcctccaaagttgctctgggcgggtcccaaattcaagtttcccactggccctcagtctcctaaggttgttttaaagggagaatgttggccaattctgactgggacccacacctccaggtaaaactttaaaaggacagcctttagagaagaaggcagagatgggaaagaggtaaaacagctgtcacctctcttaattctaacaatcttctcgcacctagctgtagccaacttagttcccacattcagcgaagttaagttgtttccaatcatttggcccctcccagcctgggggcctctgacctctggcctttctttggaaaagcaatgcagagtccagatctgcaggagtagctcccagctgggcccccgagaagggaagaagcaaactttccacagtttgcaccaagacccaggaggcaatgtcagagaggaagtgaggaagcctgcctggcagaaaagcaatggcggctcagacatatccacccacagacactccattctcctgcaagtgtccccacaatggattggctctgccaggagccatccctacccccattcagctatcttagaattgtcacctcctgaaataaggacagaacattatgtaacccatttcctcaggcctcagacctatggagtcacatgcactagtcaggagaatcccattggctcttccatagggccccagggccgctgcacacagggctttgtgtgaattagagagaggaggcctctctgggcacttttgaaggtgccttctctgagtagaaaaagcagaaaaatgtccccatttgcgtgacaggcactctcggatgcagcaatatttatgcaactgtatgtgtggcactgaatgagtccctccttttgaagccttccctaggtggtctgggtgttttcagagcatctgccatgttcctcctgtcctgctcaagctctctctggttgatggcctctgtctccaaggctactggaggacatcttgcttctgctggtgtccactgtggggtgctgatgtctggctccagggagggcctccctgtgctctcagaatggccaagtgaggctgtgccctcggcgcctgggcacgaaggcagtgctgttggaggctggcatcacactgaaccagctttttttttttcctttttagagacagtctcactctgttgcccaggctggagtgcagtggcatgatcacagctcactgcaacccccgcatcccgggttcaagcgattctcctgcctcagcctccggagtagctgggattacaggcatgcaccaccacacccagctaatttttgtatttttagtaggacggggtttcaccatgttggccaggctagtcttgaactcctgaccttaagtgatccgcccgcctcagccttccaaagtacatagaaccagctcttaaggccactgcctcaggccctcactccacaaaaccgtaagtccttgggaccaggccaacaaagggtcacaatccaaggtggatatcctgtgccccactcactccagttcccccaagtccacagacaaaccctgctgctttcagcattcctcttcctcaaaggcaaaccttgcttgctgggagctccacccatcagttcatgggacatccctaaaaactcattttccaaattaaaccacagagtaccttctgtcatacattttggagttttgttttacctacctccttcttttcccgtagtgaaacaagcaaggggtttagcctgaatgcattctacatcgtagcagagtttatggggaatccgactaggttataggaaagactgagatcaaaagaccaaacactacgtttccaagattgtttgtaggaaatagtcaaaattgagaagctgtagatatgaacaggacaccctgttgaaagaaaatgaagtgctaggccagtactgacataaggtaagagataaaatgagccagtgagagaatcccacgcaccacacctcatatgatccaggaaagcttcctggatgtggaggactttgatgtaaagagtaaccaaaatttcctatgaggaatcaccccttcccctctctcagtcccaaggtgaaacacatgacttggttctgaacaatcaaagccctgaatccactatccccagtgactgtttgggaggaaggggttaagcagggtgactcctaagtctgaatttgaacctgtaaggataaagtcgtgaatctgttacccaatggagaatgacaataagccaacaacaagagtagaggcgagaaatggagagaggcccagtccacatgagtcctgggttaagctttatctgaagtcttttatatataaaagacagtaaattcccttttctgagtaggccgatttaagttggatttctacttctttggaatcaagagtcctgatgattcagaggaaagaaggacttatataacatgaacaaagacagaaagctgggaactaagaaccagagggtagtggacagtatcctcagcatctgcctctgggaagtgccacctctctgaccatccccacagtcataaaggagaactcccctgtacctgggctttcttaaatgaccctgttccttcctcaaggtggctaatgcctgtaatcgcagctactgcggaggctgaggtgggaggatcacttgaccccgggagttggaggctggaatgcagtagccccatgatggggctactgcactccagcctgggcaacagagcaagaagaagaccctgtctctaaaacaaaaccaaccaaccaaacaaacaaaaagactctactcccctggtcacatctgagctatcacaatttcttcctcagaaaattgaaattgcaacaaacagtttaatgtcagtcaaggctagtcccctgaaggggaaaagaggtaacaccttgggaaccatagcatggctgtgtttactgcttgtggactgagcagaagagaaagcaagacagtatcatcactttatagatgaggaaaactgatggtcagaaagattatgtagcttgcctaaggttgcacatttggtatgattttacagaactagaatccagctttttgaattcaagggtggggcaggaaacagctaggtcagtggcctaagaactccggacgggtgagatttggggcagacagcaggggtagtcaccctacaagagtcacgccaagtgcaagcactcagagacatctcccaacactcaaaacagcaaagaagttctggtgctttaagtgttcctcgctcggctcagagactcggcttcgagccgcgactcaagacagcacctgggggtatttgttttgcctaagcctgctgcacttccacggccattgaatcccaaaaactacaattcccattatgcaccgcgagttcgcggactaaacaggcataaactacaagccccagaatgccttgggcgagacgcgagagcacggaggagcggaggggcgtggccacgtcgaccgcgcgggaccgttaaatttgaaacttggcggctaggggtgtgggcttgaggtggccggtttgttagggagtcgtgtacgtgccttggtcgcttctgtagctccgagggcaggttgcggaagaaagcccaggcggtctgtggcccagaggaaaggcctgcagcaggacgaggacctgagccaggaatgcaggatggcggcggtgaagaaggaagggggtgctctgaggtaggtacgggagaaagctgctgggggctgggcctgagaggacacggcctggtaggtaatagaaggctccgctcggagcagtcgagggggagatcggcaccgtcagaacagaccccaccggagcctccttccttttggagtagaatgccggaggtggaggtgaaaacgcagtggactgagggcacgtgcgaatcctgccgcatccagcttcaaagcgaagaaggctgcgggaccccagcggaacaaagagtttggaagttgcaatgttgtctgtttgtaactcagctcagccacctgctagttgtttgaccttgggcaaatcgtttgtatggaaaatgctgatgttaatgctgccttacgtggttctgggggaattcaaagtatttgttaagtaactgcttccaaataagcgctcaacaaatggcaggtgctatgccaatagcacagagatctgaaagcctttagccaatatcatagagatctaaattatgccaataacatagagatctaaaagcctttttctgcatgtttgcggcttttccttgtattaaaaaaactatattgcagttctaggttggaaatctgtatgtgttttcactgtggtgcccgcaatacctagataagtgctatgtcatgggctctttcattcatgtaacaagtatttttttggctaagctctgagtgcagcaaatatacagacacaaaaatctcaaccctcatgaagcttaagttctggcatgggatgaaggtgggggagtcagacaataaagacaaactgttaggtggagatgtggtcagtactaaaaaaaataataaagcaactgggtgtagtgaatattgggg

SEQ ID NO: 1837 - DNA, 6000 bp, Homo sapiens
cacatgcatgtgtatgttcattgcagcactattcacaatagcaaagatatggaatcaatctaaatgccctcaatggtagactggataaagaaaatgtggtacatatagactatggaatactttgcagccatcatgtcctttgcaggaacgtggatggagctggaggccattatccttagcaaactaacacaggaacagcaaatcaaatatcatattctcccacttataaatagagctaagtagtgagaacaaatggacacaaacagagaacaacagatactggggtccacttgagggtggagggagggaagagaaaatataactatcaggtactatgcttagtgcttcggtgataatctgtacactgaacccttgtgacatgagtttacctgtataacaaatctgcacatgtacccctgaacctaaaagatcaaaaaaagaaaaaaaaagaaatatgtgttggaccacaatttcagatatgcaaagaataacatataaatttatatttataaatataaatcaacctagctttaattttgagaattctgctcttccagtttggtaaaaaacttaacttcagttattctagggtttccctcttctgtttcaagatgggatagatttcaagagttttatgtatggccaaagctaaggcatctgggtgttgagtcattcgtctaccctgattcctcttctggggtattcattcactctgttcacacagtttctacagttctgaactccctcctacttccagaattattttaaaatatgggaatgtttatgaggggtccttatggacctatttgttcagacacatgaggcagccctgattctctggagtattgctgcctctgctatgtgcggtggtgctgtgtacagataaatatacaagcatggctccccaaatatgggggccataaattttctctatgctcccaggtccatgggactctgtgatagcttccctgggctgcttctcaaatgcactctagtgcttcctttattttcagtgcgcttggcatgaccttttgaaagggattcatgttttaccctagtcaggaagcatttatgacttttttccctcaacctttcctttccaatatctttttgaaaatatgaagaacagaaaaaaatgggataaatgaacacagtttaatatttcataagcccattctgccaataggaattaagttttgaccagaacagaggcagagtaaaattctgatcatgtcactcttctgcttaccatattataatggcttcctattgctcctggaatacagatcatatgccttaataaaacacatggagatcctgcctgcctctccaacctcttcatgcaccacagtcccttctcattctctctactgggaccaaacctgtgtttcactgtgaaaaggacaggtttttttattattattatttttttattttttatttttgtatagtacctcttcacctggttaactcccattcatgctgtaaagttgcagctttagtggaattcttgcagggaaagcttacatattgccacttattatagatactcatggcactatgtatcttttctttgtagcacttgtccatgatggttaccttctctcataagaagagaaatgcaaaggataactacaatttaatggcattttcacttgtcagactaataaaactccaaatgttttcacaataaattttttgaaataaatgagtactcttacctactgctggtgggattataaaactagcacaacctctgtggaggataagttggcaatatcttttttttaataccttttgtcccaggcagtctacttctggaaattgatcctatagatttattttcgtagtataaaatgacatattttgtctttattcattacagcatttctttggtaatagaaaagtactgaagaaaattaaatgttcctcaataggaggctgctcaaatacactgtgatatacccattcggtggaataccctgtagctataacaaaaacaaaaatgtgagaagcttcctaaataatgagataggaagatttttctgttaaaaaaaaatacaaaaaaatgcatatgacgtgctaccttttgtataaaaagggtaaaagtaaaaaataatatgtatgtgtatatacatatacacacaaacatatgtatccagtttgcctgtacaagcatagcgaaactctgaaaagatacacaagaaactaataaaaagaattatctatgttttggggaagaatgaaaactgacaggatatggaacagaataagatgtaagaatgaaaagtaatgaaaatatttaattatgttcccttctactgattatattatacatgattatgaacgaggcaaagttttgtttttctttttcagatggagtctcgctttgtcacctaggctggagtgcagttgtgcgatctctgctcactgcaagctctgcttcccaggttcacaccattttcctgcctcagcctcccgagtagctgggactacaggcgcccgctaccatgcccggctaatttttttgtatttttagtagagacggggtttcactgtgttagccaggatggtctcgatctcctgactttgtgatccatccgcctcggcctcccaaagtgctgggattacaggcgtgagccaccatgctgggccagttaattctttgaagccagcaatggtgtgttaaaaaagaaaattcaatctacaaataacaaaaaaaagacaatagttcaaagtattcctgtgcttaatctatcactataggtctattaaaacaagagcaacaaacggttgccaatgtataacttaaaacatccagagggttaccccatctacagttgcctaaagttattcttagttcctggagaattcatttagaagcataagcataataagggcacagtgaaatctaagtttggttctccattatagctgtggtcctaatgaattgtgggcccatcctgaattaataattctccaataaaaatgataatcaaagaatttaaaccattgatacagttcccttgttgatattaatctgttcattaatattacttggatcatatttccaaattacagagtgtaatagcatctaatgcactttcatagatcacaattttattcttttgtttcccattttacagttaatcctatgtagcagatattaaggaggcactaagcactctttgctaacaaactatccatttctttcatttaagtatttagcacttagttagcaaatgtggacttctcacttactgatttcttggtttaaaaactgtaggttcagtatggaacaaatggatttagtagctcttgaatatctttacactgtaaacttactattgataacttttatttctttagaagcaatatctaagtcctaggaattctgagcctgctcattattgttacctcccaaactagcggagtgtgattcagaacacaataacattatattttctttcctccttctcttcctccttttagagaatacatgataggatgttttcagctttctagctttcaacagatgcaatgatcaaagagtctgtccccctctgctttaataaatgtggaacattcaacatttggcatatgaagagtaactgggtacatctgaactattctgtgctcttcattctgttccctaaagggacagatacaaagagaaatcacataaactataatccagttgagtagatttaatttccttttcctatttggtctacatgcaccacctggtggtaaagtagtgcatttcacatagagagagagagagagagagagagagtgtgtgtgtgtgtgtgtgcgcgcgcgcgcgcgtgcacgcgtgtgtgttttgaggagtatataacatgaaaaagataattttaatatactttcttaatactgatttagatagacaacacaattattctacaccaagaatctaatacaacacttgagcactacttcatgtataacagaacaggaagtaaaggagagaactcatgctggaaagtaaaatagctttcacttatttaccttagcaatacatattataattccatctctaaattaacatttattgttccaatattcttattgaggcaaaaatcaaacactgataatcaatgtgaaaccatttcctcctttttaaagaataacagcttttaaaagtaggtgccctgttccttatattagtagtgagtataagtcacagatcacagaattgtaaagcaccatagaggcattagaccaatacaccaattttacaaatgtagcagctgagactctggaacagcaggtaacttgcccgaagtcatactggtcattagtggtccaacacaaataagaatctagatcttctcactttcagcctaggaatataatacataaaaattgtacttatattcatattcaatgaattgtctctgtatgatgtgataatattcaacttatctacacagtgctttaaggcactcatatgttagttaacacataccagttttgttctaacattctgagcacaaagaagtaattgaagaaatgcatgtatcataaagctatggaaaagattttctaagtattaaaaaaccctatatatatgttcaaatgaataattttccaagtataatacaactgctatattgcaaagaaggtttaaaaaattccctttccccttctaactgcttcagaaccagagatctgtttctacaaagtaggtacccacttgtagatttaagcataaaacatgttcatagctccctctcatgaccattgaatactatacaagcctccttttattctcgctgttgtattcaactaacagctcactggctaagttttaattgcttccaatgaggtcagcaaaggtatttatcgaaaagccctgaataaaaggctcacacacacacacaagcacacacgcgctcacacacagagagaaaatccttctgcctgttgatttatggaaacaattatgattctgctggagaacttttcagctgagaaatagtttgtagctacagtagaaaggctcaagttgcaccaggcagacaacagacatggaattcttatatatccagctgttagcaacaaaacaagtaagttactgttatttgtcttttaaaacaatgctgaatgttttctaaaagtttatctctttttctgattttagtactgagcaggaaagtaaagttacaagatttttgagccatgtaactatagtaattatgctgtagaacataaagataaggttgaagttctccagagcaatcctgacatttaacttaaaaaacctgggcagttcaggagaaaataattgattaaccacaaatgtaaaagcatataataaagaagtctagggagaaagcagttacactttgttagcagtaattgtaaaaacttaatttaaatcaatagttctgagtgcagtatggttctcacaaaatagcaattggaatgaatggtacagtcatattctgttttgtctctactcatgcataaattttataaatctacacataaagtggtaaagattttgacatcctctgtgaaggctgttttaaatgtatcttcaaagaataacctatactgtattctaatgctactacttacccactaaaatttacacatacaattttttatcttcctctctcctcccctccctattcttaatctctcattgcaaacagaagtcaaatagcaaacagcgtcacagcaactgaacttactacgaactgtttttatgaggatttatcaacagagttatttaaggaggaatcctgtgttgttatcaggaactaaaaggataaggctaacaatttggaaagagcaactactctttcttaaatcaatctacaattcacagataggaagaggtcaatgacctaggagtaacaatcaactcaagattcattttcattatgttattcatgaacacccggagcactacactataatgcacaaatggatactgacatggatcctgccaactttgctctacagatcatg

SEQ ID NO: 1838 - DNA, 6000 bp, Homo sapiens
gaggtaaatgctaggattctaaaaaacaagttttatgataccatttttttctgtgaaaaaaataccaaatttaacgaaaatcaatgggaaattgtatttgctatacaaacattcaatctctgaacaattttttagaaatggacttagaagactgacatgtataaaagacaaaacttttagaactctattggctgggcgcggtggctcatgcccgtaatcccagcactttgggaggcccaggcaggcggatcacaaggtcaggagatgagaccatcctggccaacataatgaaaccctgtctgtactaaaaaaaatacaaaaattagctggtcatggtggtgcgcacctgtagtcccagctactcgggaggctgaagctgaagaatcgcttgaacctaggaggtggaggttgcagtgagccgagatggcgcgactgcgctccagcctggcaacagagggagacagcgtctcaaaaacaaaaaacaaacaaacaaaaaaactcttagagagacacacattattttccaaatacgcagttcatggaggtgaaaaaaccaatcaatgctggactaggcccaaatcactgtcaccttaaaagcatcagcttcacatgaaagcaacccctggaaaatgccattaactacagtaacattggagttgtttttgtgaagtctcagtcaaggctctcagcaataaaaatgagcaaaattcccacaccactggcaggttgtagtgtaatgttcaacagcccacaaaacaggctgaaggaactaatgaaggcagccaacaatgccacacagaatttacttctgaggcatcttctttccattttaacaggggacctagagtaacacaaggttcaaatgtaacaaagaactggatagcagtggtaagaaggctcagcatttcataaagcagtaccttggagacaggaagcaggctaagatatccagttattttgtttgtttttcggttttttttttttttttttttttgagacggagtctcgctctgtcacccaggctggagtgcactggcacaatctcggctcactgcaacctctgcctcccgggttcaagcgattctcctgcctcagcctcctgagtagctgggattacaggcacgtgccaccacacccagctaatttttgtattttattagagacggggtttcaccatgttggccaggatggtctcgatttcctgacctcgtgatctgcctcctcagcctcccaaagtgctgggattacaagcgttagccactgcccccggcctcagtttgtttttaaactctgaattatgcactacagctaattacctatatttgaaaacaatgccgaaaatacgttaaacctctaagtaatgtgatgctctgaaaattttcaatacttttatatttgtatttttatgtttcctctagtaggaaattttttttaagtttgaattaaactttgtaaaaaaaaaacctctaggtataaatcatgcaatactcttccaaaatagttccaaaaatttaattcacattaacaatacattttatgggctgggagcaggggctcacacctgtaatcccaacactctggaaggctgaggcaggcagattgcttgagcccaggagttcaagaacagcctgggcaacactgtgaacattcatctctacaaaaaatacgaaaaactagccaggcatggtcgcacacagctgtagtcccagctcctccggaggctgaggcaggaagatcacctgagcccgggaagtagaggttgcagtgaacagtgatcgcaccactacactccagccagggtgacagagcaagaccctgtctcacaaaaacaacaaacactttactgtccacaaactcctcaaatccctttggaaaaataaacagtatacacagaaaaaccagaggatggggtgggaaattttttttcttttattttaaaaattgagacagggtctcgttatgttgcccagactggtcttgaactcctggcctcaagcgatccttccacctcaggctcccaaagtgccgggattacaggtgtgagccaacgcacccagccccactcttaaactgccattctcaatctttttccccctctcaatcttattttaagccaccttgctaaacgttggctgttttaaaatcagtcaaaagatttatcttattaccaagtttcaacttagaactgtacattcagcttatctttaaaaaaaaaccatgaaaaatagtgactaatacctatttcaaattgtctttattaaaacagaaaattcacataaatcacaaagcacaatatataattatgttttaataattctgagtgaaactttcatattcagagccatatctgattaaatattaaatataaagataactttcacataaccaataaaaacataaggtcaatttctaccgacaccataaaagtactatctgtcctttataaacaacctgtaacaaatctctctcagcagtagccaaaaaactgctagtatcaaacatttaatttcagcacctgaccagaaattggttttacctttcctctcagcaaatgttacacaattccacctgtagggtatatgatatccttttaaaatgcaatttaagaagccattacttttttagagaaactgctgttcctcttcagaaaaaatgagagagaatttcaatgtggacaggaacattttagcctatcatttagaaaaaaatacagtgtatttaaaaaaaaaaaaaaaaaaagccacgtagcagtccgtgggcagcatgagtcatcatccaactcaaaacttgcagcagcacttgtaagcttcctcctacccgacccccatccccttcagcaaagtaccctgagtcagcaaaccttactattttgtcagttatgattctcacgatgctttaaatgaatttatgtaaagcactgcaacacttttagtgctaacattagtctttagaatgtgtgcatttttttattacaaaattaactgacttcaaatcactcttctctggattttttaataacagaaagtagccaacgactacttctaatcctcttttgcaaataaatgaattccagaatatcctcatatacgaagttttttctaaaatagtctccattttccagtgttttcttctcaacagtaatacctaggtgatcaaatatgttctgctcaaatctggcatattttctagattaactgcaattactgaattcaggacatcaatgaataattttacaagcttaaggcaattcttaataaatgatgtaacatatgtgaaatgactttacaatccctggcacatagcaaacacttcataaacatgtttgaacaactactatctaaagacaaagttcctttcacccaattcaaaattattttttaaacattaaaatctgatatttctatgaagaaattcctgatttcagggccaggccctgtttggaccctacattcttctggtcagatcattctttccatctcagttttccagcgttaaagagggaggacatgtgcaattggaactgtaagagacaggctagaagaatcagccatcagaaaattactctgaagctgcttgctcttcattgtatggcgtgttaatttttccccttgacaaatcatctgtatccgttaaaaaaaaaaaagtcattactgagactgcatctttagcaatgaacacgaattctgccgttaatacaagtaggcttctaattccaactcaccagtccctttcactggaccttttccaatgaacaagcaaaagaaaaaataaaacaggaaaggaatcaagaagctcccgctgcacagagatccccctaacacctaaaccggttgggtcctacactcgccaagaaacaaaaggatgccaaaacacctttacttttcgacacaactcacaaggcggactaaaatgcacagcaaagtgacaaggccctttttggtgaaccgacaaaacaagctttcatttgggcacttttacagaccaccacttaaggtcccgaaagaagctaaggaaagactgtagggccgagggaggaaattaggaatttcgtctccgagttttcagtacctcattcatggcaagactcaaaacttgggcggacttcagggctctgagacgagccgggtgagcgctgcgcgctacgccactggagactttgcccggccggagtcagctgaggccgagtcaccgggtgggatgggggaggagacgcgggagcatttcgaaaggcagcgtgccagtaaggcgagactccacgccacctcatgttccccgggccgccgcccctcgctcgcccgccctccggtccggtccggctgggtttcgaacccgcggagccaggcgcaggcggcgggacggcagcaggcgtgcggggccagggagcgggcgcggcctggcagggcgaccggcgaggggcgtgccgggtgggaggggcgcgctggccgcctggccggccccacgcggggaccccagcccgccgcccgcccgcccgcgcggggacgcgccggccaggcccgagcgggcgggcaggcgggcgagcagggggcgggcggcagaccgaacaaaaacgcctttgttgagcggcagccgccggagggtcacacacaatggaggagggagccggctccgccgtcgccgccgccgccgccgccgccgggcccgccgcggcgccctcccgagccgccccgccggcgcaccccgcacacgtacacacacacactcacgggacttctccgactcatcgagagagtgcggggctcgcggactgcccccagtgtcggctcaggtctccggctgtgctggcggcagcggcgtctccgaggctctcgctttgccgcagtcgccgccatgtaaccccgacccgcgagagagggcgaggaagagggggcggggcttcgcggtgccacgccccctcacgtcacaggctcactccacgggttctcccgcccccgccctgcccagcgcacccgcacgcgccggaatttccagcgcccgtgactgggctgcgcgcgccgcggaggcggtgggaaaggcacgcggctcgtccggcgtctcctgggggctttgcctgcgggcgggcagggaggaagacagctggggccgtttgctctactacctgccctggcattaagggaacaaagtgaccaaacccagtgccagcgtttactaagcacctactacgtgcaaggcactgggcaatccgagaggaagaggcctcagtctccaggaagggtggaccttaagatggattggctggaaggcgacagcccgagcacaagacagacgcgttagaggccaatactaaggtcattcattctgccagagtatggaggaaggctttcaggagtggtcgccaaggtggcctttcagctggatcccggaggagcggatataaccaggaggtggggagggtgtttctgtgagcaaagactgggaggccagagtacctggcttgttgcaggaactgggataggacaatttgaatttgggaagggatgcactatgaaacgtagaaaggtggatgggtgccttcttgggcccacttggctaaaagcaaacttacattacttatcatggcttattgagtccaaggagccttttcagtgtttatgtgaaatttaagtatttatgaaattagagacgcaggtcagcatattttttcaatgacttcatcaccatcttgctgagaaccagacatagaatagcccttctagtcattattatgggcatcttcaagaaagaggcaaagaccacttcaaaaagatcacaaagggccaggcgtggtggttcacgcctgtaatcctagcactttgggaggccgagacgggcagatcacctgaggccaggagttcgagaccagcatggccaacatggtgaaagccccgtctccactaaaaatacaaaaagtagccgggtgtggtggctcacacctgtaatcccagctactcgggaggctgaggcaggagaatagcttgaaccccgcggggggttgcagtgagc

SEQ ID NO: 1839 - DNA, 6000 bp, Homo sapiens
tacataaccaagacaaaagttgcagaaaacaatgtttgccctttcttctgggcaatgctctcttatttagttttttgctctattaagacaaaatgcaaattgtaatccactaaaatgatttcactactcactaatggatcataatctgcagtttgaaaaaatgctgagaattgaaactttttttgttttgttgagatggagtttcactcttgttgcccaggctggagtgcaatggtgtgatctcggctcactgcaacctccgcctcccgggttcaagcaattctcctgcctcagcctcctgagtagctgggattacaggcatgcaccaccaggcccggctaatttttgtatttttagtagagatggggtttcaccatgttggtcaggctggtctcaaactcctaacctcatgtgatctacccgcctcagcttcccaaagtgctgggattacaggtatgagccaccgcacccagcctacacctgactaatttttgtatttttagtagagacggggtttcaccatgttggtcaggctggtcctgaactactgacctcaggtgatccacctgcctcggcctcccagagtactgggattacaggcctgagccaccgcatctggccaagcactgaaatttttatagccacagaatgggattttttttttttttttgagagggagtctcgctctgtcacccagactggagtgcagtggcatgatctcggctcactgcagcctccgcctcccgggttcaagcaattctcctgcctcaacctcctaagtagctgggtggcgcacgccaccacgcccggctaattttttttgtattttttagtagagatggggttttaccctgttggtcaggtgatccgcccaccttagcctcccaaagtgctgggattacaggcgtgagtccgcgcccagcccagaatggcattaagaactgaaaccgggctgggcgtggtggctcacacctgtaatcccagcactttgggaggctgaggtgggcagatcacttgaggtcaggagttcaagaccagcctggccaacatggtgaaaccccctctctactaaaaatgcaaaaattagttgggcgtggtggcgcgccctgtaatcccagctactggaaggctgagacaggagaataccttgaacctgggaggcagagcttgcagtgagctgagatcctgccactgcactccagcctgggccacagagccaaactccatcgcgcgcgcgcgcgcgcgcacacacacacacacacacacacacacacacacacacaaactaaaactggccgggcatggtggctcactcctgtaatcccagcactttgggaggccaaggcgggtggtcaggagtttgagaccagcctgcccaacatggtgaaaccccgtctctactaaaaatactaaaattagctgggcatgtggtgcacacctgtaatcccagctactcaggaggctgacacaggagaattgcttgaacccgggaggcggaggttgcagtgagcctagatcgtgccactacactccagcctggatgacaagagcaaaactccatctcaaaaaaagaaaaaaaaaacaccaaaaaaactaaaaccaactacattgacatgactttacaattcaactatctgcaataaatataacttgaattccaagaaactcttgcctaaaaaggtggagttgcaaataacttgattgtggtttcaggaacttcctaaaatccatttatctcattaagttactcacagaatttgccttcatcagggtaaacagccctctgttctactgagtttaacaactatttatccctttaggctctcttcaaaactctccccctcctctgcccacccaccttaaactattataacacaaatttgtcccaaacccaatcaggacccctcactgaaaaaccagtcttaaaccagatccctgggccaggtgtggtggctcatgcctgtaatcccagcactttcggagggcaaggctggtggatcaccaggtcaggagatcgagaccatcctggtcaacatggtaaaacctcgtctctactaaaaatacaaaaatcagctgggtgtgctggcgcgcacctgtagtcccagctactcgggaggctgaggcgggggaatcgcttgagcagaggttgcagtgagcagaggttgcagtgagccaagattgcaccactctgcactccagcctggcgacagaccgaggctctgtctcaaaaacaaacaaacaaacaaacaaacaaaaaccagatcccccaaatcttgtaattattccatccttgacctcccctttgtctcacgtgtccgtgtgaagagaccaccaaacaggctttgtgtgaaaaacaaggctgtttatttcacctgggtgcaggcgggctgagtctgaaaaaggagtcagcaaagggtggtggattatcattagttcttacaggttttgggataggcagtggagttaagagcaatggtttgggggcagggggtggatctcacaaagtacattctcaagggtggggagagttacaaggaatcttcttaaggatgggggagattataaagaaccttcttaagggtgggggagattacaaagtacactgatcagttaggttggggcagaaataaatcacaatgatggaatgtcatcagttaaggctattttcattttttttgtggatcttcagttgcttcaggtcatctggatgtatatgtgcaggtcactggggatacgatggcttagcttgggctcagaggcctgacacccttttgaaatgctacaaagattctgtcaatttagtggtctcccttactattgtaagccaactttgcattatccacaggaagtcagcagtgacactggattaaatgctccttgagggaaggcacagtgcttggtatttattctcccaccttctctgggtgatcagacattgatggaaaaggaaggtaaacgagttctcaaagagtgagaggaaaaatgtcctgaggatcagaggagagcctagagcagaggcagtggggctgaaggtacgagctctcgttgcagaagctggaaattctgcggttggaacaagtctcccctttctcttggtttttttcactcattacctcttcttcacacctggtactcagctgacgttgttttaaatattaaaaaatataaagcattcaagctcaccccaaccacttaacttcattactctgtgatttttttttttgagacagagtttcgccctttcgcccaggctggagtgtcctggcgcgatctcggctcactgcaaccccccgcggggttcaagctattctcctgcctcagcctcccgagtagctgggattacaggtgtgagccaccacacccggctactttttgtatttttagtggagacggggctttcaccatgttggccatgctggtctcgaactcctggcctcaggtgatctgcccgtctcggcctcccaaagtgctaggattacaggcgtgaaccaccacgcctggccctttgtgatctttttgaagtggtctttgcctctttcttgaagatgcccataataatgactagaagggctattctatgtctggttctcagcaagatggtgatgaagtcattgaaaaaatatgctgacctgcgtctctaatttcataaatacttaaatttcacataaacactgaaaaggctccttggactcaataagccatgataagtaatgtaagtttgcttttagccaagtgggcccaagaaggcacccatccacctttctacgtttcatagtgcatcccttcccaaattcaaattgtcctatcccagttcctgcaacaagccaggtactctggcctcccagtctttgctcacagaaacaccctccccacctcctggttatatccgctcctccgggatccagctgaaaggccaccttggcgaccactcctgaaagccttcctccatactctggcagaatgaatgaccttagtattggcctctaacgcgtctgtcttgtgctcgggctgtcgccttccagccaatccatcttaaggtccacccttcctggagactgaggcctcttcctctcggattgcccagtgccttgcacgtagtaggtgcttagtaaacgctggcactgggtttggtcactttgttcccttaatgccagggcaggtagtagagcaaacggccccagctgtcttcctccctgcccgcccgcaggcaaagcccccaggagacgccggacgagccgcgtgcctttcccaccgcctccgcggcgcgcgcagcccagtcacgggcgctggaaattccggcgcgtgcgggtgcgctgggcagggcgggggcgggagaacccgtggagtgagcctgtgacgtgagggggcgtggcaccgcgaagccccgccccctcttcctcgccctctctcgcgggtcggggttacatggcggcgactgcggcaaagcgagagcctcggagacgccgctgccgccagcacagccggagacctgagccgacactgggggcagtccgcgagccccgcactctctcgatgagtcggagaagtcccgtgagtgtgtgtgtgtacgtgtgcggggtgcgccggcggggcggctcgggagggcgccgcggcgggcccggcggcggcggcggcggcggcgacggcggagccggctccctcctccattgtgtgtgaccctccggcggctgccgctcaacaaaggcgtttttgttcggtctgccgcccgccccctgctcgcccgcctgcccgcccgctcgggcctggccggcgcgtccccgcgcgggcgggcgggcggcgggctggggtccccgcgtggggccggccaggcggccagcgcgcccctcccacccggcacgcccctcgccggtcgccctgccaggccgcgcccgctccctggccccgcacgcctgctgccgtcccgccgcctgcgcctggctccgcgggttcgaaacccagccggaccggaccggagggcgggcgagcgaggggcggcggcccggggaacatgaggtggcgtggagtctcgccttactggcacgctgcctttcgaaatgctcccgcgtctcctcccccatcccacccggtgactcggcctcagctgactccggccgggcaaagtctccagtggcgtagcgcgcagcgctcacccggctcgtctcagagccctgaagtccgcccaagttttgagtcttgccatgaatgaggtactgaaaactcggagacgaaattcctaatttcctccctcggccctacagtctttccttagcttctttcgggaccttaagtggtggtctgtaaaagtgcccaaatgaaagcttgttttgtcggttcaccaaaaagggccttgtcactttgctgtgcattttagtccgccttgtgagttgtgtcgaaaagtaaaggtgttttggcatccttttgtttcttggcgagtgtaggacccaaccggtttaggtgttagggggatctctgtgcagcgggagcttcttgattcctttcctgttttattttttcttttgcttgttcattggaaaaggtccagtgaaagggactggtgagttggaattagaagcctacttgtattaacggcagaattcgtgttcattgctaaagatgcagtctcagtaatgacttttttttttttaacggatacagatgatttgtcaaggggaaaaattaacacgccatacaatgaagagcaagcagcttcagagtaattttctgatggctgattcttctagcctgtctcttacagttccaattgcacatgtcctccctctttaacgctggaaaactgagatggaaagaatgatctgaccagaagaatgtagggtccaaacagggcctggccctgaaatcaggaatttcttcatagaaatatcagattttaatgtttaaaaaataattttgaattgggtgaaaggaactttgtctttagatagtagttgttcaaacatgtttatgaagtgtttgctatgtgccagggattgtaaagtcatt

SEQ ID NO: 1840 - DNA, 6000 bp, Homo sapiens
aaaaacaaaaaaaaaaaacaaaaaaaagactacatagcttatatgcagattaccaatattaaaaaatacataaaacatttaatgataatatttttgttacatacctttaataaaaatatttattttaggcacaattcagattcagaagcgtcaacagttagtcagaaagatacatgaagatgaattgaatgatatgaaggattatctttcccagtgtcaacaggaacaagaatcttttatagattataaggtatgtaccactaacagtatttaaaataattgttagtaattattttgcttattagttagagcttattgtgcttattagtgcagattagtaaatcagtaataatgctgatcattgttgaattgagtacgggtatttagtgtgtcctagtcattgtcatgagtgtaccatatagagtatttctcttattctcacaatatgtgaattaagcaattactaacttttataggtggaaaagaggtttagaaaagttaagtgactttctcaaggtagcaactggcagagctagtttgtttttgtttgtttgtttatttatttgagatggagtctcgctctgttgcccaggctggagtgcagtggtgcaacctcaggttgctgcaacttccacctcctgggttcaagcgattcttgtgcctcagcctcccaagtagctgggattacaggtgtgcacctctatgcccggcaaatttttttgtatttttagtagagacggggtttcactatgttggccacgctggtcttgaactcctgacctccgtctacccacctcagtctcctaaagtgctgggattacaggtgtcagccaccatgctcggccatggcctttttttgttttgttttgttttgtttgggagagctaattaattgattctaaggatttgacttaagaactcttatccctagctgctattttatagttaacatcttttataagtgacattttatatgtgtatatagacatttttattaacattattttcacagagcgaagcaaacattttcagttggcaggagggaaagaggagagttttggttttatagcctctctaagatcttctcttgatcaggggacatagctattcctttccattgtttttttttattctgatggaagggagagcatgttatctttttctgcctataactcacctagatctcgtctcacaggactgtactgtccattctgtcattacctaacacctctgtgggtttatgaggatcagcaaaatagctggtctcttatctagttttttcctaagaaggttgtagagagaaatgcagggtagaaaaataagctatgtctgggtgtggtggcaacctcccaaattcccaaagttggtaaccttgggaagccaaggtaggtggattgcttgagcccaggagttcaagaccagcctggccaatatggtgaaaccttgtctctactaaaaatacaaaaatcagcctggtgtggtggcacatacctgtaatcccagctttttgggaggcttaggcacaagaattgcttcaatctaggaggcagaggttatagtaagctgagatcacactattgcactccggcctgggccacagaggaagactgtctcaaaaaaaaaaaaaaaaaaaaaaaaggaaaaggaaagaaaagtaagctattgttttttccttcatttttccacccccaattctcacacttaatttatgtatgcttcccttacaggttatatttcttgaaaagacaaaaatactactttgtaactaaattgtatctttcagggaggtacttctcccatccaagtactaaccaggccagaccctgcctagcttctgccatcagaggagactggcggcatttagggtgttatggctgtagacacagggaggtacttctgaagttaattataaatagttcagtttttcctacctgtattagaagatgccattttcttcttcaccacagtgttttctggttccataggataacattggcttttggaaaactcaccacgcattaacctctagagagagtttgtagtttggtttgggtttgggttttttttttgttttgtttgttttttttctgagatggagcctcgctctgttgcccaggctggagtgcagtggcatgatctcagctcactggaacctctgcctcctgggttcaagtgattctcctgcctcagtctcccaagtagctgggattacaggctccctccaccatgcccggttcattttttgcattttcagtagagatggggtttcactatgttggccagggtggtcttgaactcctgacctcaggtaatctgcctgcctcggcctcccaaagtgctgggattacaggcgtgagtcactgcgcctggcctgttttttttgtttttgttttttaagagacagggtttcattcttattgcccaggctggagtgcagtggtgtgatcatggctcactgctgccttaacttctgggctcaagcaatcctcctggcttagcctctcaagtagctgcgaccacaagcacacgccaccatgtccaacttggtttttaaatttttcatagagatggggtctcactatgttgcccaggctattctggaacttctgggttcaagtgatcctcccaccttggcctcaaaatactgggattaaaggattgagccactgtgcccagctagagagtcagtttttacagatctcttatttctggctgttaagtgtggatcagatagattttgaagctctttggaagacctggtcaggatctgcttatcaatcacttatgtcaacatcatatttactgcacgaggaatgctgtactcttctttcatcctgtggcttcctgggcttgtgcatttcaagattatgccacaccagtgcatcagtctcttctactccacagtccactgctgttgggtagaagaaatttcttttctctcatacaggtagagcagatgaaatgactgtgattaaattttaaatctttatttgttctctgaagattaatgagccagaacgtgaagcagtcatttcagatagttatttttcaagtgtatattagtgtcattctcttaaaggacttgtatttttttttccttttttttttttcttatttctgaatccaggtaattgactgctctgactcaaatggggtaaccataacgtttgtgataaattaagccaaatttaagtatcattttgcagatttatacataggatatttttaactcgatgtataatgctttaagaacctgttgaaccatattgtttaagttttgactgtttttggttagattttgttactaatgcatatgtgtaaaagaaaattcaaatcagtcaaggatacccttattgaagcagtaaaattctataagccgaattgaccatgatttctaccacgggtgctgactttcagttatagtaatctatagattaatcttcagagttatattaatctgtacagattacagaacttcaaaaatttaccataaaattggataagttagttataaatgttcaagattcagtctgtcttctaacatggttatagaatttatggcttatctgtacttacttagaaatgttaattgcataggactaaaatgtttcaaataggactaagattgttagaatttcatcctttgaagggtacactgagtacaaacaatttttgaagccgtaagtcagctctcgatgtaattttacttttattttttatttgttttttttttgagacagagtctcgctctgtcgccaggctggagtgcagtggtgcgatctcggctcactgcaacattcgcctcccgggttcaagcgattcccctgcctcatcctcccaagtagctgggactacaggtgcatgccaccatgcccagctaatttttgtatttttagtagagatggggtttcaccacgtaggccaggatggtcttgatctcttgatctcgtgatccacccacctcagcctcccaaagtgctgggattacaggcatgagccaccgcgcccagctaataattttaccttttataaaaggtaatctcttttcctgattcagaaaagcctttagtcctgcaagctctagctaactttctgtcttttaaattcttccagccaggcgcggtggttcatgcctataatgccagcactttgggaggctggagagtcgcttgaactcaagaggcagaggttatagtgagccgagattgcgccactgcactctagtctggacgacagagtgagactccatctcaaaaaaaaaaaaattcttacaccatgctgtagttctcaatttgatgtagctctctgctctgcgttttcttgcatatgaaccttgtatttcccaatgtttatactattgaaaatactacccggggggttgtatctgtagaagtaaagacacaaaagcttatggggtattatatcttgaagatttaaattcagcttttaaagcatttgacattttatttcttctctttcaaaaaaaaatgtagtcattgaaagaaaatcttgcaaggtgttggacacttactgaagcagagaagatgtcctttgaaactcagaaaacgaaccttgctacagaaaatcagtatttaagagtatccttggagaaggaagaaaaagccttatcctcattacaggaagagttaaacaaactaagagaacagattagaatattggaagataaagggacaagtactgaattagttaaagaaaatcagaaacttaagcagcatttggaagaggaaaagcagaaaaaacacagctttcttagtcaaagggagactctgttgacagaagcaaagatgctaaagagagaactggagagagaacgactagtaactacggctttaaggggggaactccagcagttaagtggtagtcagttacatggcaagtcagattctcccaatgtatatactgaaaaaaaggaaatagcaatcttacgggaaagactcactgagctggaacggaagctaaccttcgaacagcagcgttctgatttgtgggaaagattgtatgttgaggcaaaagatcaaaatggaaaacaaggaacagatggaaaaaagaaagggggcagaggaagccacagggctaaaaataagtcaaaggaaacatttttgggttcagttaaggaaacatttgatgccatgaagaattctaccaaggagtttgtaaggcatcataaagagaaaattaagcaggctaaagaagctgtgaaggaaaatctgaaaaaattctcagattcagttaaatccactttcagacactttaaagataccaccaagaatatctttgatgaaaagggtaataaaagatttggtgctacaaaagaagcagctgaaaaaccaagaacagtttttagtgactatttacatccacagtataaggcacctacagaaaaccatcataatagaggccctactatgcaaaatgatggaaggaaagaaaagccagttcactttaaagaattcagaaaaaatacaaattcaaagaaatgcagtcctgggcatgattgtagagaaaattctcattctttcagaaaggcttgttctggtgtatttgattgtgctcaacaagagtccatgagcctttttaacacagtggtgaatcctataaggatggatgaatttagacagataattcaaaggtacatgttaaaagaactggatactttttgtcactggaacgaacttgatcagttcatcaataagtttttcctaaacggtgtctttatacatgatcagaagctcttcactgactttgttaatgatgttaaagattatcttagaaacatgaaggaatatgaagtagataatgatggagtatttgagaagttggatgaatatatatatagacacttctttggtcacactttttcccctccatatggacccaggtcggtttacataaaaccgtgtcattacagtagtttgtaacatttgtagattggatagcatttttatgatttgatgagtttcttgtaaggttaccgtttct

SEQ ID NO: 1841 - DNA, 6000 bp, Homo sapiens
ctcctgggtttacgccattctcctgcctcagcctcccgagtagctggaactacaggcgccagccaccgtgcccggctaattttttgtatttttagtagagatggggtttcaccgtgttagccaggatggtctcgatctcctgacctcgtgatccgcccgccttggcctcccaaagtgctgggattataggtgcgcaccaccgcgcccagccttaatttttataatttttttgtagggatgaggtcttgctatgttgcccaggctggtcttgaactcctggtctcaagcaatcctcctgccttggcttcccacagcactgggattacaggcataagctaccatatcaatccccagcttttaacttaaaagtactataaaaccatattcaatctactcttcatcaactttttcttttttttgagacagagatctcactttgttgcccaggctggagtgcactggctgttcacaaatgggataatagtgcactgcaacctggaactcctgggctgaagtgatcctcaggccttggcttctcaaggtgggacttcaggtacatgccacagtgtccagctttcagtcaattattaatgttctacctgaatagtgtccctactaaagtttttgaaagtatttttccatgaataaggggactgaaaatatgaatcaaatataaagcaatttaaacttggacaagtcacttagattctctgtgcctaaaatttgtttgtaaaacagtggagcctggattatttgacctctcagatctcttctaccaactccacagaatttattaaccttataaacttgaggcagaatcacagtgtagtatactatgttttcatgttttgctttattttaatgagaatcataagcgaaagagggctggatgtgatatattggaagagtagcacaaggcagcaactatgacctaggttctcatactttatcatttcacctttatttgtatattatctgtaaaactggtaaataaaaatctgccatagttcctatggttgtggagattaaatgaaagaaaatttgatgtaaatggtgaatcactatatgaatgggatcaatttttttttttttttttttttttttgtggagacaaagtctcactctgttgcccagtctggagtgcaatggtgtgatcttggctcactgcaacctctgcctcctgggttcaagcaattctcctgccttagcctcccaaatcgctgggcttaaaggcgtgcgccaccacgctcagctaaatttatttatttttttttgtgagaaggagttttgctcttgttgcccaggctggagggcaatggtgcaatctcagctcaccgcaacctccgccttctgggttcaagccattctcctgcctcagactcccgagtagctgtgattacaggcatgcaccaccatgcctggctaattgtgtatttttagtagagatggggtttctccatgttagtcaggttggtctcgaactcccaacctcaggtgatccgcccgcctcggcctcccaaagtgctggaattacaagcgtgagccaccgtgcctagcctaatttttgtatttttagtagagatggggtttcaccatgatggccaggctggttttggactcctgacctcaagtgatccacctgcctcggcttcccaaagtgttgggattacaggtgtgagccactgcgcctggccaaatggaatcaatttttatcactattttattttattttttgagatggagttttgctctgtcacctaagctggagtgcagtggcgcagtcgcagctcattgtaacctctgcgtcccaggttcaagtgattcccctgcctcagcttccagagtagctgggactacaggtgcctgccaacacacctggctaatttttgtgtttttagtagaaatggggtttcaccatgttggccaggctgttcccaaactcctgacctctgatgatccgcctacctcagctttccaaagtgctgggactacagtcgtgagccaccatgcctcaccaaattttattattttcttttttgcaggtttacctcaatgtatgatcttccagaaacagttctgaaacctacaggttaatgaccttgtattagcataatatggtttgctaatattcacttaatactcataagtttgtagttggcaaagctggaaatagaactcaggttcactgagtgtcatcaatgttattctcatcagatcttgctgtttattctttttgaaactgcttattaatttgctttaaatattaacaacacagatactggataatagtaaatcataagaattttaaaattttgatggtatctcaactgatcagcttttcttaaattttctaggtttcctcagcacaggggaaagctttataggtggaaggtggaggccctgtgacttgcgcagaaaagtaccactgtaatttacttttatgggcacctaagcaggttgcccagggcaacttgtagattttgttgttgttgttgttaatactatctccttcagtcactgagaactcttttttatttttttattttttgagatggagttttgctcttgttgcctaggctggagtgcagtggcgtgatcttggctcactgcaacctccgcctcccggattcaagcgattctcttgcctcagccacccgagtagctgggattataggcatgcgtcaccacgcccggctaattttgtgtttttagtagagatagtgtttctccatgttggtcaggctggtctcgaactcttgaactcaggcgattcgcctgcctcggcctcccagagtactgggccttaaatgctggaattataggcatgagccaccgcgcccagctgagaactcttcttgttatcaaatgaccctctttactactggttctagaatttcgttcagctttggctcaaaacataatgcagaaaacgaaatctagtaaaaacagaagacaaattagctgataaactttgttggcataattagtaccataaaatctggaaaagctaaatcttaaattaaaaattttttagatttccaggataattcacaaatgtttatagattcagaaacaaaaggtccattgctttatactttacatcatagacaaccactgcagttttctaatatgggtttcaccttcttcaaacctgatattcttaaaatgtggagttcaaactgactatagttaagaacgaaacaaatagccaatacaaagaataataaaaggatgagttcaaattatctgccacatgtcatcaacttttattaaatgataaaaaggttaattaaaattgtaaatgatttttcagaagaaattacatcttaaaattggcctgtgaaagtggcttgaaaggtataaaaatctaccagtagctggtattagctttcttagtaatttaattttcagttagagaaagccagaccactttgacctttcgaagtcctttggtatagatacatatacatttaaaaagataaatgaaaacaagccattgattaataatgcccatcgcagaagctgtaattataaaattaagattttttgatgtcactgttgatgttgaatatagttaatagaaaagcaaaaataaaaaataaaaaaggtctaattttgaggcactcttttgtctctgctcaggtccaccgtcttccttgctaatgtttacgtttattattaatttttccatttatttatttacttttaccacaattaggggacagagaatgaaacctaaactttttattgcttctgtaaagagtgaatataaatgtaagattttttttttttgagacggagttttgctcttgttgcccaggctgcagttcagtggcgcaatctcggctcactgcaacctctgcctcccaggttcaagcaattctgctgtctcagcctcccaagtagctgggattacaggcccgcgccacctctcctggctaattttttgtatttagtagagacggagtttcaccatgtaggtcaggctggtctcgaactcctgacctcaggtgatccacccgcttcggcctcccaaattgctgggattacaggcgttgagccccggcgcccggccaccaaatcctttttcaaaacaactcccttctttgacacagtgcaatttaaataagtatacaattaacaaagtacgtttttcttgttcaaaaccatcactgaacagtttgcaacagtagggtatgaatgcatacaatctcgatggtctttacaccttcagaggctattcggacttaaggaaacgtgcatttacaagtgtaaatgtaaaagctcagtagttgccttgtaaagtgcttttcggggttgtggggttgggggtggtaggagtaggtggtgcctcaaattatactagcgaataccaacattcccaaacatctagccctctgcctaaactcacccggttgcggtctgtcattttcgctcttctttgttaattttttcggcaaagtcagttttcatgcagcagatggcaagaaagccggtgaacgcctagggacgtggccttttaaccgcacccaattaaagcagcaaacagaagatgaatagctgggtggatcagtatgtgtaaacctatccgtttaatccggggagctgttttcccgggtgaaaccacgaattctttctggaggttgcaactcgtaaccatagcaactggaagtggtcgccggctcccggatgttgtggggatctgcggccgcctggcccagcttcccgcagccgcccggcggcggcctgcgctccacttcgggagtggtagttcttctcttcaccgctgccgggcaggaggcgcaggcgggactacgcgtcacggcatgcactgcggcgcccagccggtcaccgcctgccggctgcagacgcctgcgagcaggttgtttttataagaggcgtcattggcgcccgagctgtgaccgccgccactggggcagccagcacaatcgggcggaggtggcgctgccccttcaggtactgtactaggcgggcttagaccccgggagggggtttgtgccgactgtctgagtccctggccgacacgctcggctcagtagaggagcagtggcggggtccgcctcctaggctggggctgctcgggcggggacttgacgcctggtgtcagcggccgcacgggcgacctcctcgggccgtgcgcgagtgcacagctccggaggcccgagccgaccctggggcgtccggtccggtggtcttgcagcctccaaaccccgagtgctataccgaactgcgcgccaagggtgggagagctgacggcctgggccacccttcttccttcactgggcaggctttgaggtgcttgtcggtctggactgatgaaaatccatatggtaagatgttatgtgcgtcaccctgccgggtttaatgccagcctgtcttttgatgacatttgagcccccgtgatgtcaggaatagaaagattaaatattaaataatgcccggagacttccgctagcacgccagcctgatgatgatcaaatacctctccatatccttctccagttccagtggcctcctttagctttggtctccctaatcgatttgtcctcattagcagctgtcccatgcagtgccttgtacgcgttgtttatgtttagcactattgggagcgccaagtaaggtattttattgagtggtgaagtttgcactgttctgctctacttttattgaaaaacacagttgggcattcttgtagttagaatagctaactatatagtactatgaattttagatttgtctcctccaatctacaggatagtgcttgaaatatcgctattactgcatcgtatcttttaagattagaatcatattgggtcccacacgtctcaggggatatttatcacacacatccagtgtgaatggtttacttttattttctgagttcaggtcatatagcagaagatggagatggtgagggtattattttaattcatattttttttttttttgagagagggtttcgctcttgttgcccaggct

SEQ ID NO: 1842 - DNA, 6000 bp, Homo sapiens
aatgacctttgaaaccaagtgttttagtctagttacaattatggaactgtcaggaaggaaatttgtgaaaatgtaatcctttatcacttacaatactgcaacttcctcatcttcaccacaaagaaacacaaacataattcagcctccagcagttctgcactgttagatgagtctgcattttttgtttaaagtaccttggacttaacaggccttgctgctgtgttcatgttcttaacatgttcaaaaactactacttccatgattttagcagttcatatgcacctaatttttaaaagtctttctttaacttgcataagaatataattatacaacccatacaataatactgtggaatgagttagtaaatcagacatgttaatcaattatgaatttttcttatgccctgtgaatagacccaaagcctaataacatattgagccaactcagtacacagaatatacaaaattataaggtaaaaaatattgaaaagaaattgacatttggagtaggcaagctccaaagaagacaacctaagaaaataaagtatgaacaccacaacctgaaaaacaacgtgttaccagtgttttttgtaaaacactttagaatagatattttatccagtgttaatggacacttggtgttaaggtaaacccccttaatttttaagggctgatagtagccaaaaaaaagaaaaatgtactgtatattactgtggaagaacaatgtagccctttacaacagaaagcaaaatgtgggctaatgattgattatactacttaccagtccatatccaacataaccataacaaaaaataaaaacaaaaatagacataagccaaaatatcagacatataaaacatggttctgaacgtgattcaatgttgacaagtttaagattttccaggcttaagtgaagaaaagctaagtactttcacctctgatttaactgtacaaagtgaaaagaaaccagatcaaaagatgggatgtacaggccagacatggagctctcatgcctgtatccagcactctgggaggctaaggcaggaaaatcgcttgaacccaggagttcaaagagaccagcctgggaaacatagcgagaccctgcctctacataaaattttaaaattagggccaggtgcggtggctcacgcctgtaatgccagcacttcgggaggcccaggcaaccggatcacgcattcaggagatcgagaccatcctggccattatggtgaaaccccatctctactaaaaatacaaaaattagccgggcatggtggtgtgtgcctgtaatcccagctacgtgcctgtaatcccagcactttgggaggccaaggcggacagatcacttgaggccaggagttcatgaccagcccggctaacatggcaaaacccagtctctactaaaaatacaaaaattaggtcaggggcagtgggtcacgtctgtaatcccagcactttagaaggctgaggcaggcggaccacctgaggtcgggagtttgagaccagcctgaccaacatggaaaaaactctgtctctactaaaaaatgcaaaattagccgggcatggtggcacatgcctgtaatcccagctactcgggagggtgaggcgggagaaccacttgaaaccaggaggcggaggttgtggtgagctgagatcttgccatagcactccagtctaggcaacaagagcgaaactccgtctcaaaaaaaaatttagtggggcatggtgtcacatgtctgtgacatgtgacagctactgggaggctgaggcaggagaatcacacttgaactcagcttgaatcacactgtaatcccagctactaggaagcagaggttgcagtgagccgagactgaaccaccatacaatagagcaagactctgtctcaaaaaaagtaatagccaggcctaggcctggtgacatgtgcctgtagccccagctatgtgggaggctgtgttgggatcacttgagcccaggaggctgcagtaagtcgtgtccaggccactgcactccagactaggtgacagagcaagacatcatctccaaaaaataaaatgagatctacaaatgctacaaattgtcggatctgttattttcttcgagtccaactatttcatttattgtccctactctccaaataatttacacttaaattcatatagtctacagatgcagcaacagggactttgcctgtgttttttactgttgttgcttatttggtgtttttgagacagtctcactctgtcacccaggctagagtacagtggcatgatctcggctcactgcaacttctgcctcccgggttcaagcgattctcctgcctcagcctcctgaatagctgagataacaggcatccgccaccatgcccagctaatttttgtatttttagtagagacggggttttgccacgttggccaggctggccttgaagtcctgacctcaagtgatccgcctgccttggcttcccaaagtcctgggattacaggcatgagccactgctctaggcctttattttctttttaaagtaatgttcatagagtccataactggaattgctgctttttttttttttttgcataagggtggggctttccactagaaagtgaaaaaaatgatatagaaactctcaaagtgctgttaatacttgcatccttttttaaaagttttttctacagaaaacttgaaaaatacaggaaagtacaagaaaaatcatttctagtttcactatctacacttttataactgtgaatatcctttatttcttttctttctttttctctttttttttttttgtttttttttttttgtttttttgagataatctcactctgtcacccaggttggagtgcggtggccagatcttgtggctcactgcaacctccgcctcccgggttcaagtaattctcctgcttcagcctcccaagtagctgggtttacaggctaatttttgtatttttagtagagacggggtttcaccgtgtcggccaggctggtctcgaactcctgacctcaggtgatccacctgcatgggcctcccaaagtgctgggattacaagcctgagccaccgctctggaccctttaagtcatttctaaaagaagttatgttcactttttgttccatggtttacaaaattgcaattacactattttctaaactgttttcatctaagaaggagtatttcccacacctttaaattgtatttgggctgatttttaatcagcttttttgactgaaattccgccctcagcgtaaaaggttaaaaattatgaattaacgcccgcgcggtgggtcacgcctgtaatcccagcactctgggaggccgaagtgggcggatcacgaggtcaggagtccaagaccagcctggccgacacgttgagacccccccccccgccccgccgtctctactaaaaatacaaaatttagctgggcgtggtggcgggcgcctgtaatcccagatactcgggaggctgaggcaggagaatcgtttgaaactggaaggcagaggttgcagtgagccgagatcgcgccactgcactccagcctgggcaacaagagcgaaaccctctctcaaaaaaaaaaaaaatatgaattaaaataataccctcaccatctccatcttctgctatatgacctgaactcagaaaataaaagtaaaccattcacactggatgtgtgtgataaatatcccctgagacgtgtgggacccaatatgattctaatcttaaaagatacgatgcagtaatagcgatatttcaagcactatcctgtagattggaggagacaaatctaaaattcatagtactatatagttagctattctaactacaagaatgcccaactgtgtttttcaataaaagtagagcagaacagtgcaaacttcaccactcaataaaataccttacttggcgctcccaatagtgctaaacataaacaacgcgtacaaggcactgcatgggacagctgctaatgaggacaaatcgattagggagaccaaagctaaaggaggccactggaactggagaaggatatggagaggtatttgatcatcatcaggctggcgtgctagcggaagtctccgggcattatttaatatttaatctttctattcctgacatcacgggggctcaaatgtcatcaaaagacaggctggcattaaacccggcagggtgacgcacataacatcttaccatatggattttcatcagtccagaccgacaagcacctcaaagcctgcccagtgaaggaagaagggtggcccaggccgtcagctctcccacccttggcgcgcagttcggtatagcactcggggtttggaggctgcaagaccaccggaccggacgccccagggtcggctcgggcctccggagctgtgcactcgcgcacggcccgaggaggtcgcccgtgcggccgctgacaccaggcgtcaagtccccgcccgagcagccccagcctaggaggcggaccccgccactgctcctctactgagccgagcgtgtcggccagggactcagacagtcggcacaaaccccctcccggggtctaagcccgcctagtacagtacctgaaggggcagcgccacctccgcccgattgtgctggctgccccagtggcggcggtcacagctcgggcgccaatgacgcctcttataaaaacaacctgctcgcaggcgtctgcagccggcaggcggtgaccggctgggcgccgcagtgcatgccgtgacgcgtagtcccgcctgcgcctcctgcccggcagcggtgaagagaagaactaccactcccgaagtggagcgcaggccgccgccgggcggctgcgggaagctgggccaggcggccgcagatccccacaacatccgggagccggcgaccacttccagttgctatggttacgagttgcaacctccagaaagaattcgtggtttcacccgggaaaacagctccccggattaaacggataggtttacacatactgatccacccagctattcatcttctgtttgctgctttaattgggtgcggttaaaaggccacgtccctaggcgttcaccggctttcttgccatctgctgcatgaaaactgactttgccgaaaaaattaacaaagaagagcgaaaatgacagaccgcaaccgggtgagtttaggcagagggctagatgtttgggaatgttggtattcgctagtataatttgaggcaccacctactcctaccacccccaaccccacaaccccgaaaagcactttacaaggcaactactgagcttttacatttacacttgtaaatgcacgtttccttaagtccgaatagcctctgaaggtgtaaagaccatcgagattgtatgcattcataccctactgttgcaaactgttcagtgatggttttgaacaagaaaaacgtactttgttaattgtatacttatttaaattgcactgtgtcaaagaagggagttgttttgaaaaaggatttggtggccgggcgccggggctcaacgcctgtaatcccagcaatttgggaggccgaagcgggtggatcacctgaggtcaggagttcgagaccagcctgacctacatggtgaaactccgtctctactaaatacaaaaaattagccaggagaggtggcgcgggcctgtaatcccagctacttgggaggctgagacagcagaattgcttgaacctgggaggcagaggttgcagtgagccgagattgcgccactgaactgcagcctgggcaacaagagcaaaactccgtctcaaaaaaaaaaaatcttacatttatattcactctttacagaagcaataaaaagtttaggtttcattctctgtcccctaattgtggtaaaagtaaataaataaatggaaaaattaataataaacgtaaacattagcaaggaagacggtggacctgagcagagacaaaagagtgcctcaaaattagaccttttttattttttatttttgcttttctattaactatattcaacatcaacagtgacatcaaaaaatcttaa

SEQ ID NO: 1843 - DNA, 6000 bp, Homo sapiens
aaagcttatttggtgcaacgacttggaatgcccccaggtaagtgtatttgttacctgttttgtaacaaaccacccccaaattgagtggtttataaaacacatttatttgctcacagttgcgtgatttgggcggtgctgggcaggcatagctcatctttcactgtggtatgacgtttcctcatgtggctacattcagctgcaagttctactgagacagtgtccacgtggcctcaccttgcatatctgacgcgttagctgggatggttaggacaggtgataatgcgctgggcatttctctcaatgtcatctctagaaaggaatagcttgggtctctatggtggtgacgcaggactccaagggagaaataaactgcttcctaagacccaatcctgttactggaacagcatctcttctttcacattctgttggttaaagtaaataacaaggctagcccaaatttaaggagagagaaaatagattacacctgttcacagaaggcactgcaaaaaaaaaaaaaaaaaaaaaaaggggggcactctttcatccaccacagtgaggtaaaacaagccccattgttttgttagaatacctagcacaagctttctgaacgcatttacttctccccccaaaccaaagctttgcatatagagaagcgcatgtgcaaaatgatttatattctcagaggaatcagcagtgaaagaactttccgtttcccagtgtgattgatttattattattattatttttttgagacagagtctcactctgtcacccaggctgaagtgcagtggcgtgatcttggctcactgcaacgtccgccactcagcctcccaagtagctgggactacgggcacacgccaccatgcctggctaatttttttttttttttttttgtatttttagtagagaaggggtttcactgtgttagccaggatggtctccatctcctgacctggtgatccacccgccttggcctcccaaggtgctgggattacaggcatgagccaccatgccaggcctcctagggtgatatttgaaaaaaagaaatttatggatgggctgggcatggtggttcattccagcactttgggaggctgaggcaggaggatcacttgagcccaggagttcgggatcagcctaggcaacatagtgagacccccatctgtacaaaccatttaaaaatcagccagccgagtagtcccagctactcgggtggctgaggtaggaggatcacttgagcccgggggattgaggctgcagtgagctgtgatcacactgctgcattccagcctgggtgacagagggagaccctgtctcaaaacaagaagtttgtgtgtaaggttttaggttagttacagtgagaagtacaaaataagaaatattatcttcatttttaacacctgtaatctcagcactttgggaggccaaagccggaggatctcttgagctcaggagtttgagaccaacctggcaacatagcaagacctcctctctacaaataaaaaaattagctcggtgaggtggctcactcctgtggtcctagatcctcaggaggctgaggtgggagaatcacttgaacctggctggtcaaggcttcagtgagccatgattgcaccattgcactccagcctgggcaacagagcaagacgccttctcaaaaaataaaaaataaaataaaacgtgttaatacagattcaattactcaattttgacaatgtcaagtcggttaataaaagcactatgcccagcctaggcaacacagtgagaccctgtctctacaaaaatttttaaaaattagctgggagtggtggcatatacttgtagtcccagctactcatgaggctgaggcaggagaatggtgtgagaccaggagttcgaggctgcagtaagccgtgactgcaccactgcactccagcctgagcaacagagcaagaccccgacaaaaataaataaataagaaagcacctttaccgttcataaaaaagccctatgagtaagcaagcattgtcacttttatggttgtatcttttgataacatatcaacataaagcaaaaatattttacaacttcagtgcactaaaacatctatttttcttttccaagacttttccataggatacctagtttttagttatgggatgattatggataggctaacatcttttcacatagtagctgcaattattcctgtttcacctaagaggaaacaagttcagaactgtcagatgccctccaaccaatagggattgaggcaatttaggaatttaactttacataagtctcgtccaaccacactgattattcgtccccaagtaacagaaccatttaagaatgatgggaaagctcggtcaaatttttatttatttatttttgagacagagtctcactctgttgcccaggctggaatgcagtggtgcgaactcggctcactgcaacctctgtcttccaggttcaagcgattctcctgcctcagcctaccgagtagctgggattagaggcctgcaccaccacgcccagctaatttttgtatttttaatagagactggtttttaccatgttggctaggctgatcttgaactcctgacctcaagtgatccacctgcctcagcatcccaaagtgctgggattacaggtgtgagccaccatgccaggccttcagattcttaatggaacctgatatcatgggtgttagatcactcctttcctcttttccttctcttttcccattaatctcactttttcctttcctgtttctttttctgtcttgatcttcacctgcttctttttacaagggcaacattaatactgttctctttggactgtgctaatcctcccactcttctgctcaagactggtgtcacaccttgtttttcattcttaaatcttacatacatcataagatcatttattagatgaatattttttaattaatacacttaaattttatttcagtagcttttgggatataagtggctttctgtgatgtgggtgaattatatagtggtgaattctgagattttagtgtgcccatcacctaggtagtgtatattttatctaatatgtaggtttctatccctgtctccccttccaccctccctcttctgagtctctaaattccattatatcactgtgtttgcctttgtatattcacagcttagctcccacttacaagtgaaaacatacggtttttggttttccactcctgagttacttcacttagaataatggcctctagctccatccaggttgctgcaaaagacattattttgttcctttttattgctgagtagtattccatggtgtatatataccacattttctgtacccactcggtcgatgggcacttaggttggcaattgtgaattgtgctgctgtaaacatacatgtgcaagtgtcttcttcatataatgacttcttttcctttgggtagatacccagtagtggaattgctggaccaaatggtagaactactttttgttctttaaggaatcaccatacttttttccatagaagttgtacattcctaccagcagtgtttaagcattcccttttccccacatccacgcctacactgttttttgactattgttttttgaggttttttttcttttttagacagggtttcaatgtgttgcccaggctggagtactgtggcacaatcatggctcactgcagcctcagactcatgggatcaagggatcctcctgccccaacacacggccccccgccccccgccccccgcccccctcccagtacctgggactacaggtgctcaccactacacccggctaatatttgtatttttgtagagacggggttttgccatgttgcccaggctggtcttgaacacctgggctcaaatgatctgcccaacaggcctcccaaagtgctgggattacaggtgtgagccactgcgcccggcctttttttctgactttttaatgatggccattcttgcaggagtaaggtggtatctccttgtggtattaacttgcatttcttcgatgatcagtgatgttgagcattttttcatgtatttgttggccatttgaatatcttttgagaaatatctattcatgtcctttgcccattttttgatggcattattttctttcttgctgatttgagttccttctagattctggacactaggcctttttccgatgcatagtttgcaaatattttctcttaatctgtggttgtctattatttcttttgatgtgcagaagctttttagtttaattaggtcccatttatgtatttttgtttttgttgcatttgcttttggggtcttagacatgaattctttgcttgggctgattattagacgaacatttattgagcaccaaccatatacgacaaacgatgtactaggtgttgggaatacaatggagaacttacatgaatcaccagtcacacaaatctcttttatctttttttttttttttttgccttacttgagaatttgggtttttgagtaaacgccattattctctctttttttaagcacacttttgcatctcaaccacctaacacactgcatccctgagcaacccggaggggccggttcctgcacccaggccaacacaacttaaaccccaacacaccagaagaggaataaaggccaaccaacttccgcccacccactacaaacgtcgagagaaattcgtagatgaggccttgtcaaaattcagaggcgtcctacgtctgctttcccaatgagacagttcctttttgtttgtctcagagactggggtttttttttttttaaaagactgtaggcagaaaaaacaccccaaccggctgttgtgacaatcaaacgtgtctaagaaaattcagccaatgagagtgcgagagtgcatcttgtgttggccaatgagaacagcgacccgtgcgcagggccgcccaatggggcgcaagcgacgcggtatttgaatcctggaacaaggctacagcgtcgaagatccccagcgctgcgggctcggagagcagtcctaacggcgcctcgtacgctagtgtcctcccttttcagtccgcgtccctccctgggccgggctggcactcttgccttccccgtccctcatggcgctgctccgacgcccgacggtgagtgtgcccggggaccgctctcagaggcgagtccgtcggccccacagctcccctgtcgcttctctcatctgctccgagcttctccgtcccaaccggggctgcttttctcttctccggagctcactgcttcgcccgcgtccctggccctgcggccggtcctctccggcccgcctttccccgtctggattccgccctcccctaacccctccctgccccggggtgggagaagtgtaggaaagcgcttccgagatggcgcctgtcaagtgagcccccagagcactaggcctagtactcagcgagcgatccccgagtgctcttcattgctagagagttatctacttccacgttcctgggatttccctccccctttcttacaactccttgccaactaagggacctgtgatggcggctgggaggaggactggaagggttctgtaggcagtaaagtgtacggcgtgtttcatcaggcaactgccaggctgtttttcagattgttcacatttctttttgtatgagtttcccatttatttcggcacgctaagtcttccatgctacgttcactaataaatgggtttgtccccttaaaaaattaatttctttactcaaatgtaacagaggtttttgaatataatttggaccaatgtggcagactgagagaaaagggtccaaattcatttatttcatccttgcagagatcaaagtgttatggtgttttgggtatttttcctgtgggcttgaattgtaccgggacctacttttttcctttgccgaaagctagagggccctgacacacctgagttccatcatcttggctataaggttagataaaagctgccaattttcctatccagatgaatttaaattgagtcacattaccaggcttctacccat

SEQ ID NO: 1844 - DNA, 6000 bp, Homo sapiens
caagatcccaaggcagtgctgtctccattttaccacctcccctcaaacactcggggcttcagcagtttctggtcattggtgtttactgggttcccacagctggacttgcttatctgggtgtttggattaatatatgatttcgaatttgtgtagtgtcagcccctcttcaatgatttggataagactcgcctggtccaatttaacagtttctaataaagttaaacttaccgtaagacccacaatcccacccaagagaaataaaaacacacctacataaagacttttacacaaataattataccagtttcataatctccagaaagtagaaacaacctaaatgtccaactggtgaatgaataaattgtcctgcattcatacagtggaatagactcagcaacaaaaagggaacaaattactggtacatgcaacacattgatgaatatcaaagcattatgctgagtgaaagaaaagacattctggaaaaggcaaaagtatagggaagaaaatcagaaaagtcgttgccaaggcctgggagtaggggcagcccagagaattttccactgtgatggaaatatacgtttgattgtggttacagcacactatatatttgtcaaatacacataacgatacaactaaaaagggtccattttactgtatgtaaattatacctaaaatacttgactttagaaagaaaaaagcccctcagttctcttctccccaccctcctacgcgcactcctgatctggatctctaattctatggtaaaatgcaaatcttttaatggctataggtagccctttgctatttttgaatagaaaaatgatgtaattatttggtagttttaaggaaattaataagccagagaactttaatacagaagtgagggaggaagaagaaactggcctgaagagaagctggaggtggtgcgatgtaactgggtcctcaactggagcgttctttgaagggatgattcattcatcccttcaagccatgtatggggcacctgcactgctaggcactgggcatgcaacgatgccatctagtgaggctgtggggataagccagtagaggagacaggaatgaacagtgactgccaattggaatgtgagtgctgaaacaagtcaacaggtgcagtgagtgggaaagggcagttttgggggcgtgggggctgtaccacggggcccagtatccacagcagggtagctggcagatctgcagagaactgaaggcaaggcattgtcagaggaaaggagggaggagagcgtgacagcacagagaatggcgtgtgagcccagcgtgttcagggcactgcagttcaacatgactagaggggacagggggcagtgatgggtgatgagccccagaggaagcgtctcagggccctgtggtgggtctccaacaatggggaaccactgcagagtttcatataggtatgtgacataatcagatccatgatttagagatgagcaaaatggaaactgaattggaaagtggcagcagagaggcctgttaggagactgctgtctttatcagacaagagaagatggtggctgaggagacagagaaaagtggagcagtttggaggtttggctacttagtaggtagaactgttaagatttagtgattgaatattgagacagaagaagagagaaaagctaacaatgttgctttagactctggcttggtggatgccatccactgagagggagcaagtttgggagaagagattagaatgtgttagatgtgagatgcttgtgggatatcgaagtggagaatccagaagacagctggatatatggctctggagctcagaagagcaaacatgaatgggatgtgaagccatatgagtgcttgagagtgcctagggaaaaggcacacctagtgaccagctctaaaccctgagccccaacatttaagggagaaaaaaagaactcacaaaggagactgagaaagaagggctagacagctaggagaaaaaataaaggcatgggaagaaaggaatgggcaacattttttagtgttgttaagaagccaagtaagacaaaagtcaaatagatttagcatcaaggaagtggtaattttggtgacaagagttccaatggagtctgaggtagaagctaaactgaagagcaactaggatataagtagtcagcaaccaagcccaattcctaaatgataaaaattccaaactctaggccaggtgcggtggctcacacttgtaatcctagcactttgggaggctgaggcaggtggatcacttgaggtcagaagttcaagaccagcctggctgaggcaggagaattgcttgaaccccggaggcggaagctgcagtgagccgagattgcgccactgcactccagcctgcgtgacagactccgtctcaaaaaacaaaacaaaacaaacaaaccaacaaaataccaaactctagcttgacaacaaagtcctaatcattcaaagacttcaacataggaagcaaagcaataaaagcactaggaaacaaaaaatgagaaataaaataaaaaactcagaatggatgtatttttccagtatgacacaaaacagaagccataaaagaaaagacggattaatctgtctacctgaaattttttccaagctgtcacaaaacatatacaaataaaaataaccaaaatgtgaaaaataaaagtatttaaactcgtattttggatgaggaccaatttttttttaatataagaactttcacagatcattaagaaaaacgaacaaccaatagaacaaagaggcaaagaatatgaacacagttgatagagaaggaatcaaaagggctctaaaatatatgaatagacaacatttatctgaaaataaatgaaaaatttaactacatgttttttctcaccaattgatatgagatatcaatagattggtagctactgaaaagtttgataacactttgagaattgtggagaaataggcactctcatacaggctggtgggagtgtacatttggacagcttttatggagaatgatttgcaatatctgtgaaatgttacacatatgtatactctttgactcagcaattctgtttctagaaatgtttcctacatatttacctgcattgtataaatttccacattcattcactatagctgtatctgtaataggaaaagttggaaccatcctaatgtgcaatgtaggggtggaaaaggtgtgatacttttctttacccatcttaagggtcacagctgacactaccataacaaaaaacaggttagcaagataaatggataacttattgaatcacagttttatgggatgtaagtgccttcagaaatgaagacccaaagacccagggaaagctgtccatttttatgcttagatgagatgaagaatggacagctgtgtagaaatgtgattgtacaaaaggagtatgatctaatagtaacagactgaaggaggaatccagcaagtcctgtctgttcagattcttcttggcctctctgtgcagctttccttcttcctgagtgtagggcaagacccttttggaacgagggtcttatgacaaggtacatcaaagaatgtctttatggccagctcttacacaaaaaggtgggggaaggctagattaatatttctaggtttttctagaataatgtttctggcttgcttgggagaaaaggggttctagtttccatgacccgccttggggaacagaaattctggtttctattatttgctttaggagacacagaggggtgggagacaagagggcaggagaaagtcagagacagactttgcttttaaggcttctctgaggcactttcagtcttctttagttcaaagcactcagtgtgccaaagagccatactctggggtgtcgtttcctgagcaccaacaatattggccaaggacattgtgactatccttaccagtgctgtggtcctttaggaagttgagaaggggctagagttccatgagagcccaggtgtagatgtgtatttggtagtcatcggcttagggtcaaagacagaagtgatatagaatcagttcatctaaggcaagagtaggttcaaaaggttgccccttaagggtaaggaccaaattttattcatctccgtaaggccaggatcaaacacaatcaagatttgataaaacaggccgggcgcagtggctcacgcctgtaatcccagcactttgggaggccaaggtaggcagatcaccttaagtcaggagttctagaccaccctggccaatatggtgaaacctcatctctactaaaaatacaaaaattagctgggcgtggtggtgcgcgcctgtaatcccagctactcgggaggctgaggcaagagaattgcttgaacctaggaggtggaggttgcagtgagctgaagactgcagtccaggctgggcgacagagcaactccacctcaaaaaataaaaaaggaaaaaaaaaagatttgataaaataatgtacatataggacagagctggagggaaacccaggaaaggtgaatcagagagagaaaagacgccaagataatgtggtgacttgggagccagagagacggagcctgagacttggagcagggcacagcacaggaatacaacacttttcaccagaacgacattccgacctctgaatcaaccctggaaaggcccttccattgaacttcttgtgatggaggaaaagaaaccctcagtttcgtcatcgcaaggcggaagagtttaaataccatacctcaagatctccctccagccctgacacgcgactccgcggccctttcagcgtcggtcgcctaggagacaagcgccacttccggcagcgaagtcacttccgcggaggtcctgcctctccctgcggacgggcgctgattggcccgtttgaaatgcgccaggcgggagctcacctgggctcttagcgtcgccgccggcttcgcagagcaccgcgccttagccgcgaagttctagttcttgctgccggtcctaacgtcccgcagtcttcgccagccagccgtcccgcatgcgcgtttgggcggcgtggagcctgctgccatgaagtcagcgtgagtacgaggccgccgagcagggagagagggcggacgggggccgaggcctcggggctgggggcaggcgtctccactcaggccgcggccgtacgcgggcagcgcggacagcatcccgcccggtgctgctgcggccgcgaccccaaagtgggaacctccacgtgtggccgctccgcgggagcctgggcgcggagacccctgccgcgtcgccccccgccgccccgcctgggcctccaaggggccaggaagggtcggcccggagccggggttgttttacgccgcacccggttcccgggggcggggcagtcctcctcggggtcccgggacagcctttcccttctccctcgctggctgccgccgcctccagagtgcagttggccaacttagtgcgggtcggaggtggtctcgtgtgtggagcagagcgagtgtgctgggcattggttagatgggctccgtttctggagagccctggcaccggtgatcgccgctagcttttttttcagccgagcaccctgtccttgaggccgagcccatccgcttacacaggccagttacttctgctgtattttgtggccgcagagaacctccgcccacattcctaagctaatattttcggcgcagcatcattcctgggtaaagaaatatttgtcgtgcaaaggagaggattggctttattaccatttagggagtcgtttgcaaaagacaacttgtttattaagaggccgaagtcaaaatctttagatgaaaaaaattatatataagaaatatacgttgagtttaacttaagcccaccacaaagtattttgcactgaataacacgaatttgcttgtgtttcatctgagaatatgtttggaaaaatatttttaaactacagtcgaagccaataatcttacttaattttaatgtgttaaatgtatatctagcctatagataaatgtgaagggaaaaagatgagatgc

SEQ ID NO: 1845 - DNA, 6000 bp, Homo sapiens
tgctgggattacacatgtaaaccatcatgcccggcagcaatgctcttttcattatacaatgttgccttctgtcagaaagcagtgactatttttaatccccatcaaacctttttatacctactcgatacctactcgatacctatatttatacatacttgaaatttacttaaagaagtaaaactcagtaaatcagtgtttaactatattatatccttaaagacctgctcctccaaaaaaccctcccagaccattcattcttgctgaagccatatttactatttgatgaacagaacatataaggtacatattccctggaagtttacattatggtagaggaaagacaataaacaagtaaacaaatagattgtggttaagtaatgtaaaggaggcatacagagtacagaccaggggagaggggttgtggggtgctgtttctgattgggtagtctatacaacccgaggaggtgatatttaagctgaaacccaacgatgacccatgctaagacccagaaaaagagaagtccaggttaaggcaacagctaacagccaggattctgccttatccaagaaactcaaaggattggatgaatactaaaagatgaatgaaggtggagagacagatgggagacggatgaagcaggattttgtctgttcaaagattttattctttgaaaggttttgaacaggaaaatgagattttatgttttaaaagatcactgtctgctctgtagaaatggattagagaagattccaagtggaggcagttgggctttggaagtcttgtcaatgatacccaaagcacactcagcaaaccaatgccagtctgagattggttaccagactacttaaatgtttagaaagttgttttttgtttgtttgtttctttgtttgtttgttttttgagatggagtttcactcttgttgcccaagctggagtgcaatggcgcgatctcggctcactgcaacctccgcctcctgggttcaagtgattctcctgtctcaggctactgagtagctgggattacaggcacacgtcatcatgcccggctaatttttgtatttttagtagagacagggtttcatcatattggtcaggctggtcttgaactcctgacctcaggtgatccacccaccttggcctcccaaagtgctgagactgcaggcatgagcctccatctggcactgctcaattatcagtatttcagcatgtattcaataggctcatctctatgaagagattatgaactagttccctattgtctaactcacacgggcagttccatctagcacaagttgtacaaaagtctcagctgtgacgcattaaaaataaaaaagctactccttcattacagtagctctggtctcagtgattaataatggggctcagactagggtggtggcagtggagatggaaatgaaaggacagtttcaagacacatgttggaatataactgataggagctactaatgaactagttataaggagaggcaagtaaaaggtaggtaccaggtttctggcttgagcaactggacacacgatagtgccattccttgagaagaaaacaagggaggaagtatttagagagggaataagaaaaatcaagaactcctttttgggcatgtaaaatttgagatgcacatgtgacatccaagcagagatatcaagtaagtggttgaatgttgagagccagagaaaaggtttcagctggagatacaaggagagctggagggggagacaggagagtgctgctgacaaacaggttaaaatgaggatgaagaggtatacatcaaatttagcagcaaagaggccactggtagtcttctgaagagcaatttcacaggaatagtaggcacaaaagagtgagtgacagctagaagtagaaatggtagcctgaattaatcctactgcattcccacggtcccctcatctttagcacatctaactttctgtcttatttatatgagaattatttgtttaccatatatcttaagttataaactttctaaaggcaaggagtatgtcatgctcttttttttaatctccttccaccctccaactattagcttagcacatttgctaaacaatatttttgagctgactcaaaactttactaaaaataaaaacactgcataggaggttgatgcaagtaaacaatgtctattattaaatgttattttcatttccacacatcaagttgtatatataaaactgcctagcacaatcatgtatcattccacattaaatcatccctaacacatgctctaagaaacaataatactcagtgtaagaaattatctgctaaaagcaatcctctaaccccagcataccaaaggtatgtctgtgcatcccagaagtcaaaaacactttagatacagtggttataatgaagtaaataagtcttttgaaaatgtgggctcacaaatgaactttgttacatctaaaaatctagaagtcattcaggaaacaacatattgagtaaaaacaacttggtccaaatcagaattacctccttatagtctccatttcggttgagtctgtagccctcaggagtatgaagctgaacagttgtattattgatcacttctatgcaacactcttgatcaggaaagcccagtgggcgcaccctacagtatacctgaagaaataggaaggtgctttaagaagaaagttcgaccttttgcctgatttttcacttaagcttctcattcattcattcattcaacaaacattcagtctctcaatttaagagctctgtatctccaagggctaagaaaattaaaatctgctacttgagattgacaaatacaagtatgtattagatatgagaatactttaaatacacacaaaattaaaataaattttaataaaaatcaaattgcagtgtattcactattatattgtacacaaataatagttatactactactaatatctctaaaagtcaacaacatgtcacacgagatttttaaaactgttagaatttcttggaaatggatgtcaatttaaaaacttgtcagcttaacccaacatttaatatacaaagacatttttatttatttatttatttagagacagagtttctctcttgtcacccaggctggagtgcaatggcatgatctcagctcactgcaacctcctgggttcaagcaattctcctgcctcagcctcccgagtagctgggattacaggcacccaccaccacacccagctaatttttgtaattttagtagagacagggtttcgccatgttggccaggctggtctcgaactcctgacctcaggtgatccacccgcctcagcctcccaaagtgctgggattacagatgtgagccaccgcacccagcctacagagacatttttgaaagcaggggagggggcttgaggaaaactcattcagctgtgtgcaaagcacccggttcccttaactcagagccagggacccactccagtggcaacgagggatagatttaaaatacctcagagcaaagaaccctttttgtttgccatttgttgttttgttttaaaattcttattctttttgcctgcttcattttttcttcataatttaactgaattaaacttggtcccaagaagtttggaactctcctcatgccatcagttactgtatggcatgaactcagttcatattctctgggatgaatatgaacccagttggagatttttaattatctaactctccaaattataattacagaaggtatgcagttgacaaccaaagacttcattttactggactaatttaattaatcttatagagaaaatttcacagctagcactagttttacacaatgtagtacatccatttaactaaatgttctttgattatacttccacatgtcttcttctttcccttccaagcatacacataagacagaaaggactgaagagataagtttcttaaacaccacacataaatttacagggataccttaccccaactgggtctttaaggttcgtttgggacccttttttcacggtaggtttccggggtgtcttagctctcctggtcatagattaaaaaataataataacttttttttcagttcaacacgaatacaaaagcctcacctaaaacttatacaatctttctaggttatctgtaaattatcccttagcagttgcaaaacactgcatcccaaataacattaataatcatagtagcagagtgtttgtggcatgcgtaatccaaaagtaattaaaatttgctttagaatacatttttggtaccaaagctacctacttattctctgattagttctatacttaaaatggcttgcatattttcttgagcaacaatttaacagaggcactacaaattataactgcccacactttacagactgacaagcgattaacttcaatacactataaaaatgcacatggaggaaaccattctttcgtcaagggttacgcctgtactttcaaggaacaaccagtcattgaatgctcaaaacattactctttgtctccaaacaaaatctggtcccaaactgccaatttcttggtttcttaagtaggggcaatcaaaaagttattttgattgatttcaccatttctctagcatctcatctttttcccttcacatttatctataggctagatatacatttaacacattaaaattaagtaagattattggcttcgactgtagtttaaaaatatttttccaaacatattctcagatgaaacacaagcaaattcgtgttattcagtgcaaaatactttgtggtgggcttaagttaaactcaacgtatatttcttatatataatttttttcatctaaagattttgacttcggcctcttaataaacaagttgtcttttgcaaacgactccctaaatggtaataaagccaatcctctcctttgcacgacaaatatttctttacccaggaatgatgctgcgccgaaaatattagcttaggaatgtgggcggaggttctctgcggccacaaaatacagcagaagtaactggcctgtgtaagcggatgggctcggcctcaaggacagggtgctcggctgaaaaaaaagctagcggcgatcaccggtgccagggctctccagaaacggagcccatctaaccaatgcccagcacactcgctctgctccacacacgagaccacctccgacccgcactaagttggccaactgcactctggaggcggcggcagccagcgagggagaagggaaaggctgtcccgggaccccgaggaggactgccccgcccccgggaaccgggtgcggcgtaaaacaaccccggctccgggccgacccttcctggccccttggaggcccaggcggggcggcggggggcgacgcggcaggggtctccgcgcccaggctcccgcggagcggccacacgtggaggttcccactttggggtcgcggccgcagcagcaccgggcgggatgctgtccgcgctgcccgcgtacggccgcggcctgagtggagacgcctgcccccagccccgaggcctcggcccccgtccgccctctctccctgctcggcggcctcgtactcacgctgacttcatggcagcaggctccacgccgcccaaacgcgcatgcgggacggctggctggcgaagactgcgggacgttaggaccggcagcaagaactagaacttcgcggctaaggcgcggtgctctgcgaagccggcggcgacgctaagagcccaggtgagctcccgcctggcgcatttcaaacgggccaatcagcgcccgtccgcagggagaggcaggacctccgcggaagtgacttcgctgccggaagtggcgcttgtctcctaggcgaccgacgctgaaagggccgcggagtcgcgtgtcagggctggagggagatcttgaggtatggtatttaaactcttccgccttgcgatgacgaaactgagggtttcttttcctccatcacaagaagttcaatggaagggcctttccagggttgattcagaggtcggaatgtcgttctggtgaaaagtgtt

SEQ ID NO: 1846 - DNA, 6000 bp, Homo sapiens
cctgcaccttggattcatgccaggcctgagtgacccacggcccatgccttttctgcttggtcccattgcctcacgggtgcccccaagttctgcttcctgtctgtgccaccgttaagcctctttcctagtgatgactcccgcgacagcctctttccggaggaggcgcattccttaagggcctggtggggatggtgatgacagggccaaaggacagctcccaaagctggaaagccagccactgcggggggcctggaggtgctgtcagcaagggaagctgcccggcccctcttgctagcagccaactcagcctgagcacctgctctgcaggaaatagaaggggactttgctggaaatctgcctttaatcttggcttcctgttttctgccctgggggactgcccagacggtctgagtttcaagctatttcacaccagcttctctaaactgtcatctctgtgcaaagaggctgggggaggggaggaggctgggtggagagaggagcggcccttcccttcccaggggaccccataagggtataaatgcacatacatgtgcataagctctggactgctggaggccaacccaactttgcatggagctatcccatttggcacttgtatcatcaaaatgcagccagaagcttctctctggttccccacatccaggggtgggtctccaacctctcctctcttctccattcccctggggcaggcccaacagccaggcaagagtggcccagcctcagagagctagtgttcagttcccaacactgccttgactccacatttcacaggcatcccaagctcattttgtccaaaaccaaactcctgagtgttcccccagcctggcactctccccaggttctcccatctcgcaccatctccccaggtgctccagccacacctgaggactgaggagtcatgcctgatttctcctgtggcctcactccccacaaacaacccctcacggagagctgccctgggacttgcctttgtccattcacttccctatcccgctgcttccaccagggctagacccgtcagccctggtccaggccatgcaacagcctcctcactagggctttgacctttgaccttaactttttttttttttttttctggagtcagggtctcactctgttgcacaggctgaagttcagtggctcactgcagcctccatcttcccaccctaagtgatcctcccacctcagcctggctgagatgggaagattgctagctaccagcacacaccaccatgcctagctaattagaaattttttttttgtagagacagggtcttgctctgttgcccaggctggtctcaaactcctggcctcaagtgatcctcttgcctcagcttcccaaagtgctgggatcacaggcgagagccacagggcccagccgaccttcactctttatcatatcactaccctgcttataaacatctttcaatggctccccattgctcatatgataaaacctaaactcctgtaataaaaatctctggcccacaacaccctatagaatctgtcccttcctcaaacaccactctcccctgcttgccggtctcatcaccttggccttctggctgtcccttgagccactgaggctttctgtgcctcagggtctttcactatcttcctccccacctgcaataccctcccccactcctccaacactggcctggggcgtggtggctatcgcccgtaatcccagcactttgggaggccaaggtgggtggattatttgaggtcaggagtttgagcccagcctggccaacatggtgaaaaccatcgctactaaaaacacaaaaattagctgaacatggtggcacacacctatagtaccagctacgtgggaggctgagacagaagaatggttgaatgccagagcgggaggttgtggtgagccgagatcatgccactgcactccagcctgggcaacagaacaagactccgtctcaaaacaaacaaacaaaaaacaaaacaaaacaaaacaaaaacttactaagacagttgtagataaaggcagatttattagaaaaagtaggaaaatacattgcaagaaggcagaagagaagctgactgccaggaaacaaaaggttgttggagattttatagaattagtgttatgctatctgttgaggaggtttttgtgcagtatcaaacgccaagggtacagtgagctaacttgccaagggtacagtgagctaacttgcaggagtctggtgatagtcgggcacaggaagattgtgaattatttgcacaggagagctatatgtcctagacatgaagaaaggcagactcacagcttatctaatttctctttttgctttcccttgctcccaccgaccagattccctttccctaattagcacttcccacctagcacttagtaggtgctcaataagcatttgtttttttgttttgttttgttttgttttgtttttttgagacagagtctcgctctattgcccaagctggagtgccgtggcgtgatctcggctcactgcaagctccgcctcctgggttcacaccattcttctgcttcagcctccccagtagctgggactacaggcacccgccaccacgcccagctaattttttgtatttttagtagagacagggtttcaccatgttagccaggatggtctcgatctcctgaccttgtgatctgcctgcttcggcctcccaaagtgctgggattataggtgtgagccacggcgcccagcccaataattccaccagaggacaggtctgtgggagtggggccctttatcgatttgtttatggttttatccccagtgcctggagtacaggaagattaaaaaatttatttcactttgctgagaagaggtggagccaggattcaaatgctggtctatttgactccaaagttcacagctgggccacagcacacccaggggaaaaagtcaagtgcatttggggataaagaaaggttggtgacaaaactggaacagggattagagtattttccccaaatccccagtcttttctttcccattctgctagctgattcagccaggggaggggagatgtcaatttctccctcccagaaggctttgcagagctgctgaagtgctttcttgtaggctgagaggcggccccccatccggccccatattatcattccatcttgacctcagaggaaagaaagggaaaccagctctgctgagcaccctttccactccctcacccccaggccgttatcttgctgaatctgcactatctatcatgagagaagtatattttgagcctgatcttacaaaagaggaaacagctcagagaccttaggtaactagccctaagtcacacagctagtaagtggacgggttgaaatttaacttggagacttgaaccccaaattcatcttttttctgttacaccacacctatctctgaaacttactggctgtctcctcaaaggacatccctctccaaagggctggctccagctgggaaaccggcctaagggtgccctgggtcagagggccgacctgtggttttgggggcaactcctcctggcatccgaggctctttaaaacaatctgcagccacactgtctcccagctccgtctcccacagggctgtttgccctcttctcgctccctcgggcctcttcatgcttattttgtgttccaagactttgtcagcatgccccacttcctcccccccaaccccaagagtgcctcttccctctgtccacccaagcctgacccttgcttcagggtctagtccctagaaagtcccccacctttacctcctccctacgctggagtctctggtctcgccctcatcactgtatccccattctgttccccggtctcaccctcatcactgcatccccattctgttcccccgccaccctgcactctcccacccctgtcatgcctgagcacgctgtcctctcctgtggctcagagcaggtcatctccctgcttttcgttaacagtgatgtaacagcccttgcttaacggagggctcctcacgtgccagctactgcatactaagcactttaaacgtattaactcatttcctcccctccccacaaaaacttaagaagtcggtgccattatatatcacctattttaccaaatggggaaactaaagcacagagaggttaagtaacttgcccaaggtcacagagctgctgacaacttctttattgcctccaggctgaacataaactccaagaaagtcccatgaggctctttggatctcttttgcccctgttgtttgcaggaacccatctcccaccactctcccccacccacactgcaagcggcagccgcctgagctatatttagatcccagaagccaccaagctccctccgcactccccgcccttgtgcatgctgttccctctgcctggtcccggctctgtgaggtgtgaggtctccccgttagccctagttttctttctgcctcctgggaaccgtgtccaccacctctccactttgatcaattatttccttgccgttgtctgtcggcctgtcagcctacccccacccgaccgagaacgccttgacggtagtgaaatggtcttgccaatagactccagagcaggctccgccacgatgtcagcgccaggaaatgttggtgaatgaatgaatgaaggctttctgctgcgaatcaggcccactctccacaaacagacctgaggagaggggcccaggcccggcccccagcgcttctgcagcgggaaagctgcgtccagagaaggctgggaggttgctcccaggccggctgaggagagaccctcggagccttcaacgcagccaggcggcaagtgggggcagggcgtgggcgcggacacaccccccgcagtgcccccggcgcccggcagggggcgccgccccgccggcccacgccccgccgcgcgccgggcaggccccctcgcgcaggcgcgctgccgcgggcggaggatccgggccgcgcttcctctcgccaggcctgcgagcttcctcccagcggagccctgggcgagccgaggttggccgccgccgccgccgagcccgctgccgccctcccgctcctgccccacccgcgccttgcccgggggcttctgccggggtggggtccgagccgggcgaccgcccggctgcgccgccgtcggggccgtaacccggcccgccgtccctcccgccccagccagcctctggccgccggagcccgcggggcgtggagcgcgaggagccccgcggccccgatcgagcgtccggggcggcccccggcagccagcgcgacgttccaaaatcgaacctcagtggcggcgctcggaagcggaactctgccggggccgcgccggctacattgtttcctccccccgactccctcccgcccccttcccccgcctttcttccctccgcgacccgggccgtgcgtccgtccccctgcctctgcctggcggtccctcctcccctctccttgcacccatacctctttgtaccgcaccccctggggacccctgcgcccctcccctcccccctgaccgcatggaccgtcccgcaggccgctgatgccgcccgcggcgaggtggcccggaccgcagtgccccaagagaggtgagtgcctggccgtcccggagtgtcccctggagggaagagggtggaggtcgcgcgtctagtctctgttgctgccactgtcgcgtccactcccattcccctcttctcccacttctcccttctctcctttactcccttgcacgggttcgaattctcccaggagccactgtcagaacccaaattggaagggagtgcatgagggaggtactgccctgcagctccacggactcgtcttctcgggtcatcccgagtccccccctctgtggagctcagagtaggaggtggctggagtctggaggaagaggatccgtatgggccaggtccctagagagagtgctggactcccctgcccttccctgtacagggcctccccgcaggtgccctggcttgcttggttctgacccctccctcattacccc

SEQ ID NO: 1847 - DNA, 6000 bp, Homo sapiens
gggtataaatgcacatacatgtgcataagctctggactgctggaggccaacccaactttgcatggagctatcccatttggcacttgtatcatcaaaatgcagccagaagcttctctctggttccccacatccaggggtgggtctccaacctctcctctcttctccattcccctggggcaggcccaacagccaggcaagagtggcccagcctcagagagctagtgttcagttcccaacactgccttgactccacatttcacaggcatcccaagctcattttgtccaaaaccaaactcctgagtgttcccccagcctggcactctccccaggttctcccatctcgcaccatctccccaggtgctccagccacacctgaggactgaggagtcatgcctgatttctcctgtggcctcactccccacaaacaacccctcacggagagctgccctgggacttgcctttgtccattcacttccctatcccgctgcttccaccagggctagacccgtcagccctggtccaggccatgcaacagcctcctcactagggctttgacctttgaccttaactttttttttttttttttctggagtcagggtctcactctgttgcacaggctgaagttcagtggctcactgcagcctccatcttcccaccctaagtgatcctcccacctcagcctggctgagatgggaagattgctagctaccagcacacaccaccatgcctagctaattagaaattttttttttgtagagacagggtcttgctctgttgcccaggctggtctcaaactcctggcctcaagtgatcctcttgcctcagcttcccaaagtgctgggatcacaggcgagagccacagggcccagccgaccttcactctttatcatatcactaccctgcttataaacatctttcaatggctccccattgctcatatgataaaacctaaactcctgtaataaaaatctctggcccacaacaccctatagaatctgtcccttcctcaaacaccactctcccctgcttgccggtctcatcaccttggccttctggctgtcccttgagccactgaggctttctgtgcctcagggtctttcactatcttcctccccacctgcaataccctcccccactcctccaacactggcctggggcgtggtggctatcgcccgtaatcccagcactttgggaggccaaggtgggtggattatttgaggtcaggagtttgagcccagcctggccaacatggtgaaaaccatcgctactaaaaacacaaaaattagctgaacatggtggcacacacctatagtaccagctacgtgggaggctgagacagaagaatggttgaatgccagagcgggaggttgtggtgagccgagatcatgccactgcactccagcctgggcaacagaacaagactccgtctcaaaacaaacaaacaaaaaacaaaacaaaacaaaacaaaaacttactaagacagttgtagataaaggcagatttattagaaaaagtaggaaaatacattgcaagaaggcagaagagaagctgactgccaggaaacaaaaggttgttggagattttatagaattagtgttatgctatctgttgaggaggtttttgtgcagtatcaaacgccaagggtacagtgagctaacttgccaagggtacagtgagctaacttgcaggagtctggtgatagtcgggcacaggaagattgtgaattatttgcacaggagagctatatgtcctagacatgaagaaaggcagactcacagcttatctaatttctctttttgctttcccttgctcccaccgaccagattccctttccctaattagcacttcccacctagcacttagtaggtgctcaataagcatttgtttttttgttttgttttgttttgttttgtttttttgagacagagtctcgctctattgcccaagctggagtgccgtggcgtgatctcggctcactgcaagctccgcctcctgggttcacaccattcttctgcttcagcctccccagtagctgggactacaggcacccgccaccacgcccagctaattttttgtatttttagtagagacagggtttcaccatgttagccaggatggtctcgatctcctgaccttgtgatctgcctgcttcggcctcccaaagtgctgggattataggtgtgagccacggcgcccagcccaataattccaccagaggacaggtctgtgggagtggggccctttatcgatttgtttatggttttatccccagtgcctggagtacaggaagattaaaaaatttatttcactttgctgagaagaggtggagccaggattcaaatgctggtctatttgactccaaagttcacagctgggccacagcacacccaggggaaaaagtcaagtgcatttggggataaagaaaggttggtgacaaaactggaacagggattagagtattttccccaaatccccagtcttttctttcccattctgctagctgattcagccaggggaggggagatgtcaatttctccctcccagaaggctttgcagagctgctgaagtgctttcttgtaggctgagaggcggccccccatccggccccatattatcattccatcttgacctcagaggaaagaaagggaaaccagctctgctgagcaccctttccactccctcacccccaggccgttatcttgctgaatctgcactatctatcatgagagaagtatattttgagcctgatcttacaaaagaggaaacagctcagagaccttaggtaactagccctaagtcacacagctagtaagtggacgggttgaaatttaacttggagacttgaaccccaaattcatcttttttctgttacaccacacctatctctgaaacttactggctgtctcctcaaaggacatccctctccaaagggctggctccagctgggaaaccggcctaagggtgccctgggtcagagggccgacctgtggttttgggggcaactcctcctggcatccgaggctctttaaaacaatctgcagccacactgtctcccagctccgtctcccacagggctgtttgccctcttctcgctccctcgggcctcttcatgcttattttgtgttccaagactttgtcagcatgccccacttcctcccccccaaccccaagagtgcctcttccctctgtccacccaagcctgacccttgcttcagggtctagtccctagaaagtcccccacctttacctcctccctacgctggagtctctggtctcgccctcatcactgtatccccattctgttccccggtctcaccctcatcactgcatccccattctgttcccccgccaccctgcactctcccacccctgtcatgcctgagcacgctgtcctctcctgtggctcagagcaggtcatctccctgcttttcgttaacagtgatgtaacagcccttgcttaacggagggctcctcacgtgccagctactgcatactaagcactttaaacgtattaactcatttcctcccctccccacaaaaacttaagaagtcggtgccattatatatcacctattttaccaaatggggaaactaaagcacagagaggttaagtaacttgcccaaggtcacagagctgctgacaacttctttattgcctccaggctgaacataaactccaagaaagtcccatgaggctctttggatctcttttgcccctgttgtttgcaggaacccatctcccaccactctcccccacccacactgcaagcggcagccgcctgagctatatttagatcccagaagccaccaagctccctccgcactccccgcccttgtgcatgctgttccctctgcctggtcccggctctgtgaggtgtgaggtctccccgttagccctagttttctttctgcctcctgggaaccgtgtccaccacctctccactttgatcaattatttccttgccgttgtctgtcggcctgtcagcctacccccacccgaccgagaacgccttgacggtagtgaaatggtcttgccaatagactccagagcaggctccgccacgatgtcagcgccaggaaatgttggtgaatgaatgaatgaaggctttctgctgcgaatcaggcccactctccacaaacagacctgaggagaggggcccaggcccggcccccagcgcttctgcagcgggaaagctgcgtccagagaaggctgggaggttgctcccaggccggctgaggagagaccctcggagccttcaacgcagccaggcggcaagtgggggcagggcgtgggcgcggacacaccccccgcagtgcccccggcgcccggcagggggcgccgccccgccggcccacgccccgccgcgcgccgggcaggccccctcgcgcaggcgcgctgccgcgggcggaggatccgggccgcgcttcctctcgccaggcctgcgagcttcctcccagcggagccctgggcgagccgaggttggccgccgccgccgccgagcccgctgccgccctcccgctcctgccccacccgcgccttgcccgggggcttctgccggggtggggtccgagccgggcgaccgcccggctgcgccgccgtcggggccgtaacccggcccgccgtccctcccgccccagccagcctctggccgccggagcccgcggggcgtggagcgcgaggagccccgcggccccgatcgagcgtccggggcggcccccggcagccagcgcgacgttccaaaatcgaacctcagtggcggcgctcggaagcggaactctgccggggccgcgccggctacattgtttcctccccccgactccctcccgcccccttcccccgcctttcttccctccgcgacccgggccgtgcgtccgtccccctgcctctgcctggcggtccctcctcccctctccttgcacccatacctctttgtaccgcaccccctggggacccctgcgcccctcccctcccccctgaccgcatggaccgtcccgcaggccgctgatgccgcccgcggcgaggtggcccggaccgcagtgccccaagagaggtgagtgcctggccgtcccggagtgtcccctggagggaagagggtggaggtcgcgcgtctagtctctgttgctgccactgtcgcgtccactcccattcccctcttctcccacttctcccttctctcctttactcccttgcacgggttcgaattctcccaggagccactgtcagaacccaaattggaagggagtgcatgagggaggtactgccctgcagctccacggactcgtcttctcgggtcatcccgagtccccccctctgtggagctcagagtaggaggtggctggagtctggaggaagaggatccgtatgggccaggtccctagagagagtgctggactcccctgcccttccctgtacagggcctccccgcaggtgccctggcttgcttggttctgacccctccctcattaccccaccatgaccctgcgggctgcaagcaagcccagggcccagccacctcgggtgagcagttagaagcccaggtcctaggactgagcctgtcacccttggcctctcagaagaccaggcctaagccaagggatctttgggtgggaaactgggcaggccttctgcccggggggaggtaacggagcattagcaccatgcccccaccttctggcaccctgggcagcccattctcctaggctctttgtggcccagaccaggtgtcaggaaggggtgtgtccagccagcagattttttggagcttaactaccagttcacttccccgcccattttgtacacccgggaaccgaggctcaaagggagaagttgctaccccaggcctctagtggagttaggctggctgtcctttcatccccagctatacagggctggatggctgtgggtggaaggaaaccaggcaggcaccttcacccactggggacacaggcccccagcccggccccagagggaccttgttggttgagcacgtgcttccctgc

SEQ ID NO: 1848 - DNA, 6000 bp, Homo sapiens
cccagctatacagggctggatggctgtgggtggaaggaaaccaggcaggcaccttcacccactggggacacaggcccccagcccggccccagagggaccttgttggttgagcacgtgcttccctgcagagggctggagggagtgaaagggcttccggctccagctgtggctgggtcagctagcaggagatgtggggaatgtgtggtgtatggccatctgtgtggtgtggcaggaaggtccggtcctggccccggctctgagttgaaacaacctggtggtcagtcctgacccagcactcgccacacctatggcccagctggcacaggagcagccaagttcaggatataaatggggtcacatgggaaccgtggaagctctgtctccactggcagcaggctacagactggggacatgggagcattgtgagagtggggacacccagggggcctgtttcaagctcctagtaccctggcggttccagtgtctttcttggttgtggccacagcaggaacagggcaaggacagcaggggtgaggttgaggcctggcaggatcctctggcccaggagagcaggcattgccctggtgggtgctgagcagtgtctgggctcccttggagctgctggcagttttgtcctgctgggtccctgctcacgatttagggtttttttgttttttcacttttttttctggctgtcctgacatgcacagtggaggggacccagatgtcctgggcctgtgagactcccctcacatggccccacacccagccctaacttcctttccagcctgagggactggggctggagcctgacatggttagctccctcccaccccagtcagcctttttaatttttattttattttattttatttttttaccaactgtgagctgtgaaggtgtgatccagggtcccagggcctttgaagaaaggagtctggcttctggctggcacgtgtgcagggatgtgcttttcattggtgagcttggtgccctccaccctctcagaagcagctgctcttctctctgcattgggtcaggggcaaggaaaaagcagaaaatgttcccattcaccaccgcaggggggccagaccccaaaaggctgagccacacagagtggccctcggcaagggttggaaatttcggggacagaatgcagcttcctccaaacaagtataggtaggggttgagacccaggatccacagtgtgacatggctgccccccaaagggggcagacccacctgggtgcggttctgggctccatcttttgaaggattttaaaaccttgacaggtcatcttcaaagagccagggatgttgactgagtctgggaaagagaaagtagggacagattctcatatgtctgagggactgtcccaaatgagaaaggcatcccatggcagaaattgtcccagacacgtgggccagagctagggagcaggtgggtcccagggaagtgaatctgagctcattatagggaaaccatgaatgtactcattttcttgatttagaaaataacaaaacagcgctacaggaaatttagaaaatgaaacaaaaatcacccactatttcttcagcaggcagtgactgtgttagcattttggagttcactgccagtcttttccccatccttttccttcattgtcgttgtcactggagtgtgtgtgccgtgacaccttttttcatttaatactgcgtctgtgggcattttctcatggtgctacgcggtctaagtaacgttgcttctaaaaagctacagaacattctaggctggcctgctgcagcgccatcacccatacactggagcgtgtgcatttttcccctctgttgctgttgtggttgtcgttactatgagtcccaaaagcagccagggtgttggagggcacaagcaacttggcacccaactgaatgtgggttccaggcccagacatgccacttaggcccagggtagagggaccttagacaggtcactgacctgctgagcctcgttgatataaataacaggatggtaacacctacttcagaggaaggtgtaaggacagtgtcaactaactaaccaagggactctaaagtgcctggcacagccctttcttcactccctctgtgagtaggattggcattgttgaaggagtgcccactgctggctgcctcaacctgtggggaaggtgcctgagccacgggccaatgttgactgaccactcacctggcaaagaggtggtctccgcctgaggagcccctgtgaaaccccctggccctgaggttctagaatactatggccagtgcccttgcctgccttcccttctccccattaccatatgattggctggcctaggacatggggctggccctgggaagatgggctgctggttagggtccgggacctgactccacccattccccttccggtctcccagcatcagagctaaatagacaaggcctcttctctctctctctctctcttttttttttttgtgtgtgtgtgtgtgtgtgtgtgtgtgtgagatggagttttgctcttgttgcccagtctggagtgcaatggcgcgatcttggctcaccacaacctccggctcccggtttaagcgattctcctgcctcagccttccaagttgggattagaggcatgtgccatcacgcctggctaattttgtatttttagtagcgatggggtttctccgtgttggtcaggctggtctcaaactcctgacctcaggtgatccacccacctcggcctcctgaagtgctgggattataggcgtgagccactgcgcctcttctgtaagagcctggctgcctcctgcctcccagctctggctaggtcagcccagcttggcattttcccagaggaaatagaggcctgcttagcctgagacttagacaaggaacccaggcatcctgagccccagcccaagaacagccatgccagcctcatcttcgcaccctgttccagtagccaaggaagggaaagaagctgggagattaagggtagggggattctggagcctcccagagcttcccaggagggagttggacacatcgggaaactcatgttagcctccccctcctcagcaggtgttccccaggtctaacctgagtgtgtatcactgtgacacacctgcttcctcttgttctacttttgtggagaccagggtaactgggagtgccctcctacagccaccccgtgggcagtagcaggacaccagtctcctcctggcaaccctgggcctaagagactgtagccccagatgaccctagggtggcccaggactaacctaaggaaggggtcctcccccaggtggcccattcagtgcagaggtcccttgggcacacgacttcagactccagctgccaaactttggcctgtggagtatctcctcctccctggtcttagtgtaagggaagtgggcatgacaactgccctcctgtcccacagcttgggatgggatgaggtcacagggtggggtccgccccaagatgctggcctggcctggctcagatgagagccctttgggtgtttctcagtttcccccgcccttggttggggacaggatgggtggaggagcaggccacccccaacgcccggcagggagcactgcctcccttccccctctcctctgggtcccttcatccaagggctggaaatagaatccgctaagtaatgattaaagtcaaattcagacctaaaaataaagagctggtgaaggaagagctggtgctccctgcatggctgaggggagaagtgagcagggagaggctggctttgggtggctgagcccctgctcctcgggatcagaagtactccaccagttgggggggtgctcttttatctgccatgatgtggcccattaagtgtagacggcaccactcagggcagactggcaggacccattagaaaaaaaatcccatttttcccatggggaaactgaggcccagaaaggagaagtggtttgtcaagcgactatttgagagctcccctcagcaggcccccagggactggagggccctgtgcagcccagcctgccctttctgcctgctcagtttctcttcctggttttgaggtgctaagatgaagtcagcttctcatcacacactagctgtgcacacaccctccaaccgcagcttccctccacccctccttctgtggtctgggcccagagtcgaaggaacaagtagaagagaggctgcttggtgcccccctggctgtcctgatcatggcatggttgtaagcctcgtgggcaggcgaaaacctgggcatcatctgccccccttggaccctggctgctgcttctcagcccagcctgacacctggtcctcatgcagactcgcgcatctatctatctgcagcttgtgctgtccgtgctgcagggagacaggagggaaggatgaagagcaaaccctgagagcgcctctgctggcgggtagaggagacgaggagtcagtgaggggaggcctgtggttctcacttcctggcagagctggtaggagctctgaagctggggctctgcgtgggctggggcagcctggagggcctcctggaggggaaggtcctgtgaaagttgagaagtgtttgaagaagaagcgtggtaggaggagaggtccttgtttgaagcttctgccctctctagggctgctggctcttttctgtgtgtccctcgacaggctcttggcctctctgagaggctggggtatgcagacaagcaagaagtgggcacagaagtacctctgcttcccagagcagaacagccaagctctgggcagacctcccctcggtgccccccacctgtccattttcagggtgtcgtctgtcctgcacaaggaaaggtgggaagaaaggtcccctaaccaaggttcagacaactctgagctcaagtacccacacagctagttcctcctctgtcagagatcaccagtccttgccctatggggtgtttgaaggattaagtaactaatgcagtgccccaaacccggttgggtcagtcagctgtaattcccgtgttctcattctgcagcccatcctgctggaggagtgtactggtaacacccccatctcccttaagtagtagcaagtctgtcctttgtgttgatccccacagctttaccttctgagctgtgtgttctgcagatcctggttctgaagtggggagaccagaaatctgggggccgaagttttagacagcttatgggcctccagccgtcagtctccccacctagaatgtggccaggagacttccgggtgagggacaagaacatgactttgaagggtccattgaaggctagtgctgagaggctatatgcaaatgcaggcaaatgaagatgcaaagaccacatcctgtgctaagggggtgggggagcagaggcctgggttagggccctggggaggcccagagtccccattgcccagcgcacataggtaattaggctcctgagcggtaattagaaacctttctgggccaggaatggcagcctcaagccgcagcggtgcctggggagtaggctccccattagcctgctctaaccccagcccccacctctcccaaaccactagacgggatttccggtcccactgaaccattgggggcaggggaaaaaaagccagtgtgttgctataatttggtatttatccattaaatccgcccttctccttaggtcagggtgctgacgggagccccgggatgggggtagggcagcgtgccctggagccagagcaggcattcttctgttccttcgtaaccgccccgggaggtgtaggcatctccaagaccctggcgcccaattctgctgctgctcaccctgagacacctgtgcagtgggggtgctgagggaccaccagcgcaggctgcgggggtcagtggaagccctcgggcacccttccttgcctgatgtgtggtggggaatgtcacagtgcctcagcctggtgtcctctgcagaaccagaggtggagctgattttattgctgccaaacttgcccaactgctggtgggtgccccgccctcctcaggt

SEQ ID NO: 1849 - DNA, 6000 bp, Homo sapiens
ttagaacagctgcaactatctaaattataatacaatcttaacaatttaacattcagatacaattatgcagaatgaagtgcacccatcttaagtgtacagtctgatgtgtttctgctaaatgcatatactagcatagccaacaccccatcaagatatagagcattgccatcacccaagaaagttctttatgcctctccctagtcatttgaaactttccctctctacccacccagggcagccatgattctgatttctagctctagatcaatcttgcctgtttttgagctttacataaatgagctaatacagtatgtactcttttggcttatacattatgctttggagactcatttatgtttttgcatggattagtagtccattcctttttactgctaagcagtattgcattgaatggatatatcatgatttgtttatccattctccttttgatttacatttgggttgttttagtttttgctattatgaacaaagcacctattgacattcccatagaagtatttttgtggaattttcatttcttttgggtaaataactagggctagacttgctggatcgtaagttagttgtatgttttaccttataagaaactgtcaaacagttgacataatgcactcttaatgaagcttattacctgtgaagtgaggtcttttaaattttttgtcttttgatttttgtcttaaattgcatcgatattagatgtgtggacattcttctgaaatatcttaaggatcagaccttgattaactgtgttattttagtagatctttaatgcttctgagttatttatacggacagctcgaaatctgaacgactcccattggaaaaccagaatgatctctttcatggatctctcccatatttttatttatcttctttaatgttttatacatacaaaaatatgtagaacatgtgttagttattaagcatacttataaaatggaaatttgtaaatccgtcactcaatccaagagtgaactcatttccaaattacaatggaaacccatgtgcctatgggcttctcatcctctccaaaggaattcacatccttcattaattcttttgctaaaacaaaagcaaaacaaaggaaaaatattattttattatttaaagcaaaaaaaattttctgtaacttttaaagttttccttgctttttaagagctttatcaaaatggtgttacgctgtgtgcgtttttgatatttgtatatttttactcagtgtgtttcaaagatctgcccatgttgtgtggggctgtagtttattcacttttgctgctaacattcctttctgcgaatacatcacaatatactgtattacttgatacttgtcaattgttgtgctgtttctcacgtttgcacttgatgtatatgatatacattacattttttggggagtctggtacatttagcagaataatttgagatgaaactgttatcaagtaaacggcgtttttaaaaaatgaaaacaagcaatcagtttctgctccaaaagagggagaacctataagatacctgagtaaaatggtataaaataaaaagtttggtgcattgtcaatgtgggtataaagcaaagactccaattaatttttgtctacatgattttatttcaaggttgaaaaaataagtttgacttgtgtatgtaaaatataatcattgaagaaatacaaatcacctcctttgtccatgtggtcaagttagagcgtaaagacaacctaaatttttgttccttttttttccctaaatattaagctatataatgatacatctcccacttcactgtttaaaataacttaatacgattgatttcctactacttcaggaaaacacaaacatttaaaaaattcacaaataaaaatcattttagtaaaaaaaaaacacacaaaaacaaatcctacaacccctacaacaacctatatacatttaaaaattctatagacctctttatgttcttggggacaaataaacaggcatatttattactaatactaaaaatacattgggtagtatttgaagattttatattagcactagccttttaaaaatcagctctaaatttttgtcttacaagtatgtattaaaaattctgaaatcaagtataatgaaattatatatcaatattcctttgcatttaactccagagtggatctgcaggaatcaagaccaacctcatgcagagaacttaagaaatatttaaaaattagtagactggactttaattcttcatgtgtagtgcctaatttttaaataatacattttaagattctaataaatttatttcactgttaaatctaggaacatccaaaactgaaactctttatttaaaaatcaagctgaatttcagttaaacaaaaccatcccatcatatgaataactttcttaggtaaaacaaggtttattttctttctatacaactgactctgaattgagctagaaatttccaaggaggaaaatgatctaggaaacaactttagaaaaaaagggctaagtttccgttatgatagcttttgacttgttttcagctcttaaaaaattatttacgaacgatggatacacgttctaatgcagaagtattttagaattagagagtaaaagaaacctactaccttcctttacatcaggtcccttctaccatcctacccgattgtttgagacaaccacttcttatctcgacaattcacaactcttttattagctatcttaaaaaaatttattactggcatcaattagcctgagtcatgaaaccggaccacattaagggcgacacatggtccaatcactgtttgtaaaagtccacgtatttcaaactcctctctcctgccactgctgggctgtttccctctttgaggacctggtctccgcagcatttattcattagatggcagtcctaggggagtctcgctttggggaaacctctcctcctgcacattcaagaaaacaaccgcggagacttagggtcggtactggtttccagtcacttacgtagcaaacgaagcaagaggaacgtgcctgggaggacccgagacaggtgcgggtgggtttccgcagtagccgctgatcccgagtgcatgcggcgtgttcccgggtcgggaccgcggccaagggaggcttcccggccccagcctccaccccctcctcggcgccccgggacccggacacgccccccgagcttcggagacccgcagcgtgcacgcgccccggccgctccccgcagccgcccacgtggtggagccctgagctgcgcgaggccgcggagagcgctcagggcgggcggctggtccgggaggccacgccagcgcgacccagccgagtcggcccccagcccgggcccccacatttcctcccccggagggagggaggcgactctccgcgggctgccctccccagcgcccgccgcgccctctggcggccgccgcggggacgcgcccggggcacgcggcgctgcctgtctgggccccccttccggggcgcggggcccgcgaggggcggcggggtcctctctcctcgagccactctgggccgagccacacgggccgcgcccttccccctccgctccccctgagcccccaaactccgggctccacggtcgcaacgccgcgggcaccccagcctggcgtgaaagtgcccggcgtagtagcctggggggggggtcccctttctcccaggtgcgccccttccgccacgttcgggctttccagtacgcagcgaaaaaaatgccgcatgcacgcatttatttattttgcaacagctgcaagaaacaatgaagcttttcaagaaccggggaaacgcgctttccagccgcgctgttgttgttttcaatgaacctctcccagccccgcactccccgcccacccctcccctctcctgcccacccctcccctgcctagcctttccctggctacccacccctgccccgccgagaccggaccggcggcgggggcattgtttttggagtcgggcgggaggggagggcgcgtgcggggtggccggcgcagtgcggtgggggcgggagcgggtgggcacgcgcgcgtgtctctgtgtgcgcgcgggaggcggtggggcgggagatgggggcggcgcctcgcagtctcgcgccccacgcccgggctccgctccgcacgtcttggggaaccgggctccggttttttgcgcgcgccggcctgggccgggccctcggcgcgccgctgctgcggcggtggccgctcgagtgtgcgagcgggcgcgtgtgcgcgggccagggcgcgcgcgcgcgcgcgagcccccagtgtgtggcagcggcggcggcggcgcggcgaggctggggctcttgtttaccagcattaactccgctgagcggaaaaaaaaagggaaaaaacccgaggaggagcgagcgcaccaggcgaactcgagagaggcgggagagcgagagggacgccgccagcgagcctgcccacggccggcgctcgcagaccctcggccccgctccccggatccccccgcgccctccacgcccctcccgcgcgggggcagctccacggcgcgcctcgcctcggctgtgaccttcagcgagccggagcccccgcgcagagcaggcggcggcgggcgggggccgggcgggggccggcgcggggcgggcggcggcgcagagccgggcggcgcggcgggagtgctgagcgcggcgcggccggcccgccgctttgtgtgtgtcctggatttgggaaggagctcgccgcggcggcggcggcgctgagggaggaggcggcggcgagcggagccaggaggaggaggaggagggggagccgctcattcattttgactccgcgtttctgcccctcgccggcctcgcctgtgacccggacttcggggcgatcttgcgaactgcgtcgcgccctcccgcggcggaagctcgggcgtccggccgcctcccgcgcggccagggccgggcttgtttttcctcgcctaggcagatttgggctttgccccctttctttgcagttttccccccttcctgcctctccgggtttgaaaatggaggccgacgacgccgacagcccgccccggcgcgcctcgggttcccgactccgccgagccctgggccgctgctgccggcgctgaggggccgccccgcgccgcccgccccgtccgcgcacccggagggccccggcggcgccgccttcggagtattgtttccttcgcccttgtttttggagggggagcgaagactgagtttgagacttgtttcctttcatttcctttttttcttttcttttcttttttttttttttttttttttttgagaaaggggaatttcatcccaaataaaaggaatgaagtctggctccggaggagggtccccgacctcgctgtgggggctcctgtttctctccgccgcgctctcgctctggccgacgagtggagaaagtgagtatgtgcccgccgcccgcggccactgcgggaacttttcctccgaggggctgcgccctgtttgcgaaacccgagttgccaccgtcgcagctgtcgggcccccgggctcgggagcggcggggtggggcgcagggcggctctgccgggagggaggctgcagcggacccgggacccgggctcgttcgtctggagccccgcgggccctggctccgcgcatccccgcgcgggaagggcttttctctttctccgtcctgacagcccagccgtgtttcccggctaggcgcgaggactcggtagggaagttggtgccggggcgggctccgcggttcccgggccccgcgacccgcacctcgccccttccatgcgcaagagcctctccgcacacagcgctgatcccctgcggcgcgcaggcagcagcgacagcaccctgggccgcaccgcgtctccgctgctggggctgaccgggcagtggggagcgggcagccgcccggcccgcggggtgcgagttgccctcgaggggggaggtgccctgcggagaggccccgaagccccaggacacgtctccaagcgcccgtcgctgcc

SEQ ID NO: 1850 - DNA, 6000 bp, Homo sapiens
aaagcagttcaaatcaagttcgcccacaggcgcaaatacctcttccatgaactaggtctgatttttaaatgagttttgaaaacaaattggggaaaatcacaacctataaagaaatgtatcttgtatgctttacaattaaaaaacaaaaactttcaggatttgtctcctcactcttactccctcacgcttttaaaaacaccaagttatttacaaattataaaatgccctgaaattatgaatgcttcctgatttctagaaagctaactaagcaatatgtaatccagaaaacttctgaaataagttccatctttcttacaactcaaaacatgctatgcaacgttcatgtacacacctgtgactcctaatttttggaaaaaggcaactacaacactgcagtttgtaaatcacaattgccatatccaatgttataaagaagacagtgccgccagtcaagatgggttaacatcacctgtatgtcacagtctacagtgacatcccaatataacggaaagcaccaatgaggcaaaaaaggtatagggtaaaggcttctgatgaacaacactagagtcctaagtctacagaaatatttttaaaagaacctttaaaatgctaactactgtctacttgaaaactgcaccctatactgagtctgaaaaaaaatctgaatttcaagaaaggtggtttcatgcaagactctgcaggttcatgcactgagtagcacaaggtcagctttcatacagtaggtgcacaataagtgcaggctggattcagttgcttcttacagcacattcttacaaaacaaatgaaaccagatttaaaaggaaaccaccgtcccttgagggttcctcttggcaaaaactctaaggcaacaagtgaaaatgatacagttgattttcattactgccctgatcttgcaacaataggaagggcaggaaacatttttattagtaaactaagccttagacaaagaccaaaagcaaatgtaaacaacaattattctctaggtcttttcctattgaaaggccagggtaaatctggataaatgcacacagtttcaaaacaaaaatgcctttgccacattttaaaacctttcgttctgtaaggaattttaattttataaaaatcactgtatacttgaaacagtgtatcctaaaactactgcatcctaaagattctttctcctgctcagaccctggaactatgtaagaaataaaataaaactgcaaagaaaagaaacaacaatactgcattaaaatgaactgttctgttcatcctcagtccttactaccacttgtggtcaatgtggcatatcaaaaaatgagtgtttaaaacatcttaaaacagcaatgtctttctttgttggaaaacataataaaactggaaatacaaacagcccttcagactcagctcctaaactctatcctgaaaaaaaccatcatttcagattcagctgaggtttctattgtcaaaaatctgccctccaccagcatttgtgttttttaaatccagctcctcaatccctaactgaagctacatagaaccaagattctttttctcctgcttgcccatttctactgcgggattgaatccctgttgctaagcttcaattatcagtttgttgtattgctgcaactcacggatctgaaaaactcataaatgaaaagagagagagacatcagcctgtcaaatgtatgtaataattttaacgtaatttaaggtagcataacaagttattttcaacctgatcacatttctttaaaaaaaaaaaaaagggtttattgagatataattcacataccattaaagtccccgatttaaagtacataatccaatggttttaagtatatttagagctatgcagccatcgccacaaactaattttagaacaattttcatcaccccaaaaagaaaccctgtgcccaccagcagtcactccccattccatccgcccccagcccctggcaaccactcatctaccttctgcctctatggatttgtttattctagacatttcacataaaccggatcatacgatatgtggtcttttgtgactgacttctttcactttttgtgatatttttaagcttcatctattcaaccttagcatatttcttagagttgaacttttctaatctttttcgacaaatcaaacattatgaccttttacatttcaaatcctgacacaaaccccacccttccacaaaacaccatttgcttgctatgtctctccagaggatctaaactataatttgctgtttaggttctttcagaagttctttttctgggttctccttctggtaataaaacactaacttctttaaacaccaacatttcacatacctacatttctgtgacaacaggatgcctggggtagaaagatgactgaatccttttaaggagatgggtacaataaatttaaagtgcatgctgactttttaaaaacaaaatagccctcagattatctggctatcactcagaacctccgaaccgccttcatttagatgctctgttcacattatggtgatacaaaacaaacacatccatatgactgcctctgcttcagaaactaagttttctaagataaacaacactctttctactgccatcacactcaaagaggaaactctaatctctcaatacgccagcaaaatacctgcaactgaaccaacaccctgtctttatttctccaccagacaacagctgaaagaacgccctccctgatagggctcagcagcttatttctatcagagttaagtggtctagcaccttcccggctaaaaactgaacgcccgttcacaggcatagcttttaattctccacatttcagagatggagggaggggcaggtactgagtcagtcaagacttcagcaaaccataatcgagatttggggtgccttctgaccacccatcaggtttccaggaactaaccactgtaaagggatcctggggggaagctttggtatcatggagtaaaaacatacattaaaacaccccctccctcctgcctgtgttctcaaaaatcgccgtcttgcacaaagaatatccttcaagaagaacgctccaaaagaaaaacagcctattttaaaatgcccgactcctgcgtcggcgaaggccatccctgctgttttgaatttcagaacattaaaaacacaaaactagagaagctatacagttcaactgcataacataacaaaatggattatttctcccgtgtcttctaaaccgtacttatcttttaaagataaaaaccctcctttgtccccccagccaccacctaaacgacttagtaaagggagccggaaggctttcgcccaatcgagtccgctgaaagtttagaaaacaaagagcaggagagcccagatctgtggaaggtccggccccagtccgcgtcccactcggcagtaaacacgcgaaccacgatctgctctcgttccgtcgcggactcatttcttaccagacgtttaaggatttgtttatagaaacagcctttctgaattgccccggtgatggggccatacaacctccgctgcctcctccttccccgcctcactcgtgaaggctcagtcgtgattttttcaaagttaatcggcaccacctgcataccctcggcaaccattactcaccaacacgccctcaccgttcccagtcccagttctgcgacatttaaacttttaatcgtgttcaaattaccctaccatcttgaatgtaccagtaagccacactttcaactttttcagaagaataaaacccccacctcctccggccgtagacaccggggggagttctcgctccccgcatccccgcgcttccctactaacccccacccgacaccaccaaaacaaaagctatcagattgcaaaagacagcgaatgtggagcgacactgcttattaactacgtacaaaggaagtgcggggcggcagaagagagggcgacacgacgccgaccacaacaaaaccaaggccagggctccgcgctcgcaaaacacaacaccctccccgcgccgccgcagaccctggcgctgaaaccacagcgtacgacacctctcgccagggacgggcgtctaggtgtccccgtgaggcggcgactacaccccgcgctgcgagcacgtgtgtcggaatgcacgtcggctccgaccacacacccaccaacgcacactcggatgcggccctagtacccctccatcccccggcccgggagaaactgggagaccatcccagagccctctgaactggggacccagtggcgctccccggaagagacaagctgaggaagactcccggcctcgcacttcccggggggctgcccagagagcgcttcccctcaccccaccgcccagccccgggacgccgggggcaggtaacccaacgaggagcgggccaaagtgacgggcaaggccaggaacccgaggagcccgaggggcaaaagcacgttgggcgacgggaggcagcgacgggcgcttggagacgtgtcctggggcttcggggcctctccgcagggcacctcccccctcgagggcaactcgcaccccgcgggccgggcggctgcccgctccccactgcccggtcagccccagcagcggagacgcggtgcggcccagggtgctgtcgctgctgcctgcgcgccgcaggggatcagcgctgtgtgcggagaggctcttgcgcatggaaggggcgaggtgcgggtcgcggggcccgggaaccgcggagcccgccccggcaccaacttccctaccgagtcctcgcgcctagccgggaaacacggctgggctgtcaggacggagaaagagaaaagcccttcccgcgcggggatgcgcggagccagggcccgcggggctccagacgaacgagcccgggtcccgggtccgctgcagcctccctcccggcagagccgccctgcgccccaccccgccgctcccgagcccgggggcccgacagctgcgacggtggcaactcgggtttcgcaaacagggcgcagcccctcggaggaaaagttcccgcagtggccgcgggcggcgggcacatactcactttctccactcgtcggccagagcgagagcgcggcggagagaaacaggagcccccacagcgaggtcggggaccctcctccggagccagacttcattccttttatttgggatgaaattcccctttctcaaaaaaaaaaaaaaaaaaaaaaaagaaaagaaaagaaaaaaaggaaatgaaaggaaacaagtctcaaactcagtcttcgctccccctccaaaaacaagggcgaaggaaacaatactccgaaggcggcgccgccggggccctccgggtgcgcggacggggcgggcggcgcggggcggcccctcagcgccggcagcagcggcccagggctcggcggagtcgggaacccgaggcgcgccggggcgggctgtcggcgtcgtcggcctccattttcaaacccggagaggcaggaaggggggaaaactgcaaagaaagggggcaaagcccaaatctgcctaggcgaggaaaaacaagcccggccctggccgcgcgggaggcggccggacgcccgagcttccgccgcgggagggcgcgacgcagttcgcaagatcgccccgaagtccgggtcacaggcgaggccggcgaggggcagaaacgcggagtcaaaatgaatgagcggctccccctcctcctcctcctcctggctccgctcgccgccgcctcctccctcagcgccgccgccgccgcggcgagctccttcccaaatccaggacacacacaaagcggcgggccggccgcgccgcgctcagcactcccgccgcgccgcccggctctgcgccgccgcccgccccgcgccggcccccgcccggcccccgcccgccgccgcctgctctgcgcgggggctccggctcgctgaaggtcacagccgaggcgaggcgcgccgtggagctgcccccgcgcgggaggggcgtggagggcgcggggggatccggggagcggggccgagggtctgcgagcgccggccgtg

SEQ ID NO: 1851 - DNA, 6000 bp, Homo sapiens
aggtgactgggcttttactattaatgtaaactgcctgggacgcagcccctgccatgggaaacgcagggcacttcctgttctcagcatagagtgacaaggaaatttactcagagcggttactctgacattcaatgtttagttcaggaggcatttctgctttgccatcgagaatttttctcccttctaagaaaatgttttctcctgagaaaatttttctcccttccaagaaaagagtagaatgaaaggaggcaacttggtttcatagggagtgtcatgttgtccttctgagtttactgatgagcttacctgagaaaggagggttctagcatgggagttctgttgctacaagacatgaaagaatggcctccgtttatcccggagaggagagtccctgagcccttgggagttgccttgaaacctctgccgggtcccaggtgagaaagtgtgtgagttgtgtggttctgagatctgaacaggcaccatctggtgacactaggggctgaaggagctcggtggctgcaggtggactggagctcaccatcaggaagtagccagattctcacccctcagtgtcaccgagtgttctggctttagaggaaggactccgtggtccccaagccacaaggtgtcgaggtctgagtctcaacgccatgactcagtgtgaattaacttagcaggtatcacaacatcagatttgggttgtggttccctgctgggtctgtactttagattgatgacaaagcccgtcctcagccttatttcagcccagatctcggtatttatgccacagatactgttgagctcctctgggtgcgtgctgaccctgaggtcacacagatgagccaggagtggccctggctttcaggaaacgtagtgacgtaaaaggtcccggctgctgcgggataagggccagggcagaggtgtgaacgcagccgtggaagacttgggccaggaagccatttgttctgctgctaacacttccacagctccacgtgtccagactgttgccagagacgtctttggtctacaggattcaggagggaatctgaactttagcctggagcattatcaactcatagatgagtctgaaacaaacttagtgaaatctgatgttttttgtagttttccagtacagtttttcccatcgctggaatcctggtttggttctgcgggaatcgagtgcttgagtgggacccagacagacaggaagggcgctcctgctcagttagccccagtaagctcactgaggcacacaggccccatgtccacagccgctcctggctgaggcgtggttcctaagacgacccttactgttgagggctgccaggagggagagacacattcagccccgcaggtcctctgggaatccggtgagcgtcggcaccgggctggggccgtgctgattcccggcagcgtgtgggaatgtgcgggtgcctcgtggcctgctgacatcgcacacaggtcacagcctgtccagttcaggacatcagggccaagagtgaagtgagaatacggaggcacctctgtgtgctcaccctgctgaccgtcacccagcctccggggggggtcacagctggcccccaggaagctgcttcccagcagggcaggaattccatttgagtcttgtccctgttccaggagaagggctgggtatgtgtcccccaaaggggagagcattcgagaaggatggcgccagcctccccagaactgacctgtggttaaaaaaaaaaaaaaaattgtgctttttaaaagatgagttttatcagctcacacatccttctagagtctaatggagattttttgtgtgtgtggaaatagtaaacaaggtcttgaatcccacagagcaaaaaagacttcctttcatgggcagcactggaagggttgttactctggaatggtttaaaagaggcgtcacatggcttgtttgtgctgatgtcactgcctcgctgctctcctgtggcacctcctcggtccctggccacagggcacagagccaagcacatctcatgctcttggcccagttacgcttctgcccaggggtaagtcagctggagaggaattcacagcccaggcatttcatgtcgttatggcctattttaatttttttaaccccaatcatttttcttaggaagtgatggggagtttggaaaggcaggcttatttgtcatcaagctgccagcttttatcaatgcaaaccacatccctgtgacatctgtgactgttccttggacagttaggtgagggagggtctcctggtggccccagggttactcttatttaggttgagaaaaattcctttttccaggatcgttggtgatcaaagtgtagtcattctgttgcgcagagaactccatcccagctccaccctcatgaattttgtaatcttggacaaattatttagtatcttagtgcttctgttccctcatctgtaacatgggggtatattatagtcagtagcacctgcttcacaaactcgtgaggacttcagcagttcacacacataactgcctcgctgcctggcacctagcgtgcacatggcattctaccgtggggtagacttttaaaattctggctacagagatacttttccataaaagtggccacatggaactctccaaatctaagaagcatactgtgggggccttcatattttgtctaattcttttctccccagaacaggaacctgcacccttccttcttttaaagggcgacgtggtaaataaacatttttagacttgcaggccacagtctctgtcctaatgtcctcagctggtagttgtagctggaaagcagctgcagcccacatggaaatgagggagcgtggccccatgccagtgcagctgatgtagaggcgggcagccccgggttaggccctgtggagacgcaggcccccgggctctagaacgctgaattctagtgaattctggatggctctccctcacacccaggcccaccctccctcaaggttgcaccttctccacctgaaggaagctgccaggtggccataggagcccttctcttggcaggccagcttccaggcccagtggcttctcttacatcaggggcctccccttggaatgttccctgaaggccagacacgggcaggtagtctgtggtcaagcagccaccctgacaggaggctagatgccactgggtgtgctttgagtttcctagatgtggagagttctgtgtggccacttttatggaaaagcatctctttagccagaattttaaaataaagaggataacttcctggtgagaacagacgtggaaaggaaggcactttggtttcacgctcatgtaagagagggctgttggcggtcactcctcagaactatggccagccctggatggtagccagctgctttttgccccaaaagtctgtttagctgggtctctgcattctggaagcttgtcaaagcccgggcctttcctgggtcagggcagccggctttccttgtccacgtgtggccggctgttttcttggggagccccggccacagccggcaggactccctttgctccatgtgactctgagggcctcacaggtatttgcagcccaggtgctgtcggagcccagccgatgcgaccgacacacagcacaagcgtcatcctgttctgcctgtcccttgcgtgtggaggggactcgtgcccagggctctccttgctggcttgttggaatctggcttcaggtctacacggggcctctcgtttggtccagaacagcctggctcatcggctggggcttgcttgtgcagggctggagcgagcacgtgctagatggagacagcagactcggagtgtgcatttcttcgtgttgcaagcctggcctcacagtgccttcttcctttggttgtctgccaggggtagccctgcaccaggaggaagcttagaaatagcacaggtgggaaccggagagagagcactgttggggaagctgcggtcactcatcagccttcctggtgagaaaccaggggtttcctgctaattctggaaaggatgtttcagcagtgcctgcatgagacgcctcagatagaaaactggttatttttgtttcttagcactgccaccatagataacagctgtcacgatggacagtgtggacctggattagtccttcttgggaaaggagagtttgggttttgtaccgtggtggttctgggttctgggggaagagaatggaaccgtacgaggtaaaacaggagactctgaaggccacttggccatccaggcagaaagccagggatggagaggggcagcagggctgtgttcagtgctcccgccgtacgcttgtatgcgggaaaccactgcaggcggcccatgaagcctcctggccatgtgcgccctcccggtttggaccccctcccgtgtgtcttggctgcaggtttgaactgatgcgcatgtgctggcagtataaccccaagatgaggccttccttcctggagatcatcagcagcatcaaagaggagatggagcctggcttccgggaggtctccttctactacagcgaggagaacaagctgcccgagccggaggagctggacctggagccagagaacatggagagcgtccccctggacccctcggcctcctcgtcctccctgccactgcccgacagacactcaggacacaaggccgagaacggccccggccctggggtgctggtcctccgcgccagcttcgacgagagacagccttacgcccacatgaacgggggccgcaagaacgagcgggccttgccgctgccccagtcttcgacctgctgatccttggatcctgaatctgtgcaaacagtaacgtgtgcgcacgcgcagcggggtggggggggagagagagttttaacaatccattcacaagcctcctgtacctcagtggatcttcagaactgcccttgctgcccgcgggagacagcttctctgcagtaaaacacatttgggatgttccttttttcaatatgcaagcagctttttattccctgcccaaacccttaactgacatgggcctttaagaaccttaatgacaacacttaatagcaacagagcacttgagaaccagtctcctcactctgtccctgtccttccctgttctccctttctctctcctctctgcttcataacggaaaaataattgccacaagtccagctgggaagccctttttatcagtttgaggaagtggctgtccctgtggccccatccaaccactgtacacacccgcctgacaccgtgggtcattacaaaaaaacacgtggagatggaaatttttacctttatctttcacctttctagggacatgaaatttacaaagggccatcgttcatccaaggctgttaccattttaacgctgcctaattttgccaaaatcctgaactttctccctcatcggcccggcgctgattcctcgtgtccggaggcatgggtgagcatggcagctggttgctccatttgagagacacgctggcgacacactccgtccatccgactgcccctgctgtgctgctcaaggccacaggcacacaggtctcattgcttctgactagattattatttgggggaactggacacaataggtctttctctcagtgaaggtggggagaagctgaaccggcttccctgccctgcctccccagccccctgcccaacccccaagaatctggtggccatgggccccgaagcagcctggcggacaggcttggagtcaaggggccccatgcctgcttctctcccagccccagctcccccgcccgcccccaaggacacagatgggaaggggtttccagggactcagccccactgttgatgcaggtttgcaaggaaagaaattcaaacaccacaacagcagtaagaagaaaagcagtcaatggattcaagcattctaagctttgttgacattttctctgttcctaggacttcttcatgggtcttacagttctatgttagaccatgaaacatttgcatacacatcgtctttaatgtcacttttataacttttttacggttcag

SEQ ID NO: 1852 - DNA, 6000 bp, Homo sapiens
cctcttgtctccgtgtacctgggaccacaggtgcacgccaccatgcctggctaattaaaaacaatgcttctatagggaaagggtcttgcattgttgcccaggctaatcttaaaccgctgacttcaagtgatcctcccgcctcagcctcccaaagtgctgggattacaggtgtgagccactgcgccccgcccacattttctattttcaggaaaagtggtgccctgtgtgcgtggcctggcggcatgtctctggggtgttgtagctccttgttctctgtcgggcttgggatgggggcacaggcagcatctggcctctcctgtgggctcagaactgatggaaaaagaaggctcagggatgagagctggggctcgccttacagcctggaaggcggtggagggtggtgggggctctgcctgcgatggaaagtgcagtcctccctcgcctgaacgggatggtccaaggcctccctccccctcgaggggcctccctcccctccagcggcctcccctgcctgcccactcccacctctcacacctatggactgagcggagggggcagagaaggggcagactggaagaggctgaacccaaggcttccctcagcctccagaaccctggatcagaaccgtccgtcctcttcccccgctccccttacactgatgcagggtcggtggctgcacagtgtccatctctgcagctggctgtctccatcacacatcgtacagcggcaaacactccccagctaatgtccttggggtgtcttccagggtttcctttgggtcattttttataagtggtcttcctcagttaaatggataaacacacttaaggcatcaaaactcactttattattttcttaatttttatttcttggagacacggtcttactctgttgcccaggctgacgtgtagtggctcaatcacagctcactaaagcctccaaccgctgggttcaagtgatccacctgcctcgcgctcccgagtagctgagaccataggtgcgcaacaccacgcccagctagtttttaaaaattgtttagtagagacaaggtctcactatgttgcccagactggtcttgaactcctaagcttaagtgatcctctggccttggcctcccgaactgctaggactacgggtgtgagccaccgtgcctggccttttctttatttttatttttttgagacagagtctcgctctgtcacccaggctggagtgcaatggggcgatctcagctcactgcaacctctgcctcccaggttcaagcaattatcctgcctcagcctcctgagtagctgggactacaggtgtgcgccaccacgcctggctaatttttctatttttagtagagatggggtttcaccatgttggtcaggctggtctcgaactccttacttcgtgatccacctgcatcggcctcccaaagtgctgggattacaggcgtgagccaccgctccgggccagccactttattttcaaggtattccttttaggctgggcatggtggcttgggcccgtaatcccagcacttcgggaggccaacgcaggtggatcccttgagctcaggagttagagaccggcctgggcaacatgatgaaaccctgtctctagcaaaaatacaaacaattagtggggtgtggtggcacacgcctgtaatcccagttactcgggaggctgaggtgggaagatcacttgagcatggtaggtggaggctgcagtgagccaaaatcacgccactgggctccagcctgggcaacagaatgaaactccgtctccaaaaaccaacaaacaaaaaaacataccttttatgtctacattgaagaaaataattccatgtctgctcttaagtgtctcatttggtgcctagaaacaaaacctgattaaatgtcatctacggtcaatcaaataaaagccttcgtggcaaactcacgctcgaagcaaagggcgtttgcctcttcaaggagctctgtgaggaagggaggtggctgaacctcaccctgcacaccacaggcccccgcgcgcctccctgcccctcctcagggccttcctctacctctcttctgcctggcctgcctctggtctcctcctacccccactaggctcagagaatctcccctccacacccacaccacaacctactttagaagggctgctgcatttcctccaggctttctgacccccttcctgtccctgcagggcaggggccccgaggagctggaggcccaagggccttgttctggtcccagggcctggggacacctgccaccgagggccaagaggaggatggacgtggacacagccccgagagcctggcccggacacagcagcagctctgcagaaccaaggcaagcattggggaccttgttgggagtcggggggcagcccaggggccagtgtctgaggtcctgctgtctgtctggccacccaggactccctcatccctggaaactgtgctttaccatggaggccacccactctgtctcctctaaggttctgaggctgaatgggctagggggcttgcggggaggccccagtgtccagcactgtgggacctggcagggtgcctgcggccaggacccagcggggccaggtgttggtctaacagtgcagcttcgttcatatccccagcccctgcccacctgctctgagcacagtgatggccctgggaggtgggcctgggcccttggcaggctggggacagcctagtggcccttgtcccatgctaccccctttcccacacagcgatgctggcatcagacaccatgctgagtgctggcaggggcgagggctgggaggcttccacacatggttccccatgcagtcccacctgtgggcatctggttgggggtaggctggaagctcggggagcctggagctgggacttctgtgcttgcctgggagctctgaagggtgaggctgggcatccagggtgacacagcccagggaaagacatgggggtgacgtgagaggtgcctggagggagctggcaggtatggacatgatggacacggaagcacggaggcgggcaagtggccagacgcatctaggggaaggtgtgggggaggcgcccttaggaagggccctgaagggctgtgggcagcagggagccctgggaggcctaaagcagagggcagatagatgagggctgttgtctcaggtgtggggcggacgaggtggggagccctcacccaacaggaggcgagctggtcctgtgtggcctgaactgcagctgtctcctctgtgaaacgggggtatagctgaccccagggggctgcctggagcatcccgggaggtgccaggcccaatagtgctctgggaaggacagggccctgggctgttgtgggaggcggcagatcctggtactcacatcctcctccttggggagggcctgatggttggctgaggcctgggtggagagcagagggttggttctgacagggttgggctggccagagctggtgctggggctgctgctgggggcccgtgcctctctgccgtggggtgcctggggctgtgacctcatgctctgtggcctgcagggcaagtgacacggatctgggcagccagggtggcaggatcggactggaccccttggcagggccgctgtggagacagcccaggggaaggggtgcaggggtctggacactccaatggccttgctctcgggctggcctgggcagcggagggaaggagaacccttctctgatactagatggtgcctgggagaaatcaaggcagagggtcctagccggtgggctctttggaggttgtggctcctgtccgggtgagagccaccatatattggggcctaacgtgttccctggcgctgtgagtccaggctgccttgggactcaggagggtggagcccaccccaccttccaagggccctggccatccctgcctgccgaccaccccactcctgggagcctgcttccctcacggcggcgggcaggccgtggcggtccccacgagggcctcctctccagggccggctgggcagggagccccgaggcctgcagccccctgactgccctccgatgtactggcggcagaaaagggctgcgccccacgtgcgcccttcggggcgcgcagtccgcccagtgctccccacggccgcggccattccaaggacctgcaacgccgcctctcccactccgctctctgggaagccaaagcctcccgggctccgcttccgcaccgcccctcgggaagacggcgcgaccgcgcccccggcacgccccgcccccggcaggcactgaccacgccctctcccggccatgcagagaccccggcccatgtttctcaactcgtcttctcgcttccggccccgccccgcgccggaggccccgccccacgctctttacctcttctgctcgaggcgggccccgccttactccctggtccccgccccacgcccgaggccccgccccgagctcttcacctcgtcttctcgcttccggccccgcccacgccccggccccgccccgcgctcctcacctgtcccctcgctgtcggccccgccccacgctcctcactttatcctcgcgctttcagccccgccccgcgcctgaagccccgccccacaccctttacctcgtccccgcgctgccggccccgccccgtgttgaggccccgccccgcgctctcacctcgtccccgcgccccggccccgcccccgcacttccggacgccgccggcgggggcgctcgggcctgggcttcggcgctctggctcgggctctggctcgggaggcgatcgtggccgctgccgccgccagagccggccggagtcggcccggagccgcgtccacgcggagcgggcgggtgggagctggcggctgggcccctgcggcgcccccgcggcctgccccgcgtccgcctccgggccgccgagccgcagccgccgagatgggggccgccccgggccgcgcccccgccgggtcccgcccgccgcgctgccgctgagcgcatgggcccggaccgcgccgcgccgctccgggagccgggcccggggtcccgccaccaccgcgcgcgggtgagtagggccgggctccggggcgggctaggccgcggtaggccgggcgggcgggacccggaagcggcggggggcgcgggtggctgacgcgcgtgggaccgagggggtgggcgcgcggggagctggggccggggtgtccctgggcagcgggactggcggcgcggtggccgcttggaggtccgaggcctcgggcgcgtctcggggcacggagcagctgcaggggccgcgcatcgcgtgcgggggcccgggagagccgggcctggagccctccccgccgcccagaagtcggcgggagtccggctgtcccggaggaggacactcccgcccgccctcgccgaggccgcgtgccgggtccgggtcggggttcggcctgagtagccgcgtgctccggcgtccgtaccctccaggttgatgccttgctgcccaaacactggtctttctcttgggtgtggttcttagattctacccccgccccgcactttggaatttagcccccgtgaaaccagagctgcactgcccgagcagtgaaactttcagcttggcattgaagaaagtagagaaaaacatgtcagttctctggggatttttctcagcccatctataagatatatatatatatattttttgtagagatggggtgtcactatattgcccagcaggtgttgaattcttggcctcaagcgatccacctgcctcagccttccaaggtgttgggactacaggggtgaccaccgtcctctaagataattttttttttttgagacggagtctcgcactgtagcccaggctggagtgcagtggcgctatcttggctcactgcaacctccgcctcccgggttcaagcagttttcctgcctcagccgcctgagtagctgggataacaggcatgcgccaccacatccggctaatttttgtatttttagtagagacagggtttcaccatgttgaccaggctggcctggaactcct

SEQ ID NO: 1853 - DNA, 6000 bp, Homo sapiens
tcatccctgctccctaaagctgccagaatcagtctcactcggcaggggtttgggctggctctcaccaccttcccttctccacattaaccaacagccacggctttcagaccacaggctcattcctggccttactcctctaaggaggggaactaaaatggccgtgttctggccaagtgcggtggctcacacctgtaatctcagcacttcgggtggcagaggggagagggtcacgtcagcccaggagtttcagactagcctgggcaacacagtgagaccctgtcacgacaaaaaatacaaaacttagccaggcgtggtgctgcatgcctgtagtcccagctacttgagaggctaaagtaggaggatcacgtgagcctggcaggttgaggctgtagtgagccatgattgtgacactgcaccccggcctgggtgacagagtgagaccttgtctctaaccaaataataacaaaatggccgtgttcttttagatgtcatctgaccaacatcccaaccaattcagacaactggcactctcacctcctttgtctcattgacaatactcttaccgttgcaacctgagctgcaaagatccgtggacacagggcccgggaccatcccagcctcggaggcctatttatccactcacaggctgccccgtacccacacaaacaactttcagaacaggatgcaggacgcttgttcttttttttgttttctgagacagtcttgctctgttgcccaggctgcagtgcaatggcacaatctcagctcaccacaacctctgcctcctgagtttaagcgattctcctccctcagcctcccaagtagctgggattacaggtgcccgacaccatgcccagctaatttttgtatctttagtagaaacagggttttgccacattggccaggcgggtctcgaactcctcacctcaggtgatccatccaccttggcctcccaaagtgctgggattacaggcgtgaaccactgcgcccggctaaggacacctgttctttacacctatctttggtagcgtacggccagcacgtttcagatgagctgctgcagaggtagcaatcactctcctcttagcagatctgagcatgagaggtccaggtctcactgctctcccacacacaaatgctgggcaaggcaagggcagagccctcaggtgctctaccagcaacctgcactcccaaaatgaccacttcctgtcctgtccacaagtcatcaggaaagtctggcaatgtttgcccaaaataaatatttctatgtccgtgaggtcgcccaataccaccgaccagtcaccctcccaaaatggcaccaagaccagcgtgcctaggattgttctctgtggaacaaaccctttcttgatttttcttggcctgaacttgtaacaggagagagcgagtgagcatgcgtttctatcagccactacaaactcttccttttttttttttttgagacagagtcttgctccgtcacccagactggagtgcagtggggcgatctcggctcactgcaacctgtgcctcccgggttcaagcgattctcctgcctcagcctcccaagtagctgggattacaggcatgtgccaccatgcccggctcatcatcttttagtacagacggggtttcgccatgttggccagagtggtcttgaactcctgacctcgtgatccacccacctcggcctcccaaagtcctaggattacaggcataagcccccgcacccccgctcggcatagaaatcctttctggtgttgctagaaaagcctaatccctttgctccccatttccacgcttgattggtccctcaaggttgtattcggggcatttccagtagcttccccatcactacgatgaaagctaaattcccctaaaacagtgcaaactggctgggcgcagtggctcacgcctgtaatcccagcactttgggaggctgaggcatatggttcacgaggtcaggagttcaagaccagcctggccaacatggcgaaaccccgtctctactaaaaatacaaaaagccgggtgtggtggcgcgtgcctgtaatcccagctactcaggaggctgaggcaggagaactgcttgaacccaggaggcagaggctgcagtgagccaagattgtgccagcctgggcgacagagcaagactccatctcaaaaaaaaaaaaaaaaaaaaagtgcaaaccagatcatcggcagtcagctgtcaaccatgttcctaaaaaaagcaaactcaggctctgaatagtctacgtgcctctctctagtagctcaactggataaacctacctcttcaaatttcttggtttttgcgacttcacaaatctgccctatcatccggatgcgattgttgaggccacattccatgctcagttcctggagagagatgaaagaagaaaaaggggccagtgctcaggccacggtctccttaactgcaagtcacaaaccacctaaagactcccactgcattttccagactagagacttaaaacagatctttctggaatcaagattcacttgacgagccgcggtggctcaggcctgtaatccctgcactttggggggccaaggcaggtggatcaccagaggtcaggagtttgagaccagcctgcccaacatgatgaaaccctgtctctactaaaaatacaaaaaatttgctgggcgtggtggtgggcgtctataatcccagctactcgggagagtgaggcaggagaatcccttgaacccaggaggcggagattgcagtgagccgagatcgcgcccctgcgctccagcctgggtgacaagagcgaaactcggtctcaaaaaaaaaaaaaaaaaaagatttactgaggggctttactgctccatcccgaggagttgagaatgtgcaattttttttcacaactgcaaatgttgtattgagataaaacataacatgaaatacaatttcaaactgcacaatttttttttagacggagttttgctcttcttccccaggatggagtgcagtggcgcgatcacggctcactgaaacctccgcctcccgggttcaagcaattctcgtctcagccccccgagtagctggaattacaggcgcccaccactatgaccggctaatttttggtatttttagtagagacggggtttcgccatgttggccaggctggtctcaaactcctgacctcaggtgatccacccgcctcggcctcccaaagtgctgggatgacaggcgtgagccaccgcacccagccaggatggactatattttattcatcagttgatgaacgttttagttgtttctaagtagaaaactttacaagtgcaaaaattcagcatttactcatgggcaaaacacaatgccaggcatgtgtgacaaagacacaaacacacataaaagataacgacctagcccatgtgcgatggctcatgcctgtaatcccagcactttgggaggccaaagcgggcagatcacctgaggtcagcagttcaagaccagcctggccaagatagtgaaactccatctctactaaaaatacaaaaattaaatgggtgtggtggcacgtgtctgtagtcccagctactcaggaggctgaggcaggagaaccacttgaaactgggaggcagaggtagcagcgagcagagattgtgccactgcactccagcctaggcaacagagcaagactcagtctcaaaaaaaaaataaaataaagaacctacttctcccaggaactcacatcttatcatgtaacacctggacatatccttacctgtgaagatgatgatactcaggcctcatctataagatgggctttctttcatcaacatctgaatagtaactcaagtgtgcctgaaccaggtcaccaagatcctgactttcgaagtctcctgaggaaggacatgtcggcctccaagtactggagacagcattcctgtgtagacagttgccagcaacccgtctcccacagaacctggtgcaagaccaaacccagccttctctgcatttccctctagcctagcaaagacacaggtagctcactcactctcagtatttccgcggtgatgataaactccgtctgtttaccctctgcagacctgggatttggcctcggtgttcccagtcccaacagaatcttaaacttctccttcaagcctgaatctttgcttgttggtttggccatggtggaccaggacgcaccagaaaacccctctgtgcaaacgaaacaggaatggggacatctgagcaacacctctgcccaccttccccactgcggacctccagccgtcaggaccctgggtctctggtgggcataacctttcctcccacactccctgggagaactcaactacagcccagctgaccagctcgcaaacaggcacctaggaaagcccgggagacaccaggcctggtctagagagctctctactcagacgctgccgcccgccccgcccgactcagtgcacgggttaggactgccgccgcgaagtcctgggagccccgacgtttgccgtctctcctctacccatgtgaagcaggagctgtcacggagccgcctgcagcagagacccgttcgcacccgccatgacttaaaactaagggatgctcggagctccggagtcgggttgcagtgggcgcgggtgagggcccgggacccggacactgcggggtccgcctctctaggccgctgccccgtggggaccgccacttgccccgtggggaccgccacttaccccgcgccgcgccaccgcgctccgggccgccccgacgcggagaaaggcgcacccccctggccccgggacgccgccggaagcgcgacccgcacttccggtagcggcattgcgcggagggccgccttgggagcttgctgggagttgtagttctgtgccgccctctggcggaaaggccggcgatccttgcatcacgtgacggggccgcatgggccgccgggatgtgtagtccgcaggagtccggcatgaccgccttgagcgcgaggatgctgacccggagccggagcctgggacccggggctgggccgcgggggtgtagggaggagcccgggcctctccggagaagagaggctgcagcaggtagcgccgcgccgtggctggagcgtgggaggaggcgggataggggctgcaggctggagtcccgggccgcctcctgcggctcccagctgcgcgggcaggggctgcaaacccggcagccgcgaacggttcccacgtgcggccctgcgttcccaccttgcgcctttttcccaaagattgcggtccgcaggggctgggtttcgggcgctccgctccgctgccccctttcgccccaagcaagaaaacgcttcctttcccaccactctgtccgggactctccactccaggctctgtgggtcccatccccgccctcctgcagtgaacttgctgtcctcggagaggctgggtgccaaggacacacgcagccagaagcctgctcccccagctcgggggagggtgcctctgagggaaaacaggaaagggcatggcacttattatatttatcctgcagccgttgaggacctgctgggggccaagcactgcagtgagcagtgagggacacggacagggcctctgcgctagtcccgctgggacttctgcagaattggccagagctggattcccataggcacccagggaccccaggggtagtccagactatgtcaggaggaactggtgcagctgggagcaggcaggtggtgatgccagccagggtggcaggagctttgatgccaggatagagtttggagtttattatgacagtaaacggaagtcaattaggaggttttgttgtttgttttgagatcgggtcttgctctgtcacccaggctgtagtggagtgttgtgatctcagctcactgcaacctccgccccccaggttcaagcagttctcctgcctcagcctcccaagtagctgagactataggcccctgccaccacacccggctaacttttgtatttttagtagagatggggttttgccatattggccaggc

SEQ ID NO: 1854 - DNA, 6000 bp, Homo sapiens
catagccaggtgtgccatcttgggcccaacacccggcagcgccaccagctcggccacagaggctgggatgtccccaccgtagtgctgctgcaggatggcgctggtctgcttgatgtatttcaccttgctctgaaagacaggggtgggttcagccttggaggcaagggcacagcccaacctgggaggatgcagcccccaggagacccacaggtggccagagctacctgcacctgctgaggacgtgtgcaagctcagcccccgccccccaggaggcgggaacaagcggagggcagcagggaggcccaaggtaggcctgaccccctcctcccacccgtgtgggccaatgatgcacgtgtaggctctggctggggttcccctgcccgtcattccctgccagcacccaggccaggccaagcaggccagccgctcccaggagtggggcttggctgcacctgcgccttcaggaaggagggctggagctggggcttccccaccagctgccaggcctgccgggtggttcccatcctgtgcctgagtggagagggctatttaaaacccatctgagaaactgcggcccacgcgggtgccaaggggaagcggccccacccaccaagctgctttcaacagatccgcccaccaccatccagtgctcggcggggttggggagcagcctccccagggctcctggagggtgaggggctctggacaggagggggtgacacaccgggagaggctagcagtaaacaaagggaaaggcgggtgggcaggcagccttggcggtgaggaagggtgggcaggcggcgaggcggggaagcagaggaaggaagggaggatgcgaacaggaaggccaaggagctgctgggactgggcgtcaggcctcagggccccacggcctggggggggcttcagggggaccccccgagcctgagatgcttgaccctcacttcctgcaccgtcgccacccccctcagccttctgaggtctctctcaggccactgccacccggcccccgttgccacaggcagggctcaccctccagaaaccgacggggtagatgagcttgcccagcgtggcatcatctgtctgcaggatgctgtccaccgtcaggccccgcgcccgcagtcgctgcatggcgcccgccgtcacctggtctttggtttggctggagagcatcagtgacagcagcacctggtacctgcgtacctgcttgtgcagtgacagggaccggggtggcggcgggtcctgggtgattccctggccaggctccgccccccgccctcgacacaccctggtttgttgccctgggccacacttgaggcatcagcctccccctgtggggtggggaggtctggtttgggtatgtttggtcatctacaacaccaggacaataatagtacctgactcactggagtaatgtgaagcttaaatgaattatctcagtgcttagaatcgtatgtggccgggcgtggtggctcgcacccgtcatcccagcacttcgggaggccaaggcaggcggatcacctgaagtcaggagtttgagaccagcctgatcaacgtggtgaaaccccgtctctactaaaaatacaaacattagctgggtgcggtggtgcatgcctgtaatcccagctactcgggaggccgaggcaggagaataatttgaacctcggaggcgaaggttgcagtgagctaagatttcaccactgcactccagcctgggcaacaagagcaagacttggtctcaaaaaaaaacccaacacgatcgtatctggcccatcactactgaacagccattggccactactattatgattgcttcgtgaatcatcacactaccctttaaaacaaatttttttttttgagatgcagtatcactctttcacccaggctgaagtgtggtggtgccatcttggctcactgcaacctccgcctccggggttcaagcgattttcctgcctcgccctcctaagtagctggggttacaggtgcctgccaccacacctggctaatttttgtatttttagtagagacgtggtttcgccacattggccaggctggtctcgaactcctgacctcaggtgatccacccgccttggcctcccgaagtgctgggattacaggcctgaaccaccatgcctggcccatactacccattttacagacaagcaaactgaggctcagagaggcctgtatccaagccacctggtagcagaatagggattagaactcagcttggtctaagggtttcaggccctgggaccgtgaagcaaaaggaactcttccttcctgatatcacacaaagcccaggtcacgcctgcactgggcagaagttcgagcacgaggccctaaaccactggtgtcctgacctgctgagtggctacagtgatgcaggcgatgctctggggcaccgggtgtccatcctcccaaggtgctgtctgcaggggagggtgccagccaaaagccaccgggtagaaagaaaacaaggaccttgctaagatggggggtcatctgggcagatggggcccctgcctacctttgggggggcactggagtcatagcagtgctcagtccccagatggtccacaggtgcatcctttttgttcctcatggcacggatgttgaccagctgttgctgccagtcctggggctcccagactggcaccttgaggggctcagccccctcacctttctcactgtccgagccctcataggccacacgcagtctctgtgctttccgcggacgcttcacggggctgtggcttttcctcgcttctgcaaaaagcaccacgcagtccctctggtggggccacaggtgaaggtagggtaggggtgccatcccgcctgctagctcacccctcactcgttcatgccacaactgtccatcatctaatacacttggggtgctctgccctctgcagtctggggtatgtgggccctccttatgccagcgaccctgacaaggtccatgttagctcatgaggactctagcaacagcctgtaccaaggtgcccccaatacatcttctatactgcaccagagacagtctgctaacacccacatcaggttgtgtcactcccttttaaaaaatcctggccggccgggcgcggtggatcaagcctgtaatcccagcactttgggaggccgaggtgggtggatcacttgaggtcaggagttcaagaccagcctggccaatatggcaaaaccccatctctactaaaaatacaaaagttagccgggtgtggtggcaggggcctatagtctcagctacttgggaggctgaggcaggagaactgcttgaacctggggggcggaggttgcagtgagctgagatcacaacactccactacagcctgggtgacagagcaagacccgatctcaaaacaaacaacaaaacctcctaattgacttccgtttactgtcataataaactccaaactctatcctggcatcaaagctcctgccaccctggctggcatcaccacctgcctgctcccagctgcaccagttcctcctgacatagtctggactacccctggggtccctgggtgcctatgggaatccagctctggccaattctgcagaagtcccagcgggactagcgcagaggccctgtccgtgtccctcactgctcactgcagtgcttggcccccagcaggtcctcaacggctgcaggataaatataataagtgccatgccctttcctgttttccctcagaggcaccctcccccgagctgggggagcaggcttctggctgcgtgtgtccttggcacccagcctctccgaggacagcaagttcactgcaggagggcggggatgggacccacagagcctggagtggagagtcccggacagagtggtgggaaaggaagcgttttcttgcttggggcgaaagggggcagcggagcggagcgcccgaaacccagcccctgcggaccgcaatctttgggaaaaaggcgcaaggtgggaacgcagggccgcacgtgggaaccgttcgcggctgccgggtttgcagcccctgcccgcgcagctgggagccgcaggaggcggcccgggactccagcctgcagcccctatcccgcctcctcccacgctccagccacggcgcggcgctacctgctgcagcctctcttctccggagaggcccgggctcctccctacacccccgcggcccagccccgggtcccaggctccggctccgggtcagcatcctcgcgctcaaggcggtcatgccggactcctgcggactacacatcccggcggcccatgcggccccgtcacgtgatgcaaggatcgccggcctttccgccagagggcggcacagaactacaactcccagcaagctcccaaggcggccctccgcgcaatgccgctaccggaagtgcgggtcgcgcttccggcggcgtcccggggccaggggggtgcgcctttctccgcgtcggggcggcccggagcgcggtggcgcggcgcggggtaagtggcggtccccacggggcaagtggcggtccccacggggcagcggcctagagaggcggaccccgcagtgtccgggtcccgggccctcacccgcgcccactgcaacccgactccggagctccgagcatcccttagttttaagtcatggcgggtgcgaacgggtctctgctgcaggcggctccgtgacagctcctgcttcacatgggtagaggagagacggcaaacgtcggggctcccaggacttcgcggcggcagtcctaacccgtgcactgagtcgggcggggcgggcggcagcgtctgagtagagagctctctagaccaggcctggtgtctcccgggctttcctaggtgcctgtttgcgagctggtcagctgggctgtagttgagttctcccagggagtgtgggaggaaaggttatgcccaccagagacccagggtcctgacggctggaggtccgcagtggggaaggtgggcagaggtgttgctcagatgtccccattcctgtttcgtttgcacagaggggttttctggtgcgtcctggtccaccatggccaaaccaacaagcaaagattcaggcttgaaggagaagtttaagattctgttgggactgggaacaccgaggccaaatcccaggtctgcagagggtaaacagacggagtttatcatcaccgcggaaatactgagagtgagtgagctacctgtgtctttgctaggctagagggaaatgcagagaaggctgggtttggtcttgcaccaggttctgtgggagacgggttgctggcaactgtctacacaggaatgctgtctccagtacttggaggccgacatgtccttcctcaggagacttcgaaagtcaggatcttggtgacctggttcaggcacacttgagttactattcagatgttgatgaaagaaagcccatcttatagatgaggcctgagtatcatcatcttcacaggtaaggatatgtccaggtgttacatgataagatgtgagttcctgggagaagtaggttctttattttattttttttttgagactgagtcttgctctgttgcctaggctggagtgcagtggcacaatctctgctcgctgctacctctgcctcccagtttcaagtggttctcctgcctcagcctcctgagtagctgggactacagacacgtgccaccacacccatttaatttttgtatttttagtagagatggagtttcactatcttggccaggctggtcttgaactgctgacctcaggtgatctgcccgctttggcctcccaaagtgctgggattacaggcatgagccatcgcacatgggctaggtcgttatcttttatgtgtgtttgtgtctttgtcacacatgcctggcattgtgttttgcccatgagtaaatgctgaatttttgcacttgtaaagttttctacttagaaacaactaaaacgttcatcaactgatgaataaaatatagtccatcctggctgggtgcggtggctcacgcctgtcatcccagcactttgggaggccgaggcgg
